United States Patent Application Publication US 2011/0183924 A1 - sequence listing, part 225

SEQ ID NO: 586343 - DNA, 468 bp, Homo sapiens
  misc_feature (93)..(93): n is a, c, g, or t
  misc_feature (310)..(310): n is a, c, g, or t
  misc_feature (397)..(397): n is a, c, g, or t
  misc_feature (411)..(411): n is a, c, g, or t
gaccaccggacatttctcgttgccgatttttttccagtaccactcccacgcttccgggttaattggctcgcccacggaaccgagaatgcgcangagcggaacggtcggtgccttcgatcgctttatcgccttccgccatcagcgcgcggttcgccgtgggtgcggtatagagaatattgacctgatgcttgtccaccacctgcgccatacgggcaggcgtcggccagttgggtacgccttcaaacatcagcgtggtcgcaccgcaggccagcgggccgtgacagcaagtaactgtgtccggtcacccagnccacatcggcggtgcaccagtagatatcacccggatgataatcaaagacatatttaaaggtcagcgccgcgtacaccagataaccgncggtagtatgcagnacaccttttggcttaccgggtagaaccggagtgtaggagaataaacagcgggatctt

SEQ ID NO: 586344 - DNA, 280 bp, Homo sapiens
ccacagtcctgcatcacatctatggtaagttcacggactgggcttcaactaccctgcttagtctatgagttagcgactcacggaccggcatgcctggagcgaagaggctgaactcggattctatacctgagcactggctggcatccggaatagactgatgattgatggcgatggagtctgtgggacatgctagctgataagcttcagcagggaccagttccgatacgtgtatgtgacgatagagttcgataactatgtaccctagctccaggtctatcgc

SEQ ID NO: 586345 - DNA, 316 bp, Homo sapiens
gctcagacgcagggtcacaccatgatgcccgggttcgtctagaactctgggctcacacgatcctcccactttgggaggccgaggcgggtggatcacctgaggtcgggagtttgagaccagcctgaccaacatggagaagccccatctctgctaaaagtgcaaaattagccaggcatggtggcgcatgctcgtggtcccagctactcaggaggggggaggcaggagaatcgcttgaactggggaggcagagttgtggtgagccgagatcgtgccatcgcactccagcctggacaacaagagtaaaacgttgtctcaa

SEQ ID NO: 586346 - DNA, 713 bp, Homo sapiens
  misc_feature (30)..(30): n is a, c, g, or t
  misc_feature (66)..(66): n is a, c, g, or t
  misc_feature (99)..(99): n is a, c, g, or t
  misc_feature (118)..(118): n is a, c, g, or t
  misc_feature (154)..(154): n is a, c, g, or t
  misc_feature (163)..(163): n is a, c, g, or t
  misc_feature (166)..(166): n is a, c, g, or t
  misc_feature (212)..(212): n is a, c, g, or t
  misc_feature (225)..(225): n is a, c, g, or t
  misc_feature (251)..(251): n is a, c, g, or t
  misc_feature (285)..(285): n is a, c, g, or t
  misc_feature (287)..(289): n is a, c, g, or t
  misc_feature (329)..(329): n is a, c, g, or t
  misc_feature (342)..(342): n is a, c, g, or t
  misc_feature (406)..(406): n is a, c, g, or t
  misc_feature (426)..(426): n is a, c, g, or t
  misc_feature (451)..(451): n is a, c, g, or t
  misc_feature (475)..(475): n is a, c, g, or t
  misc_feature (509)..(509): n is a, c, g, or t
  misc_feature (516)..(518): n is a, c, g, or t
  misc_feature (533)..(533): n is a, c, g, or t
  misc_feature (546)..(546): n is a, c, g, or t
  misc_feature (634)..(634): n is a, c, g, or t
  misc_feature (644)..(644): n is a, c, g, or t
  misc_feature (650)..(650): n is a, c, g, or t
  misc_feature (690)..(690): n is a, c, g, or t
ccaaagatcaacctctgccgacccggaggnatgccttccttatcttggatctttgccttgacattntcgatggtgttactgggctccacctcgagggtnatggtcttaccagttaggntcttcacgaagatctgcatcccacctctgagagggngccccaggngcngggtggactctttctggatgttgttgttagatagggtgcgtccatnttccagctgtttncctgctaagatcaacctctgctggtnaggagggatgccttccttgttttggttctttgcntnnncattttcaatggtgttactcggctccacttcgagggttanggtctcaccagtnagggtcttcacgaagatctgcatcccacctctaagacggagcaccaggtgcagggtggactctntctggatgtcgtagtcaganagggtgcgtacatctaccagctgtntcccagcaaagatcaacctctgcnggtcaggagggatgccttacttgtataggatctntgccttnnnattctcaatggtgtnactcggctccacntcgagagttatggtctcaccagtcagggtcttcacgaagatctgcatcccacctctaagacggagcaccaggtgcagggtggactctntctggatgtngttgtnagagagggtgcgtccatctaccagctgtctcccagcaaanatcaacctctgctggtcaggagg

SEQ ID NO: 586347 - DNA, 176 bp, Homo sapiens
  misc_feature (176)..(176): n is a, c, g, or t
ggccgtgcaaagttcggtggggggctcttagcgttggtgggagcctttgcacgtctccagcttgaattgtggagaaggccggagggagtcccataataaagacgcgcctcaaggtctaaaagactcgatttggtttccccaaaaggggggggaatacctttggtcaaggaattatn

SEQ ID NO: 586348 - DNA, 139 bp, Homo sapiens
ctttggagtagctaatccttctcagggatagaagatattcctcttgaagggcgcctaactcctgaggaaaacaatgccaattcaaggtaccgatctcaacacatcttcaacactatgtgaagggttccatcttaacctg

SEQ ID NO: 586349 - DNA, 136 bp, Homo sapiens
cgacacatgacagaggatcctggatgctgcaggcgcaatctcaaagtcatcagcaccatgtctgtgggcatcgaccacttggctttggatgaaatcaatgaagcgtgggatccgagttggctacaccccccgcgtt

SEQ ID NO: 586350 - DNA, 435 bp, Homo sapiens
ttggtcgggttacgcacccgaagttggctcgatgattcgctttggaatgttcttcaggtatggggcgccataagcgtcgctgcagcagctctcagtcagctgcgattcaaggacaacgttgccgttgctcaacgcctcggtgtagtcggcgatgattgtgttttcaattgcagaagtcattagtcacatctcccgtttagcagcacgaagtaccatcagcgcagcacgattcctcggcagagcctgcgatgggtacaagccctttggtgaccttgggatcccggattgaaggcgtgttgcagtcgaagaagccactcttgtctaaggctggctcgacatagcagcgcactggtatgaattggccttggtaaggagcggacatcagcagattgaaggtcttctcgcacaccgctgtacggacgccgcgcagagttt

SEQ ID NO: 586351 - DNA, 1027 bp, Homo sapiens
ctcaaaagctaactttaccacttgtaccactcttcttggaccctatacttagaagacctcgcttcttagagaaatggaaagtataaggcaggaatgcccttattaatttgtcttaccacatcatctaagtacatgataacaagtattatgtacataatccatctttcattccagatatactgcagtaaatgccctcctcctatcaaaagccaatccctaactgtgctaagagcttatctatctctggcattggtcattctcaacatcttcattattctttatttcctggagtacaggttatatatcaggcactattctgcatcctgggtatatagcatactgcagtgaacaaatcaaccaagcttactctcatggaacttctagtggggagaagttggacatttaacagtgtaatcacctacatttcattaatctcagtcaacaagtgctgtaacagaacatcacatttaggagaccaggcgcagaggctcacgcctgtaatcccagcactacggcgaggccaacggcgggccggatcacaaggcactggagatcgacaccatgtaggctaacacggtgaaacccagtctcctactaacaataccaaaacacattagacagagcctgagtggtcagagagacagccatgagggatcacaggctaattcaggaccgctggaagcactgagaaatggagagaaacccagagaggcgggaaggagcacgtgagctagacaagaaaccactgaacaaccaacacggcgtgacaaagcagagaaccaccgacacacaaacaacacaccaacaaaccaacggacaaaagcgaacacactcaaacaaaacgagaaacaatgaaagaaggcaacaaaacgacgagaacaaaaaccgacaccacgagaccacactacaaaaggacaacaagaaaacagccaacaccagacgaagtcacacaaccgacacacacacaaactacaataccatagacacaccccagaagaactcaccagaacacacccaatgcaaccaa

SEQ ID NO: 586352 - DNA, 241 bp, Homo sapiens
gggagtgaattcctgccagcacataaatttcagacttttgggccccagattgtgaagaataaatttctattgttttaagccactcagtttgtggacatttgttacagaagccctaggaaattaatacaaccctcaccacctgctttcccaagttgtgttaccaaatatctgatatttatttagcacttgttatgttcagctttaaataggataattacattaaactttagcagcaatctta

SEQ ID NO: 586353 - DNA, 541 bp, Homo sapiens
  misc_feature (89)..(89): n is a, c, g, or t
  misc_feature (95)..(95): n is a, c, g, or t
gatccatttcatgcgcgactacaacaacaggccttttttcttcattatacgaccgtaatacgctcggcatgctcggcgctatatatttngcctgngctgcgccctcctcctccccgggacaaaaaaaagatcgaagctcctgtggccaacagacttacctgcgcacgtccgccgcccaagaaatatgaatgtccttctctataagaggactgtagtgagaacacaccaaggttgtttcttcacctgttatagaacaatcagtataaacagcccggtgtctcctcaccaagtgttggcttcagcactcggaatcacctacagcatgaagatgaaactctcttactccacacaaactatgtcaaaaaaaacacaaatcagcggcagtaacaatattcagaccatttcttctgggagattaaaacaccatctgtcatctctccctttgctcacaagatagtctgttcaaacaaaaaccgcggggtactctgggctgccaacaaaccccccccgtcaagcatgtgtgaccacagcccacaaaaca

SEQ ID NO: 586354 - DNA, 331 bp, Homo sapiens
tgagatctaactgatcgcaccaagatctgcacaagatctgcacaagcccggtcgggctggaatagtggtctagcctgctatactcttagtagattacaatgcgagcatcccatccagtgagtcacctctaaatcacacgacaaagggacaagctcagcacgcagaatgagtcaaagcttagctaccaacccacgggaaacagcagtgattaacctttagcataaacgaaagttaactaagctatactaaccccagggttggtcaatttcgtgccagccaccgcggtcacacgattaacccaagtcaatagaagccggctccggcgctgcgg

SEQ ID NO: 586355 - DNA, 130 bp, Homo sapiens
gtctcctggggtggatgctcatcgagcaatgatatagtactttcctgcctgtttagttcctgtgcacagaccctaagtcaacttagcatttctgcatctgcgcactggtagttagctgagagcttccatg

SEQ ID NO: 586356 - DNA, 152 bp, Homo sapiens
tgttagttacctaagtgtgttccggtttaccaaacattccccgaactaaatactccatggctcatgtgttccagtctgggttcaaacgtgtgtgtaatgtttcccttaagtttttttacaccagagacgatgatttcccaataagaaagccg

SEQ ID NO: 586357 - DNA, 162 bp, Homo sapiens
cagggtatcgcctgcgccaggtcagcgccggaaacgcctcgcgcacctggcgcttgagcagcgcgatgcgggccggatcgatgtcggcattggcgctgccgatgtccaccatggccgcgatccgcagcaccccgccgacgcgcgcatagacgatgcggcgct

SEQ ID NO: 586358 - DNA, 712 bp, Homo sapiens
agcgggggcggagaaggaaccgccaggcccacgacagacggtgtctggggtgggggccggcctggggacgcgggctggccctgcctcgtgttctagcagcgggacccgcaccgcgctcctcgcggtctacggagaaggcgtgcacggtgcctcatcacggatgtgacggtagaagcgcccgtcaaggacctggatggatgtcgtgaagagcaccaaaatcatcatcggcatgcttcgtggccatcatcgttcatggtgcgcggtgatgctcgtggccttctacaaagtctgctgcaagcagtaccagactccacaaagcaccatgggcccatgcagcaccggtggagatcatcaaccgtggacggaggaagctgactcagcggactcggtcgtgtggcgtggtcgccagtggtcgccgagagcacaggtgggcgagtggtggtaggcgcggggaccactcgagacttggggcacatgtcccagccacctggagcgatgatacatcattaaaaagtatgcaacacacgtacgttagttatgggcagacattcaatggctgaattaacaagaaagattatccctggatgggtgggagggattggcggggaagtacaaaggtgtgggcaggagactctatgtgccattccagaaatacctacttgatactgtaccagtaacggggatgaaaaggaagaatggtgacaagtaggtg

SEQ ID NO: 586359 - DNA, 527 bp, Homo sapiens
ggaccaagagctcacaagctagtgatagaggcatataactgatgccatgaccggaacgtgttgacgatgctcagtgctcgaaactatagttatcgctgtggtaaccaagctgcgatgacggaacttgacgatactcttactctttgttgcaggttgacccaacacctaggaaaggccagccacatgttactagtcctacacgagactacttcctgggtgagattgtacacttggacaggattgccatgaaccatatatcgacctaatgggaaagggaagaggaacaattgcttcaaagagtcagaagagtagctcacattcaatgtcattaagagccgcgaacactttagaatgaaccagttcattgcatgctgaaacgacattgttggtgaagccagtttatggcataacgcgatttgtagagacactttgggttatctgagagagtgcggatagtaagatgtgaacattaacacctcgagtgtacactatgcttcatcatagtatagctatactcagcatgctgt

SEQ ID NO: 586360 - DNA, 113 bp, Homo sapiens
tagttgtcagaacacacgcgttatcaatgtcacatgctcctctgcgttggtgcttctgtaatgtctatactgccaaaaatccaagaatcacaaccaagtatctggtttgttac

SEQ ID NO: 586361 - DNA, 349 bp, Homo sapiens
  misc_feature (28)..(28): n is a, c, g, or t
tctcatagtctgtgcggcgcggtcgatnacgtcccacggctgttgttgatgcggacgctacgtctaactactgacccaccgtcgttgatttatccactactttgctcactctgcccctcctcacgacccctcggtgactacctatcgttacacctgcgctcggcgtctcgcacacgggtgtcgtcgtctgcccgtgggtcggggcgcgcccccccccccggggagtgccgccgcgcccttattattacttttttccccctgttctccccccacccaccctctccccctcttacccccccccctttaccccctttgggttttaaaaaatttaatgggggttttaatttta

SEQ ID NO: 586362 - DNA, 171 bp, Homo sapiens
ggggaggaactcggtagtacgtgacacattacaccaatacatcttcatctacttttacctgtgtgaagtggttcatccgcaagtcaaatctggttaaaagcatggactgtgccacacacccagtgatccatccaaaaacaatggactgcagcctaaattccaaataccaga

SEQ ID NO: 586363 - DNA, 943 bp, Homo sapiens
gcggcgggcgcggcgcgatgtgcgagcgggcggcgcgcctgtgcagggcctggcgcgcacaggctgctccttgtgagcctcctgcgagcatgggcctggtgcgctgtggcgggctgctgctgctgcggtggtgctgccagtgattgggctgagcccctggtgagtcgcctggccccctgcctgaccccgctggacccctggcccatgcgctcgcctgcgcggtgggcaccgcctgtcgatcctggcacattcttccgccgatgcggaacaaagagatgatgactgggaagcctgtccttggagcgaattccaggctcttcttatgcacgattggcgctccttaacttgagaaagaactggcaggatctcgtttcacacgattgactctgacaacagccaagccatgtggacaccaaggagctgtgctgattacctctggtggaccacatgggctgactatgaggcatgtcctggcctccccttggagaaccttgaacatcagtctgtccctgaacggccatggcgcgtactacccaagcaaacggtactatgagcggatgggaggcacacagtggacccaggtttgctgaccccgtcttcgctccttgaacgggaggacgagcccaaatcaggattccaagttcggctcgcttgaggctccaggtgtgaacgaagttgcggctgcgacgggccactccgaggaacacaagagccaagccgatgctcctgaacagcaacccacattcaaaagcccatgccaccaggcggcggggcgaccagaacccttgggtcgttgggaaaggcccccagattcaccggaccatctgagcccccaagaaccacaatgcctcacttgggcttattgcggaagccaacggccaaagaagccgtttcaatcttgcccacgcggagggacggcacaacgaacgacgggtctggaaca

SEQ ID NO: 586364 - DNA, 543 bp, Homo sapiens
catatactactgccagtctaaaatgtgtgtgcatttagacagataatgtaaatttaatcctagtaagtgcttattctgaagaccatcttctctctagcgtaaatgtgtgcttatcagtatagaataaatgtattcaaagaataggagagtaaatggccctttattcaaattgctttcatttatttttttcttttggaagtagtgaaagctttattatcaatcacttcatttttcaccagcttcagatttagagggtaaaaaaaggaagcatttgggggtcagtgttttgaatcaaaacaaatcaggaattgataaaaccgtagtttcctgactatttactgacctgattggagtcatattcttagcttggaagagctgtgttcattcattttttttttttcctgccgctgggtttagtaggtaatgtggaaaccatctaccataaatcattgctgcaagataacaaatagaattggaatctatgcttgcatttccctgagtttctggttttttttccttacatcctgctctgcctggcaaggc

SEQ ID NO: 586365 - DNA, 320 bp, Homo sapiens
actggcgacagatcaacactgagggaccacgtacagatgtccgtataataaagtatacaagaaccgtaaaggagtattcatcaagagatggatgagaatttctgcaaacaggtcacatctgttcttcagacaaagggcaaacctggaaattagatatgccagagtacttcagtaaactgggcgtcgtgctgaacaaagcattacagaacacgagaaaaagttgtgttagcagtgcctgggcctgggcctcagagggaatgaaatccacagcggacctgcatcaaaaacttggcaaagcaattgaaatggtcgccaatccg

SEQ ID NO: 586366 - DNA, 429 bp, Homo sapiens
  misc_feature (6)..(6): n is a, c, g, or t
  misc_feature (48)..(48): n is a, c, g, or t
  misc_feature (58)..(59): n is a, c, g, or t
cgcttnggcgactaccacctggatcttgaaagggaagtggcgccgctnagctacacanncaaggtgcttgaacagaccccatagatggggagaacctgatcgagagacgagcaatcaactttgaaattcagtcgcttaggcagcttttggccctgtacgtaatgattccctgccgaccctcttcaaggttcatcccagcgactgcccagttgaaggccgctctttcgtgggcattgagttccgcgtcgatagcgtcaattgactgccggtattgctgctgggttccattcgtaaccatcttcttgtctgtcggaccgctgcagccagctagcagtgctgatgctgccaggatcagtgttgctctgcttctggccgcgatgaatgaagcggtattggctgtacgctcatgcgtccccctgtcaatgaaga

SEQ ID NO: 586367 - DNA, 777 bp, Homo sapiens
  misc_feature (9)..(9): n is a, c, g, or t
  misc_feature (61)..(61): n is a, c, g, or t
  misc_feature (85)..(85): n is a, c, g, or t
  misc_feature (115)..(115): n is a, c, g, or t
  misc_feature (125)..(125): n is a, c, g, or t
  misc_feature (140)..(141): n is a, c, g, or t
  misc_feature (143)..(143): n is a, c, g, or t
  misc_feature (158)..(158): n is a, c, g, or t
  misc_feature (162)..(162): n is a, c, g, or t
  misc_feature (183)..(183): n is a, c, g, or t
  misc_feature (187)..(187): n is a, c, g, or t
  misc_feature (189)..(189): n is a, c, g, or t
  misc_feature (192)..(192): n is a, c, g, or t
  misc_feature (196)..(196): n is a, c, g, or t
  misc_feature (200)..(200): n is a, c, g, or t
  misc_feature (203)..(203): n is a, c, g, or t
  misc_feature (212)..(212): n is a, c, g, or t
  misc_feature (219)..(219): n is a, c, g, or t
  misc_feature (225)..(225): n is a, c, g, or t
  misc_feature (231)..(231): n is a, c, g, or t
  misc_feature (238)..(240): n is a, c, g, or t
  misc_feature (244)..(244): n is a, c, g, or t
  misc_feature (246)..(247): n is a, c, g, or t
  misc_feature (276)..(276): n is a, c, g, or t
  misc_feature (282)..(282): n is a, c, g, or t
  misc_feature (287)..(287): n is a, c, g, or t
  misc_feature (324)..(325): n is a, c, g, or t
  misc_feature (340)..(340): n is a, c, g, or t
  misc_feature (396)..(396): n is a, c, g, or t
  misc_feature (425)..(426): n is a, c, g, or t
  misc_feature (433)..(433): n is a, c, g, or t
  misc_feature (439)..(439): n is a, c, g, or t
  misc_feature (444)..(444): n is a, c, g, or t
  misc_feature (446)..(446): n is a, c, g, or t
  misc_feature (450)..(450): n is a, c, g, or t
  misc_feature (466)..(466): n is a, c, g, or t
  misc_feature (475)..(475): n is a, c, g, or t
  misc_feature (688)..(688): n is a, c, g, or t
  misc_feature (777)..(777): n is a, c, g, or t
atttcaatnactctgcatggttgctgccacgcatggaacatttttaggccaactttttacnattcccagttaaggtaagccgganattagatgatcttcattaagactccatggntgtctctccnctcctgctgccaaanngntcacttatagatgtntttnttgctctcccaagatcatgcntctntngtnttcntatnttnttcattttntgatgantctgtncttttnttcctgnnncgtngnncttctttttgacctcctaaggcataaatnaatggnaaatnagggctacatgaagagcagaagagaactcccattttnntgtccctagaatggnctagacttggcctatctcctaagatgtcccagatcttcacgtatttgtgagctgangcagtcacgggagagcccttggtttgaannctaaganaaaaanaaaananttcntcattgtgtgcattangtgtaaaanttgggttatctgaacgtgcatccaaattatatacaaagccgtcatctgtactggccaagaaatgacaaggtgaaaagtgattccaagtcactctctctatctgcccactgaatcgccacattcgatggctttcatctggacttcggcagtcatacaaagccactgacttatcatatgagccagaaatcagagtctgtgcttcaaatggatganactgcagtgtttggaccttgtctgtgtgtacagcgaggctagctgctggtttccccaaggacatatcccacaaaattacagtgttgttn

SEQ ID NO: 586368 - DNA, 124 bp, Homo sapiens
tacttccggtattgcacattcagtataatcattcaagtcatgcatggacctctagagctaatgaagtataaagcgttgagagtatgcatggacctctagagctaatgaagtataaagcgttgag

SEQ ID NO: 586369 - DNA, 122 bp, Homo sapiens
ccgcagctcctggacatcttccggatcgccaccccgcacagcctgggtagcgtgtggacgatccgagtgtggcacgcaccacaaatgggctctacgccctgacctgtgttcctgccagcacg

SEQ ID NO: 586370 - DNA, 224 bp, Homo sapiens
atgctgactattgcttgagccaggagtcacgcatcactatgtaacatggcaaaacccacctctaccaaaaatacaaaaaattaggcttggtggcgtgtgcttgtagtcccaggtactcaggaggctgaggtgggagaatcacctgagcccgtgagttgaggctgcaatgagccatgatcatgccactgcattctagcctgggcaacagagtgagaccctgtctc

SEQ ID NO: 586371 - DNA, 113 bp, Homo sapiens
cacaatccagcagctctggtttgcaagtctccactgcgtgcatcactggtcgtatggtgaagtccgacgtgacagaaaatcgagcacaggatcaactcatgctacccaaggta

SEQ ID NO: 586372 - DNA, 363 bp, Homo sapiens
gaattgcaaaaagaaaaaaaaaaaaaaggttctgcaaagttcactttctcccgtgtatggagttttatgaagccctcaagatggcaaatagattaatataaagtggtcactgattgcctggccatttattctttctggccctgaaatttcacagtgaatcttaacattttgaaagaacagaggaactgcgattctttagcttgggaagaacttattcagcataagactgatcagcaactttcactacacccttcccaaaccacccccaacctccatatcacttctttactgttagtttagtaaaagttcattgaccttaagtgaactcccagaaaactattaaactggattttgaaagttaaa

SEQ ID NO: 586373 - DNA, 166 bp, Homo sapiens
ttgtgtatattttggagagacagggttcaccatcttggcagggtggtcttgaattctgacttatgattaccggctgtgccctaaagtgtgggattacggtatgagctacggacggggctggggttgcactttcaaggtgtcttggcccagttccctcccctgtctc

SEQ ID NO: 586374 - DNA, 594 bp, Homo sapiens
gtactaacaccatgtgcatagtcctggactgtgcaattgtgtttacagtgtcactgtctagatgaacacagcttgtgcaggaacgaacactcagaacgatgtgagtagaggctgctgctcacctttggtgacctgagcaatcccaggcctgttttaaattcaaaaccgcacattgcagcacatgatgccagaaatagcactgaatcaagaaaatagccattgcggagctgccctcttgagtctttctgtccatcccattctattctgtactgtgacttcagttcaggaagtttggtttagtgtataaaataaaaggaaagagcaagtttgctcagtcaagtgatcagatcccgaatctagattcccagttctaaggccttatcacctcccctgcccataggccaacaaccatagttcctcacattagagattagcagactctttgtggacgagtgaatttcacaaacagcacaatatcagaagaaatcgagggcacaggccctcacttttcttcttttgacgcatcatcctgtgatgttgaaatgtcaattgcaggatgctgatgttgtgcacgtcaatcaccgggcacttgca

SEQ ID NO: 586375 - DNA, 461 bp, Homo sapiens
accagcctgtttaacgtggcaagacccccatctttacaaaaaatttaataattagtcaggtgtagtggcacacacctgtggtccccattagttgggaggctgaggcaggaagactgcctgagcccgggagtttaagactgccaagaccctgtctcaaaaaaaaaaaaaaaagccaagccaggcgtggtggctcacgcctgtagtcccggcgctttgggaggccgaggtgggcggatcatgaaggtcaggagatggagaccatcctggctagcacggtgaagccccgtctctactaaaaatacaaaaagattagctgggcgtggtggcgggcgcctgtggtcccagctactcgggaggccgaggcaggacaatggcgtgaacctgggaggcggagcttgcagtgagccgagattatgccactgtactccagtctgggcaacagagcaagactccatcttcga

SEQ ID NO: 586376 - DNA, 1292 bp, Homo sapiens
ggtggcctgtgtggctggaacctgaccaagaaacactgccatgccagtggcagggtgctgtgcagtgagggattctggtaaccccagagaggagtgggaaatcaggaaaggcttggagtgcagttggcgtgatctcgtgctcgactacaacctccacctcccagcacgcctgccttggactcccaaatgtgccgagtgttgcaagcctcatgaccgtgacaacagccacgtctgggacagtgatggagacgataaacacatgccatggcacaggacacaatcgatacagggaactgatgagggagcaccctaacatgaccggacatgaacacagaacgagggacagatgagggagcgcaaatctgatcacgggacagaaataacacgatcatagagaagatgagggaagatggtcataatggaaccgagcacggcacaaaatcagatcatggacagaattgagcgtggcagacgaagctactggaccacagaacaaaacacacgaatacaggggaactgatacaggagacagaacatacttgaacgagagaacaggcgcaacacacaaaacatgggaaaacaggacgagaacgcacgatatacgagaaacacagaaagcttaaaccaaacccaagaaacctgaacaaacacatggagcagacagcaggcatagagaacccaagggcaaggcccccggaacaagaaaaacggctgaacaggaaagcaaaaaaaaaacggaacaaggaaagaaacaaaacaaagcgaaatgagacaaacagtgaacagaaagaccaaaagaaacagaagaaagaaacggcaacagaaccatgaagaaacaaaaaaagaggaaaaaaaacgaaaaaaagaaaagcgagaacaacgacaccagacgaaaaaaaacaagaaaaagaaacaacgcaacaaagaaaacgaagggaaagaaaaaaaaaacagatacgaaaagagaagaagaaaacaaaaaaagagaagcgagacgagagggggaaagagcgggagaagcgaacagcgaagagagaaagaagaagagaaaaagaacagagaaaaggaagagtaaaggaacagaagagaacaggtaagagaaagtggaaagtaaagaataaaagaaagaaagaaagaaaatgagaaaagataagagagagagtagcaaaagaaatagttaaagaagattaatgagtgcgggtcttcagaaggatagaacaaggaaatagaaatagttgaggagagagaagagagagaggagaagacaaatacagagaggtatataattagag

SEQ ID NO: 586377 - DNA, 215 bp, Homo sapiens
accggaggtggaggttgcagtgagccaagattgtgccactgcactcagcctgggtgtcagagtgagctccgtctccaagaaaaaaaaaaaaagataagaccaattaattaattaaccaactttatgccaataaatttaagaagttagatgaaataaattccttgaaagtcacaacctaccaaaactcgcaaagaaatagataatctaaagaattc

SEQ ID NO: 586378 - DNA, 275 bp, Homo sapiens
cccgttaaatgggcgcaatgggcaaaccagattgtatcatcacttggtgatggtaaaaacctcaccagtaaacagagctagagaagcactattgaaaacaacacagttttcttgtaccctggcgtagcagaagtttgaactgaaaccactagctgcatggctagaacataactccagactggtgctggaacttgtactcagactggtgcgattgcgcttccagcgatctaggcaggtgcgcgatggcgataagaagagccaccaagtaaccaacg

SEQ ID NO: 586379 - DNA, 133 bp, Homo sapiens
cagctggtaccagagtcatggtggcctcactttcccagaaaagcctggattgagcttggtgtctgagagagatggaaggccaccatggctctagagaagtctcttgtcctggctccttctgcttgtcctgata

SEQ ID NO: 586380 - DNA, 430 bp, Homo sapiens
ttaggcgcgctctgcgtgcaatttcatactgtttccccttgggcccagcttgtagatgcatatatgagatcatagtttatgactggcggtcgcatcttccacttttttccatctcactggcggagatgtgggaggggagatcagaaactgcttgtctggatttggcggagccaggtgttatcttcctatcttctcctgtctgatctaaaatataacttcatttcctttcccataaactcagtcttactgcatcttcgagcctggatagtctgccgcggacaacgtgttgctgaattttattctagactcgtttgaatctcttataagtactgaccggtgatgtccttgtcatacgtcctacacagggacttccatttggccctggtttcattttcgctccaacatctcagtgtttgccatacaggcaatc

SEQ ID NO: 586381 - DNA, 109 bp, Homo sapiens
atagaaaacagagatacattccattccacaatggcagaagcaggaagcaggcagaagcaggaagctggcagtagcaggaagcaagggtcttaggggcagaagcaggaag

SEQ ID NO: 586382 - DNA, 292 bp, Homo sapiens
  misc_feature (240)..(240): n is a, c, g, or t
  misc_feature (261)..(261): n is a, c, g, or t
cgggcagatgacaaggtcaggtgttcgagaccagcctggctgacatggtgaaaccctgtctgtactaaaaatacaaaaatcagttgggtgtggtggtgggtgcctgtaatcccagctactcaggaggctgaggcaggagaatcgctccaacctgggaggcagagactgtaatgagccaagattgtgctgctctactctagcctgtctcaaaacaaaaaacaagaaacaaaaacaaaacanaacaaaaaaacactgtctcanaaaaaaaaggtgattaaagagagaagaaggg

SEQ ID NO: 586383 - DNA, 398 bp, Homo sapiens
ctgaagagacggagccctcactcaagacggcccagctgcggggacctctctctaaccccaccatgacgtaaacacaggagcccttcttttgagatggagtctcgctctgtcacccaggctgcagcgcagtggcgctatcttggctcactgcaacctccgcctcccgggttcaacaattctcctgcctcaacctcctgagtagctgggaccacaggcgccaccacgcctggctaatttttgtatttttaatagagacgggggtctcatcatgtcggccaagctggtctcgaactcctggcctcaaatgatccacccgcctcggcctcccaagtgctgggaccacaggcatgagtcaccgcgccaggcctgggagcccttcttggaagaggtccttgttt

SEQ ID NO: 586384 - DNA, 997 bp, Homo sapiens
aatgcttcatgtcaacgcgtggggatctccgaagcctatcgttcacaagggggctgggagctctcttttgagtgcctgctgctgtatcttgtccctccttcagtgaaagagtatttatccataactctatgggaagaagtcttttggattccattgtcgcgtctcattgcgtgtgtgctgccatctcagtcacacgctctactactctaagtgtaatcgcttcgactgggaggcagatgacactggtggaagacgcacctgtgatcacacaggaatcctagatgtatactcttgtatgaacaagacaagttgtcaccttctcagaccatggagtctaatgaatggagaagccatatgtttctaacaatatatgaatcatcttgtaattaatccatctctctctatgtcatttcgcattcagggttagggttgactaagtaggagtagaacgtaggtggaaggggttatgaatcttctggtaagtggtatagctataggggtgtcagtatctctgttaatctaccaattttcaggagatagttcggtaagtttaaagtatccatattatgaggtaggccgaatcgataagagaaatatgagttattctacatgttggtaaaagtgtatgtaagatctgtatagcatttttagcatgcgtgagagatttaaatgacttatctgagcgtgcaaggaattggtgctgttagtatggttttgactcttaacatcggcctgacgtctgcatttatgagtttagctaggagatactggtcttgattaccgggaaggaacggcctgcaccaggagttcaatttggatagaattgattgctctccaaggagtgataaccaagtttttgttacgcaggggcaattaattcgcattgtggggtataatagagccctggatccgggggggaggaaaaacagagggttgagtgaggggggcaaaatcaagaaaaaagggccaaaaggggaagaaaaaaatatagacagaa

SEQ ID NO: 586385 - DNA, 480 bp, Homo sapiens
aacgtgcgcgacatggacaacagaagaacagatcaggaaagctcatggcccggtgcagtggctcactcttgctatccagcactttgggaggcgaggcaggcgcatcacgaggtcaggagatcgagatcacggtgaagccccgtctctactaaaaatacaaaaaaattagccgggcgtggtggagggcgcctgtagtcccagctactgggagaggctgaggcaggagaacggtgtgaacccaggaggcggagtttgcagtgagccgagatcgcgccactgcactccagcctgggcgacagagcaagactctgtcaaacaaaaaaagaaaagaaagctccctttcctccctctgttgggctaaaagcaggacttagatttacaaagacaaatggccaccccctaaaacagggagaacaaagggttaccaccaaaaacaaactttaaaaccttataatctagagatagtactgagactgtgcc

SEQ ID NO: 586386 - DNA, 348 bp, Homo sapiens
ctgcgcatgctgtctgcaggtctcacatatccagaccagtatgtatgaaagcacagcacgtgacctggccagactccatctagttaaaggagacagctggccgccttgcttaaatatgtaccatttaaggggatgtcctctgtgcgcctggccacagacatccatttgaggacactacaagcaattttgcacagacaatattgagaatgcaaatttagagagagtaatcatttctctcaatgtgtatcattgtataaacaaacaattgtgtaaacttaatgttaatttacacttacacagcttatatggacaatttcctttcatctgacatttatttacaagggtacc

SEQ ID NO: 586387 - DNA, 195 bp, Homo sapiens
catatgtcgatctagagatcccctctcaaacatatctgagtatctatctctcttttggccttagggttcattgtgggcctcggtcagcagcactgggtgctcctccggtgccacgcgcaggctcgctagtaccaatcgtagtggtgccaggatcttttccactgtcgtccccacgctgattgtatcccgactaga

SEQ ID NO: 586388 - DNA, 361 bp, Homo sapiens
aaccacccccagtgccttcaagtacaccaagctacacattggctggcagggtccgggcagctccgccccagcctggcaggacaccagtgcctctgctcacctcagggcggcagggttctgcacacaaccaccccgtaacccttctgccatctctaccaagtcctggcagcaacaaaaaaggccaagcgtctcaccacccacagtgcagtgcagccaaggaacgaggtcactcacgggcgcagatgccaccagatttgagagaaggccacacgggggtaggtgtgtcctcccccggtgctggaggccggatgcctggtgggtgggcctgaactggcccaccttaatccttccagcctgggaa

SEQ ID NO: 586389 - DNA, 758 bp, Homo sapiens
ttattgttcttggtcgtacagtaaggttatcttttatttaaaagatcattcacaagaataccatatccatagattatactttctggtcatatagctgaaggtgttaagtggtttgggaatcccattcttcacatttcaaaagtcaactgggattggcccagcagttaagatgcatggtgtattggtgtctttatcttatccacattggaagatgtaagtaaggtcatctgaaagcatcgggttggattaccacccacataatggctatagtctattctggaagtataagggtgtggggttgttccaccaaatgtgggtctcttactctcagaagcagagaagctgacagggtggaaggaaggagagagagttctggtggattgctgaggcctggtaacaagacacaggtaggaaaagcccaggatgcacggcgtggtgaccaaactactaagcacattccgctgggtgccccaggccaccctggccctgccatcacctggagagggcctctttcccaggctcctgtatgccgagcgccccaaattggtccccataggacagactgggactggggtcctcgaaggatttccatctgttcaacacgcaggcgtcaagctcaaaaggctaacccctagaatcccaataattgtgaaccctgcctgggaaccgcccattgtgccccaaatgtggccggagactaacagtgagccccaggcacggaagccggaacgctgatagcactttccaggacggtatca

SEQ ID NO: 586390 - DNA, 506 bp, Homo sapiens
  misc_feature (217)..(217): n is a, c, g, or t
  misc_feature (252)..(252): n is a, c, g, or t
  misc_feature (392)..(392): n is a, c, g, or t
tcaggattttcaggcaaaacttgtgtgcttaccattggccataccaagtgttcttactgattgcatgtgtttggttctcaagtgctgccaccctgtgtatggcagtgccttacgtagaactagttttctgtgctttttaaaatcaagcaataacatccaaaatcacttctggaaaatgagcatatgtattaaaattaatataaaagtcattgtggtntactctggttctgtgtttaatgctgtactaaaatntagatctttttcaagttgcacagttcagaagtgtggtcttcaactgctaagtataaaattcagaaaattttaaagataagtaactttatctcatccatcatttcactgaaataaagtagaattagactagtattttaaanctagcttgaaattgatcaaataagaaagcagaggttctgatcctttaaagatgagatgttacaaaattttttatttcagccaagttttagttaaaggtttttcctagtaaaaac

SEQ ID NO: 586391 - DNA, 873 bp, Homo sapiens
ggagagaactagtctcgagttttgatatttttttggaaactttaaaatccctcaaaaacggtttattatccaagtgagtttggagtcccgaggggctaatcggaaggatttcgggtagcgagcgcgggcaccagggcctccaaacttttgggactcgcagcgacgagggtcagctaccagcagggtccggtcatacgggatgaggatgtcttggatctccttctgggaagcctcatccacatatttctggtaataggccaccagggcttgggagatggactggacggatagctataaatctggggccacgtgaccaccaccctttaacacggacacggattgtctaccaccagcaaatcgctccttgccgagaagcagaactgggctcccagaagcttgtcactggtagctgtgcagcggttacaatcatctccaggggccgcccgttacaccttgatgagaccattggccagcgttaggcatgtgcggccacagttgtcgctggtcttctgagggtccgaagacctgaaccgattagaaggggacccttggaccggcatgggtccgaagcgtggactagaacaacctcaccgcgcggcgcggaggtggcggtggaacggccatgcgcatcctaggcggagtcatcagggccatcagagaaggcggttgcccagtacaacccgggagccccggcccccaggcacacataactccacctattggcgccacggagcacgtgaggaggtcccgagaagttccggagaactcttggccccagctgggtttggagaatgacttggaaggccagtgccacaaaaactccatgaaacttctcaatcagggttgtgcccggaaccctggatctgcagactg

SEQ ID NO: 586392 - DNA, 407 bp, Homo sapiens
  misc_feature (241)..(241): n is a, c, g, or t
  misc_feature (270)..(270): n is a, c, g, or t
gactgtacattttagtgatttgaaaaataactgacaaaccattgaaacagtttattttatgttggaagagatggcgcagatgtgtgtcagaagggagatcacggtgtgagtttcgtagctatttaagtgatacatacctctagtttttgtatgtcttttgagatcctgagttcatcccctgtgaatcagagtgcacaagcacctctcctgtgagtggctaatgagaaaagggcccacgacntcggggattctccaccccccaagatcgancccaggtgagggaggggcagatctggacagcagaatgttataacgcaagttcatgtgttgctcccaactccattctcttttctctcgtgcaaccagtttgcccattctcttcctattacttgctccagggataggta

SEQ ID NO: 586393 - DNA, 268 bp, Homo sapiens
  misc_feature (10)..(10): n is a, c, g, or t
  misc_feature (32)..(32): n is a, c, g, or t
ggaagactancaaaactaatccaaaaattaancttaaagtcaaaagcaaatgaaacaatggacctaacgtgtgtccaaattggtagcataactacacggaattattttcaaaatgtcgttaaaacagtaatttgaggctaggcctgtaatcccagcactttgagaggctgaagcaggagaatcacttgaacccaaggggcagaggttgcaatgagttgagattatgccactgtactccagcctgggcgacagagtcagactccgaccc

SEQ ID NO: 586394 - DNA, 137 bp, Homo sapiens
  misc_feature (134)..(134): n is a, c, g, or t
cagaacgccatcactaaatcgtgtctggtagcatagctggtggttcgctggatcagacccctcctttcaagatctctgtgaggcttcgaagctgcagctcccgcaggcctcctggggaggcccctgtgacaggngtg

SEQ ID NO: 586395 - DNA, 139 bp, Homo sapiens
ttaactgcatttggagaactgcatcacacttttaaataaaatatacaacacacattttgcatagctaagaaactacaaacttaggctgaattactgcgaaaagatctgaataaaaaaagatgacaagctaacagacgga

SEQ ID NO: 586396 - DNA, 1188 bp, Homo sapiens
tctgggggatagatcaatttaaatacaattaatacattcatgctggtggggggtaacaactttcacattaatttggtaggactacttttctcaactcatgacaaaggccacaatccaaaagtataaataaaacattacaataaagtttacaaacaaatgtggcacaagaggcaccaattttgaagattattaaacgagaaaacacaatcgtgaaactagtggctatcaacttgaaatatattttcatttccagaaaaatatttggtctttttaaaccacgtgtcctcaatttggctagtgggtggcacacgtttgggtgttacaccgtgggtgaactataactactataaatacacccatatcaactatgttaaacaatttataaattaaagccattcacataacgcggtataaaacaacctaaaaatatttaacaatatatgtctgaatattttataacacatatatatttaaaagtgaaataaatatcgtgctaaaagtggtctttacatttacccattatcagataaatcagtgtttgaacaataacagtgcttttatcttccccttatagaaatctcagttacactccagacatatatacactctgagacataacgtggtgaaatttcagccaagggattatttaccaacaagaaacaaacagagaaagaaaaacaaaaaaaaaaaaaaaaaacaaaaaccacatgcaacgacaacaaccacaagacaaaacaggggggcgacacagataaaagcaaccacgaaagcgacgagccaaccgataacgagaaacagcgacagttacaagaaaaaacacgcgcccaaaagaagagagacaccaaaaaccaaacaaaaggaagcaggaatacacaaaaagccggagaggaaaaaaagcgcaagaggaagtaggaggaggagcacagacgagcgggcagccgcaaagcgggaaccaaacaaacaggaaaagaaaagccgaaggaaataactaacgagagcaagtggggaggcaacacgaattcgggggagaaaagaatctctggatataaaatcaagagcgagcgacagacgaatcagaagccacaggaccgaacgaaacgagagagcaagggacagacagcgcgaacagaaaccaggacagacaccgcgagaacaaccgacccacagtcaagagaccacacgcgggag

SEQ ID NO: 586397 - DNA, 1257 bp, Homo sapiens
  misc_feature (667)..(667): n is a, c, g, or t
ggtaacaccatgtctgtgcccctgctcaccggatgctgtcaccgatgtctggcagctgagcgaggaaacggcccgcggtgattgctaattacatggcacttggacgacacagggcacagctgagttcgtgacgcgccgtctccatccagtcccggggtcacctcaacgttcgagatagagtatgtccgccatgcgcctaggatccctgtgagacctcaagcatgaacatggtgatgaccctccatggatttgacctgagtgtgcgtgcttgatgtccaggagtcggccccaagatggaacgaaggactggacaatcaatgaatgcgtcggtcaagagaaacattcaatgggccttgagttggactcattgacacactgacagacagcgggactcgccttgtccaagtcgagacttcgtcgctgagcgaagagcatttttccagcatgaggccatggcgtgcccccttggtacacacctccttatcgaacggagggcactacactcattgccctctcacccacttcatgcgccttgggtctactccttgttgcgccgttttagaggcattgtcattggaccttcgcactacattgtcaacgctgggaggcccttgtctcctcccgaaaggccagaccttaaattggcgcgcagagtgcccatatgtgnaacgcatgagtccgattatcgtcacgatgctgccggaatgggggggaaagccatagtgcacaccgcaaatggggttgcctctggttgcggggacttttgtggcgggggctcgcttgccactgggcgctggagagcaaaggcagtcgctggatcctaggtcaaagttgaagacaacgacgttggcaccagcggtggattacgcaaagtgttgcgaaatagcattggattatggcccccagggggtaggtacaatgcggccaaccaaaggcttttccctgtggttgcgcttactaaggggaaggaatttggggccatgggcgttggttgggacactgtggagacttttatcgttgtggacaggccaaagggccttgggcaatggcccgttcaccgtgtctctttaaacgggttagagattccgggcttgtggactcggccaaagagtggcccagtgctaagcacacccagggcacatccagttgtggggggcgaaacctcctaggggataagaccaaaacggatcggatggaacatgccaaatcagtgggacgcatccttgacgccgccggggcccgtaaggggacaccgcg

SEQ ID NO: 586398 - DNA, 1100 bp, Homo sapiens
tgggtgagctctacacattcgagatgaacaaaacctcatcttagtgataggccatatgctgcagctccggtaatgagtgatgctctagtttcgaatgcgtttgaagctaccgatcagcatgcacgatacaggacgacacttcggaaggctattgaggcttcacgtggtagactgggatcaatggtgtgaaactttactacaattctacgcattcaatcgcgtgaactgggacgcacacctaatagttgggggacacgatcaagtcattggcgccacaggaaacgcccttgggtcattcgattcgcaagaacaataaggacctacagttatcgcaagttgtattgatatcctgtggttcgtctccgaaccttaactaaccaaaacaaggatttctttgtacgtgaaaacaactaagtattccctttgcgtgggcaaaggttgttgatacaccgcaaggcaccttatcgacgtttcgtttccgaatgtgggacccatttcaaggaaaagggaaatatgtgactttatgtggggcccttcatctcttattcggaaagcccctaagggtaccttccagctggtgggcctcggttaacctttctaggcttggctttctccaatatgctagcccaatttacacgatatacgtagaccatgggtgtgggacccaattgtcgagataggcgccggtagcacgaaccacgggactccgggcaacgcgctggggccagcacttgcacaaagtgaccccaatctatattaacccaggcgggacaacttcatgaggcaaagataggtccgaaaccagatggttttaccatcgggcgtcttgacttccctcttgaatgcttcctatcgtccaggggatcacagcatgccttcaacttgatccaagaagaccctattgaaatctcggcgcgcatatctgcctacaacacagccatttctttgtcacaaggcctagggccacactccacgtgtgatggcctccacaccgccatgaacctgtaaacgtggcctgtatctttcaacatctttatcagcacagaatgatcttttcgccatcaggaaatccactgcagcaagcaagcgtgatcctcgag

SEQ ID NO: 586399 - DNA, 485 bp, Homo sapiens
  misc_feature (6)..(6): n is a, c, g, or t
  misc_feature (23)..(23): n is a, c, g, or t
  misc_feature (161)..(161): n is a, c, g, or t
  misc_feature (176)..(176): n is a, c, g, or t
  misc_feature (472)..(474): n is a, c, g, or t
aagacncctgcggggtccctttnccctagaacatttaacctgagaaatccggtgttgaatgtttaaaacttctaaaaactgttattattactgcccttgatgtggaaaattcgtgggtattcctacccagagtatagcccagattatcatgaaaccacagnaaaatatctcccaanagtttccttaaagtccataattttgggcccaggcacggtggctgatgcctgtctgtaatcccagcactttgggaggccaagaagggcaaatcacttgagctcacaagtttgagacagcctgggcaacatgatgacatcccgtctctacaaaaaatacaaaaattagccaggcatggtggtgtgcgcctgtagtcccagctactcaggctgaggcaggaggatcgcttgagcccaggaggtggaggttgcagtaagccgagatggcaccactgcactccagcctgggcaatagagcnnncaatctgtctc

SEQ ID NO: 586400 - DNA, 1243 bp, Homo sapiens
ccggctcccggtccctggcccctcagcggcatggcgtgcggggcaaactgctgaagctggcccatggaagttctgaggcggctgctgctgagcccctggctcccctgaagctggctgtgcgctgctgccctctctgcccaggccccgactcctgggcctacaggccccctggacggcctgagccggccgcctgcgcgtttcatgacgcatgaccccaccgacagagtcttgcatgcagccctgccccgcccggcacgcgagctggctgccgttccaagctccggaagcaagactctctctcaggaagcactacaacaccaagcacatcatagctcgcttattcacgagcgctgggcacgcaccacttctacgcaaggctcaggtagcgtataattccaggagctgcacagccttgctgcctctcgagacaatgtcaaccgcttcagcttcccatcagggcagcttcaactaggcgaccgtaaaggcttcttcgcagggcttacccgtcagtggtagttgaacgcgaaacgggagcccacgaccgcagcaatcttaacaccatccgtagcaaacgcctttggcgccacttaaactagttggctgaacgcgcgccccattcctctaaccacacgcaaccttaacttgcacaggcacttacacagacttcggcccggcagcggcacggatacttggaacgccacaagagttccccttcaacacttagccccaaaggagccctcaaggccaggcacaccaaagtcacttgaacactacgatatttaggggtgcaaagagttttccaaccagcactttgcaacttccccggaacctctcacttggccgaaaccggcgctacttgcgcgcacccaaaggggccccaaagtcagacacgggccgtaactaggttgcatccccacttggctaccggacatttctgggtacaaacgcacattaacttcctttcgggaagagttacaccccacagagcggctatcagggagccgcagttccagaaactcgaaaggcaacttgggcgctttgagccttgagtctacgcaaccagctatcacgcagttgcgccaaagcccagtcgggcgacctattctgcgaagctatggttccaaccacggactcttcgtccaccagtcgctttccccagacaaccgcattatccagtggcagcatctcccccttgcagacgtgaaaacccaaccgttcttaacaacacgcgcggactctaccg

SEQ ID NO: 586401 - DNA, 261 bp, Homo sapiens
aagcagtttcctcaagagacatcgggtacatgacacgtactacttagtaacccactgcctctatgtcctatcgctaggagctgtatttgccatcataggagccttcattcactgatttcccctatactcaggctgcaccctaggagcaaacctacgccgaactccatatcactatcatattcatcggtgtacctctaactttctgactcaccgcaccccttagaactaggtgtggaggaaaccgcggtcgaattcgtactc

SEQ ID NO: 586402 - DNA, 205 bp, Homo sapiens
  misc_feature (16)..(16): n is a, c, g, or t
tcagtacatgggaccnaaaggagtggcactcttctttaaggtttgttttaataactggttatttgggggtttctgagaatattgcctgtgtattaccttggggttgtgtttcagttactgggagtttgttcaatccacccaaacttgggaggcagcatcatgtagaagaaagggtgtgggctgtgagccatacagcctaattatt

SEQ ID NO: 586403 - DNA, 1424 bp, Homo sapiens
tggtaattaagttttaatttcataatcataaacttaactctgcaacccagctaggcatgggagggaacaaggaaaacatgtggaacccaagagggaacgtgcagcgagaagcacaaagaattctaggatacgtgcgagccaaagtgggggtggagggggtgctcttccgtgagcctacagaaaggaagtgatcgtgggtggtttaagaataaaacacaagttcaaactttattctcgagttgtgctccaacagtctcagaaagtggtggactctctttggccgtggctctttgaccaatctccgtggaccccaaaaggcgcctccatgtggccctccaacaatatattctcagtggcctttctttctcccctttgtgcacaaacacacccaccatgtgtctgtgtgtccactctcacaaacccaccttacaatgtctctatgtggacagggtgtgtcagagatgtataaaaacctgtggagaaaccccattgtgtggtgtttgtggggtctccagcgacatatgttggaggcgcgggaggtggcggcattacacctgcggacagccgaagaaagcgacaagagagagaggagagagccaagtctctcacattgtggtgcccgcggggagagcgcccttgtgacaacacacacagtgtaaggtggtccccccctcacagggaataacaaagataccagggagccaccaaggacccacacttctaaaaaagaactcttaccccaaaaaaacccccacaagagaaaaagcctggcccacagggggggagactcattagaagaaaacgcgcggggaccccacagttggagagcacgtagcaggagaaaaagaaaagataagagagcaaattacaacactaccaaaaccacatacaaaaagcccgagatgggacaagaaaccgatgggagacacaaagacatcacaatagaggaacaaatcaggacctatcatggcaaacaagaccaacaaacccccacgggacacgacaataccccgggcgataacaaggcaagcacagaattgagaaggagggagaaaccccgcaggaaaagaaaggcagagataaacaacaagagatagggaaaggaaacaagtgagagtgaaacaaaaagaaaagcaaaaaacctcggagataaaaagaatgaaaagtgtgacaaagaaacaaaagagaagaacacgcacgaaagggaatgagataacgagagggccacgaagcgagcccaagcggcacgatgacggagcggagagacagccgaataagtgaagatcagggaagagaaacgagaaacaccgagagagcacaggtaacccctgaaggacaacaaaaccgagagaaacaaaaaaggaaaacacgaaggagacagagccagagaacaactagagacgcaaaacaaagagagtgagcga

SEQ ID NO: 586404 - DNA, 683 bp, Homo sapiens
  misc_feature (512)..(512): n is a, c, g, or t
acttatcgccgtcttatatactacatattctgtttatttatttatggtttgtttcatcattaaaatataagctcaataagattataaagttttgttcattttgttcactgatctttccacagagcctcaaataatgcctgacatagagaaggcactgaatatataatgatcatagcaactgaatttctcaaacaccttttgtttgccaggcactgttttaagtgttttgcatttattctttcattatggatattaagacattataacgtgccttagtgcagacacaggatcagcacaggttatgtagttgaacatacatactcaggggccatgccaaactccacagtgatgcaggatctcccacgttgtagtgtcacaggttttctgatcctacccctaaagcatagtctctattctatatgagtaatatgcactaatagggggactctaaataaccaatatgcacttacataaagccagatttcatttttgctgggatatttctttatgtngtttgggagagggtgatgcctacaagaataagattctgatgacacatacaagctagcccacctgattcgatccctgggtgaacaggtatctcttttacttctttaagctcctcaaggaatacatatatttcactttattaacttcaagtttcttatctttgagtctctcct

SEQ ID NO: 586405 - DNA, 250 bp, Homo sapiens
  misc_feature (1)..(1): n is a, c, g, or t
naaatggagggtcccacccaaaaggtcccccctgaaccccagccccctccccatggaaaaacaatggtgtgccaattaggggggaaaacgggtttaaggagttttttaaactaaaaaaaagggggaaaaatttttccggttaaaaaaaaaatggccattttaaaaacttgggaaaatgcaaattaatagaaaaaaaggggggggaaaaaacccttaaaatccccccccccggaaaccccccttttgaaat

SEQ ID NO: 586406 - DNA, 317 bp, Homo sapiens
  misc_feature (128)..(128): n is a, c, g, or t
ccccccgggttttttccccccccttttcccttggggaacccggggggcgcccccaatattttttttggtgggggtcccccccccgggggtttttttgggccctttttttttaaaaaaggcccgggganatcctcccgggggggggtcccgggccccttttcaaaggggggattattttttttagcccccattcccggggggggggcgggggtccccttttttttcccccccctttggggggggggggggggggtttttttttgcccctggggtttccccccccttttgccccttggggggccccccccttttcccca

SEQ ID NO: 586407 - DNA, 971 bp, Homo sapiens
  misc_feature (123)..(123): n is a, c, g, or t
  misc_feature (125)..(126): n is a, c, g, or t
  misc_feature (128)..(131): n is a, c, g, or t
  misc_feature (136)..(136): n is a, c, g, or t
  misc_feature (139)..(140): n is a, c, g, or t
  misc_feature (154)..(154): n is a, c, g, or t
  misc_feature (166)..(166): n is a, c, g, or t
  misc_feature (191)..(191): n is a, c, g, or t
  misc_feature (205)..(205): n is a, c, g, or t
  misc_feature (210)..(210): n is a, c, g, or t
  misc_feature (221)..(221): n is a, c, g, or t
  misc_feature (260)..(260): n is a, c, g, or t
  misc_feature (273)..(273): n is a, c, g, or t
  misc_feature (597)..(597): n is a, c, g, or t
gtcgacaacggtcaactctcccttatccacacacagatggccacttctgcctccatccactcaatgccaacaggcaccattcctccaccgaccacgatcaaggccacagggtccacccacacngnncnnnnaatgncanngacaccagtgggancagccaatcccnaagctcatttagcacggccaaaacntctacatccctacnttacnacacttcctcnacacaccatccgtgaagtcaccccaacttctaccaccancatcacccccaancacaccagtacaggcaccagaacccctgtggcccacaccacctcggccaccagcagcaggctacccacacccttcaccacacactccccacctacagggagcagtcccatctcttccacaggtcctatgactgcaacatccttccagaccaccactacctatccaaccccatcacaccctcagaccacacttcccactcacgttccacctttctccacctccttggtgactccaagtactcacacagtcatcacccctacccacgcacagatggccacttctgcctccatccactcaacgccaacaggcaccattcctccaccnacaacgctcaaggccacagggtccacccacacagccccaccaatgacgctgaccaccagtgggaccagccaagccctgagctcattcagcacagccaaaacctctacatccctacattcacacacttcctccacacaccatcctgaagtcacctcaacttctaccaccaacatcacccccaaccccaccagtacaggaaccccaccaatgacagtgaccaccagtgggaccagccaatcccgaagctcatttagcacggccaaaacctctacatccctacattcacacacttcctccacacaccatcctgaagtcacctcaacttctaccaccagcatcacccccaaccacaccagtacaggcaccagatcact

SEQ ID NO: 586408 - DNA, 219 bp, Homo sapiens
gcgtggtcgcggccgaggtacggaatagaatggaatggaacgaattgtaatggaatggaattgaatggaatggaatggaatggaataaacccgaatgcaatggaatggagtggaatggaatggaatggaatggatcaacccgaatggaatggaatgtaatggagagtaagggaattgaacagaatcaatctgaatgtaatggaatggaatggaacggaa

SEQ ID NO: 586409 - DNA, 670 bp, Homo sapiens
  misc_feature (288)..(288): n is a, c, g, or t
accacctcagccaccagcagcaggctaaccacacccttcaccacacactccccacctacagggagcagtcccatctcttccacaggtcctatgactgcaacatccttccagaccaccactacatatccaaccccatcacaccctcagaccacacttcccactcacgttccacctttctccacctccttggtgactccaagtactcacacagtcatcacccctacccacgcacagatggccacttctgcctccatccactcaacgccaacaggcaccattcctccaccnacaacgctcaaggccacagggtccacccacacagccccaccaatgacgctgaccaccagtgggaccagccaagccctgagctcattcagcacagccaaaacctctacatccctacattcacacacttcctccacacaccatcctgaagtcacctcaacttctaccaccaacatcacccccaaccccaccagtataggaagcagcacacccatggcccacactacctcagccaccagcagcaggctaactacaccattcaccacacactccccatctacagggagcagtcccttctcttccacaggtcctatgactgcaacatccttccagaccactactacctatccaaccccatcactctctcagaccactcttcccactg

SEQ ID NO: 586410 - DNA, 1498 bp, Homo sapiens
ggatctgcatccacaccaatgcgcacgtcagccgtggaggtgtcggcgcgaggacctagctcaccgtgctagtacgcagacatagtgtaggcggaacggctagtaactggtcggcttatacctagctagaagccttgcgcaactatctaggcaccaacgcaacaacgggcctaggctatctctaggctagggcctactaactgaaataccacagtgctacggcgactgccacgaacacggtaaactacgcgatacaccatccgcctgactgaacgacaatccaaccagcatctacaacgcgcccatccgcagagcctacacgcaactgaccaacagtgcgagcagaagagcgcacgaactaccccgcgcacagaacgcttgctcacgcccacacggaaatcatagatgcaagacccatagcgccctaatccacgactccctgtatccgcattaaccacatcaccacgggcacccaacgcgccaccgtatccggcgccacttacccaaactctacacccctaacccaagaaccgggatcactccgcaaaacgtcacggtccggcaagccacacgggtgcaaccaaattcccagttagcgctcccccgcaccgcaagtacggttaacccgacaaaagcaagaacccgctggcccgcccccggcattcgccgccacacgacggcggacacagtgcccagtgtacatcccgtacccactaggccttgggttaaacatagctacctgtcgcaatcctgttgtcaccccccctggagcgattcccaataaacccgcacaacgcgcctccccacacacaccgacaaagcacaacgggcatacagcccgccgcacaaccccgcaaaacagcgaggttcgcaaacaacccctcgcgcgcacacaggcaaaagagaccactggaaacaccgtcgcgcccggccaatgggcggcccaccgaacctcgggcacgcccctcgactaatttacacacccgtgtaagaaccagataagtttacaacaccaacctggcgggccgcgcccccgtctagagcgcctagcacgatccaaacggccacatttgtgtcgtctcaaacgtgcccaaacacacttatgggagtgtagccccacaatcactgaaagacgcagcagccaccagcctttagataccgccactatctgtcctcgcaccaccccacactaaggcagccctaaatttaatgagggggacagacccacacacaacaaaagaccagagatagttccaccactccatacattatggacagtgataaacaaacacgtacatcagcacacaaactacgaataatgacggagaaccgacccccgcacttacgagaccagaagatgtcgatgaggtcatgtatggtgcaaccagccccgcaggacaagcaaacgtattgaggctacggtcgtgccgacgtacaagtcatccccacatagcacatcgcgaacaagccacaactaacagtagcgtaccgtattaaa

SEQ ID NO: 586411 - DNA, 296 bp, Homo sapiens
  misc_feature (89)..(89): n is a, c, g, or t
gcggggagagctgcctccacggccgggcacccagaccccaccgtcgcagtcgccaccacctcagttcctccttgggacccgcaattggntttggattcctccagtgcacttttaactcgattggccaaggattactaagactcacttctgtcctcatcccagtcgcgccggcggtgaccatctcggctcttttgggcttaactgccgctcctctggactctgtctgactctgggggcacatggacacagtgggatggagattcctgtgaccctatcattaaagcaccgatcagaga

SEQ ID NO: 586412 - DNA, 743 bp, Homo sapiens
  misc_feature (123)..(123): n is a, c, g, or t
  misc_feature (125)..(126): n is a, c, g, or t
  misc_feature (128)..(131): n is a, c, g, or t
  misc_feature (136)..(136): n is a, c, g, or t
  misc_feature (139)..(140): n is a, c, g, or t
  misc_feature (154)..(154): n is a, c, g, or t
  misc_feature (166)..(166): n is a, c, g, or t
  misc_feature (191)..(191): n is a, c, g, or t
  misc_feature (205)..(205): n is a, c, g, or t
  misc_feature (210)..(210): n is a, c, g, or t
  misc_feature (221)..(221): n is a, c, g, or t
  misc_feature (260)..(260): n is a, c, g, or t
  misc_feature (273)..(273): n is a, c, g, or t
  misc_feature (597)..(597): n is a, c, g, or t
gtcgacaacggtcaactctcccttatccacacacagatggccacttctgcctccatccactcaatgccaacaggcaccattcctccaccgaccacgatcaaggccacagggtccacccacacngnncnnnnaatgncanngacaccagtgggancagccaatcccnaagctcatttagcacggccaaaacntctacatccctacnttacnacacttcctcnacacaccatccgtgaagtcaccccaacttctaccaccancatcacccccaancacaccagtacaggcaccagaacccctgtggcccacaccacctcggccaccagcagcaggctacccacacccttcaccacacactccccacctacagggagcagtcccatctcttccacaggtcctatgactgcaacatccttccagaccaccactacctatccaaccccatcacaccctcagaccacacttcccactcacgttccacctttctccacctccttggtgactccaagtactcacacagtcatcacccctacccacgcacagatggccacttctgcctccatccactcaacgccaacaggcaccattcctccaccnacaacgctcaaggccacagggtccacccacacagccccaccaatgacgctgaccaccagtgggaccagccaagccctgagctcattcagcacagccaaaacttctacctccctaaccttgccaaggtgatcgtggggtcgtaaggc

SEQ ID NO: 586413 - DNA, 2421 bp, Homo sapiens
  misc_feature (123)..(123): n is a, c, g, or t
  misc_feature (125)..(126): n is a, c, g, or t
  misc_feature (128)..(131): n is a, c, g, or t
  misc_feature (136)..(136): n is a, c, g, or t
  misc_feature (139)..(140): n is a, c, g, or t
  misc_feature (154)..(154): n is a, c, g, or t
  misc_feature (166)..(166): n is a, c, g, or t
  misc_feature (191)..(191): n is a, c, g, or t
  misc_feature (205)..(205): n is a, c, g, or t
  misc_feature (210)..(210): n is a, c, g, or t
  misc_feature (221)..(221): n is a, c, g, or t
  misc_feature (260)..(260): n is a, c, g, or t
  misc_feature (273)..(273): n is a, c, g, or t
  misc_feature (597)..(597): n is a, c, g, or t
gtcgacaacggtcaactctcccttatccacacacagatggccacttctgcctccatccactcaatgccaacaggcaccattcctccaccgaccacgatcaaggccacagggtccacccacacngnncnnnnaatgncanngacaccagtgggancagccaatcccnaagctcatttagcacggccaaaacntctacatccctacnttacnacacttcctcnacacaccatccgtgaagtcaccccaacttctaccaccancatcacccccaancacaccagtacaggcaccagaacccctgtggcccacaccacctcggccaccagcagcaggctacccacacccttcaccacacactccccacctacagggagcagtcccatctcttccacaggtcctatgactgcaacatccttccagaccaccactacctatccaaccccatcacaccctcagaccacacttcccactcacgttccacctttctccacctccttggtgactccaagtactcacacagtcatcacccctacccacgcacagatggccacttctgcctccatccactcaacgccaacaggcaccattcctccaccnacaacgctcaaggccacagggtccacccacacagccccaccaatgacgctgaccaccagtgggaccagccaagccctgagctcattcagcacagctacagcctcttcttccttcatatcctcctcgtcttggtcgtcttggctgcctcagaactctagctcaaggccaccgtcatcacctatcaccacacaactcccccacttgagttctgcaaccactcctgtttccacaactaatcagctgtcctcctcattttctcccagtccttctgccccctctactgtttcttcttatgtgccctcctcccactcctctccccagacttcatcgccttctgttggcacatcttcctctttcgtgtccgcccccgtgcactccacaaccctgagctcggggtcacactcctcattgtccactcatcccacgactggatcagggtctgcatctcctctttttccttcttctccagctgcctctactaccattagggccactctcccccacactatctcctctcctttcaccctctctgctctactccccatatccactgttaccgtgtctcccaccccatccagccacctagcctccagcaccattgcatttccgtccacgcccaggaccacggccagcacccacaccgcccctgccttctcctctcagtccaccacctcgcggtccacttctctcaccacccgagttcccacatcaggctttgtgtcactcacctcgggggtgacgggtatccccacctctccagtcaccaaccttaccaccaggcaccctggtcccaccttgtcgcctaccacacggttcctgaccagctccctcactgcccatggaagcacccctgcttctgccccggtatcttctctcgggacacctacgcccacctcacccggggtctgcagtgtgcgggagcagcaggaggagatcacgttcaaggggtgcatggcgaacgtgacggtaacccgctgtgagggcgcctgcatttccgctgccagcttcaacatcatcacccagcaggtggatgcccgctgcagctgctgccgccccctccactcctatgagcagcagctggagctgccctgccccgatcccagcacgcctggccggcggctcgtactcaccctgcaggtgttcagccactgcgtgtgcagctctgtggcctgtggagactagcagggtcgctgcctgctctcctggggctgaaggactgcagatgacagacaggaaaacacccaccagcccccttcccgcttgtgccagcagctgctttcctggtcaccaggcctggcccccaagtgccctgggccgtggctccctggggcaccggttggagaggggctgccaagcaggggctcagactaccacactcctgcagaccctgagccagcagagagggactgaggcggacagtggtcacggacctcccaggcacacagggcactcccgaccacccctgcccactgtccaacacctcccagcccctgaacttggccccagccctgctgggcccagaaccctgcagatgaagccacagagcaggcgctcgaccagacccatcaggggcgaggagggcacggaaacctgtgccgagatgggggcaagaggcccaggcagccaccagcacagagaagaggagatccccagagtcagggagggcagagggtggcagcgagggcagggcagccgcccccgctcccagccaggcagaaggcccccaccagcaccacacccatccccagcagcctgtccttgggagagggcgtcacccggtcagagactccaaataaaccggttcttgtcaaggcaaaaaaaaaa

SEQ ID NO: 586414 - DNA, 2062 bp, Homo sapiens
  misc_feature (238)..(238): n is a, c, g, or t
aagaagcatcattgctgaccggccagggtactggccagagcatacgccttcagaatcccagccttcgtcgccttctccgaccccatcacaccctcagaccacacttcccactcacgttccacctttctccacctccttggtgactccaagtactcacacagtcatcacccctacccacgcacagatggccacttctgcctccatccactcaacgccaacaggcaccattcctccaccnacaacgctcaaggccacagggtccacccacacagccccaccaatgacgctgaccaccagtgggaccagccaagccctgagctcattcagcacagctacagcctcttcttccttcatatcctcctcgtcttggtcgtcttggctgcctcagaactctagctcaaggccaccgtcatcacctatcaccacacaactcccccacttgagttctgcaaccactcctgtttccacaactaatcagctgtcctcctcattttctcccagtccttctgccccctctactgtttcttcttatgtgccctcctcccactcctctccccagacttcatcgccttctgttggcacatcttcctctttcgtgtccgcccccgtgcactccacaaccctgagctcggggtcacactcctcattgtccactcatcccacgactggatcagggtctgcatctcctctttttccttcttctccagctgcctctactaccattagggccactctcccccacactatctcctctcctttcaccctctctgctctactccccatatccactgttaccgtgtctcccaccccatccagccacctagcctccagcaccattgcatttccgtccacgcccaggaccacggccagcacccacaccgcccctgccttctcctctcagtccaccacctcgcggtccacttctctcaccacccgagttcccacatcaggctttgtgtcactcacctcgggggtgacgggtatccccacctctccagtcaccaaccttaccaccaggcaccctggtcccaccttgtcgcctaccacacggttcctgaccagctccctcactgcccatggaagcacccctgcttctgccccggtatcttctctcgggacacctacgcccacctcacccggggtctgcagtgtgcgggagcagcaggaggagatcacgttcaaggggtgcatggcgaacgtgacggtaacccgctgtgagggcgcctgcatttccgctgccagcttcaacatcatcacccagcaggtggatgcccgctgcagctgctgccgccccctccactcctatgagcagcagctggagctgccctgccccgatcccagcacgcctggccggcggctcgtactcaccctgcaggtgttcagccactgcgtgtgcagctctgtggcctgtggagactagcagggtcgctgcctgctctcctggggctgaaggactgcagatgacagacaggaaaacacccaccagcccccttcccgcttgtgccagcagctgctttcctggtcaccaggcctggcccccaagtgccctgggccgtggctccctggggcaccggttggagaggggctgccaagcaggggctcagactaccacactcctgcagaccctgagccagcagagagggactgaggcggacagtggtcacggacctcccaggcacacagggcactcccgaccacccctgcccactgtccaacacctcccagcccctgaacttggccccagccctgctgggcccagaaccctgcagatgaagccacagagcaggcgctcgaccagacccatcaggggcgaggagggcacggaaacctgtgccgagatgggggcaagaggcccaggcagccaccagcacagagaagaggagatccccagagtcagggagggcagagggtggcagcgagggcagggcagccgcccccgctcccagccaggcagaaggcccccaccagcaccacacccatccccagcagcctgtccttgggagagggcgtcacccggtcagagactccaaataaaccggttcttgtcaaggcaaaaaaaaaa

SEQ ID NO: 586415 - DNA, 104 bp, Homo sapiens
gcccaacactatcgcccacctctggttgagaaactttttttcttcttcttcttcctcctcatcaggctgtgtttctgagtcttcctcaggtgttggggataacg

SEQ ID NO: 586416 - DNA, 597 bp, Homo sapiens
  misc_feature (223)..(223): n is a, c, g, or t
ggcacattcttatttaggagcagcctctcttaaggtctagaagaaatcttagacactatactatcaaccatcacaccctcagaccacacttcccactcacgttccacctttctccacctccttggtgactccaagtactcacacagtcatcacccctacccacgcacagatggccacttctgcctccatccactcaacgccaacaggcaccattcctccaccnacaacgctcaaggccacagggtccacccacacagccccaccaatgacgctgaccaccagtgggaccagccaagccctgagctcattcagcacagccaaaacctctacatccctacattcacacacttcctccacacaccatcctgaagtcacctcaacttctaccaccaacatcacccccaaccccaccagtacaggaaccccaccaatgacagtgaccaccagtgggaccagccaatcccgaagctcatttagcacggccaaaacctctacatccctacattcacacacttcctccacacaccatcctgaagtcacctcaacttctaccaccagcatcacccccaaccacaccagtacaggcaccagatcact

SEQ ID NO: 586417 - DNA, 499 bp, Homo sapiens
cacgaggcatccaccagggtggccacgaacggcgccgaggcgctggccggatcgaagccgagccgcttcaggacgaagggcagcatcgagccggacagcgagccgaaggtgacgatgccgaccagtgcagcgccgatggtgatcgccagcaggatccagtgctcgccgtaatcatgcaggccgcccagctgccagatcacgatgcgcacgatggccaggcagccgaggatcgcgccgagcaccatgccggtcgggatctcgcgcagggccaccttccaccaatcgcgcaggcgcagttcgcgcagtgccaggctgcggatcagcagcgacgtggcctgcgagccggagttgccacccgagctcatgatcagcggaatgaacagggtcagcaccaccgcccgcgccagttcgtcctcgtagtgctgcatcgcgctggcggtcagcatctcgcccaggaacagcacgctcagccaaccggcgcgcttgcgcagcatctcga

SEQ ID NO: 586418 - DNA, 196 bp, Homo sapiens
ggacggggattacaccgtgattatgcatccggccagaaatcagtgtttttaactggattattttattattttatagagatggaggtctcactctgttgcccaggctggagtgcagtggtgcagtcatagctcactgtaaccttgaactcttaggctcaaatgatcctctcgccatgactcaagaatccccggtcga

SEQ ID NO: 586419 - DNA, 128 bp, Homo sapiens
tgtcgagcgcttcttgggtacacatatgctctgtgttttgatctgaagactagtatgtgagtttgtttttttcctttttttgggggtgggggtgaggagtgtggagaaaggggaaacaaagatcgagc

SEQ ID NO: 586420 - DNA, 574 bp, Homo sapiens
gaggcgggcgggcgggcggcggggctcggcgatggtaggcgtccctgtgagtggccgccttccagtcttggtcctggacaaaagggtgccagtcgatgcctgtgatcgcctgtggaggtgaagatacagtccagatcctcacctcccatcatgccatcgcctcccatcaataaatcctggaggaccgaggccagtgtcgttcactcctactgcagtagagcaatggcatcgaaccattctcctcctaccctgaatggtgccccagtcaccgccacggagattcagcaagggtccggcctcctccacatcatctgcactcacaactcagcaattgccagcgcacttgtggtgttcgagaagtcagcaagttgaaacgctttcttaccattctgcaatagtttggcaaggacatctcccctgacatgggggagaaggtgcggactcttgtcctggccttggtgagctcaacagtgacaattgaggagtccactgtaagctccaagaagccaaaacttccccttcgcctttcgtgatgcattctcaaggcaagctgcctgctgagtgggaatgtgag

SEQ ID NO: 586421 - DNA, 2130 bp, Homo sapiens
ctggacgggcaacacggaacggtgccacgcctctctcctgcggcgacaccttgctcttcttacaacctcccaaacgcacctctgacaaccaaccacttccccggcaccacgactgcacaccactgctctctggcctctctatactcacccctctcctccttcaatctgcatcactcccctatcccacaagtccatctaagcctaccaccactctgggctcacgctcctacgtacaccacccaactccctggccaccttcctccctccacccgaacaccgcccacctctccacacccccgcaacgtctcccactcctcccacccacccctccacgcccccaccttcccccacaacgacaaaaccccgtgcgccagtgggcaacccgggcttacccacgtgggcctggggggccaacttgggatcaaggcgaaggccatcacgcttacaacaaacaaacccccttacgccggcacccaccccaagcacacacacgtgcgcgcacacacacggcgaccccgctcggcgccaccacccgggcacacaacccagcggcggccgaccacacccctctcaaacacccacgctaaacaacggccgcgcgacctatacacccttactacacactcccgctggcgccactgccgcgcgcacccactacctcagcacgcgtcaagcaccgacccgagtcttaacacagcaaccccgccgctacgtcaccacagcagtaaaaacaccgctgttgagggagcgcgcgccacccgccacacacgggcgtgggcggacacccccttgtacctcgcggcgagcagcacaacaaaccggcgctcctaataagaacgctcttatcaccaccaaccggggcgacccgaaccgcaccacaccaacccctgtcgcggcgggcaccccaacgcgacctatcccgcagaacacaccccacgccaacgccccacacacaacgcggggccctcctttaaacacgaaccctcctggcgcgcgcttataaacacacaaccaaacgaaccgtctcctcccgacccaaagcattcctaaaccaccaccacacccccccgccgccaacacaaacccgacacctagacgaaccaaacacacgcaccctcgcatacacacaaaccacacacgacacacgcacacacaaactctccctcgggtcagccacaacaaccaccccgccacccaacaccaagcacacgcaacaaacgaccacggcgaaccctctgcgtcgcgcgcaaaccatcacataccaagcgccgcccggggggacaacaccaaccttttactaccacgaaaccagacccccgaccactactatcacgacccccactcccgaccagaacgcacccgactggcggcgtgccaccccacccaaacagctgccccattcatccaaacaagacacctaatcttccgcacccgaactacattaactccatcacccccccgtactctacaacaaacaatcacgtacagaggagcggagacgaagataaacaacaacacaaaccgcccccccaactacgggggctgcgggtccacataccccacgacacatcaggttcccccagacacaaaccacacgacgagccggggggggcggaccgaaaccaccaccaagcagctcactaacacataagacaccgtcactcgtagatataacaagaggcacggacactcgtgtgtgcgtcacgcaacaacgccaaccatgttagcatcgctaccactacaccaccactacatatatccgaccagcccttatctattcataaacaacgacaacaaccacgctgacactcaccacaccacgagcggacgagcaacacacaccaggtgagcagccgcccatccacaacacgcacaaccaaccagacacacccacccagccgccctaatcagccaccacgacaagacgcataaatcaacatcacactcagcacacgcacgaccgacaccacccagcaatccatcgacaacaacaccaccacatcgaccattcgcgccaccccaacctcactacaccaaccccagccacaactaactcgaaccacccaacaacacccggcacataagcagtacaccccacccgaccttcgcgtgtgtgcgcaaccccacacc

SEQ ID NO: 586422 - DNA, 109 bp, Homo sapiens
caggcacagactgaccgagtgagccagcgaacctgcgcggctactacaaccagagcgaggccgggtttcacatcatccagaggatgtatggctgctacgtggggcccga

SEQ ID NO: 586423 - DNA, 990 bp, Homo sapiens
ggattcctccctcttttggagatcccggggtaacaatacactttcgggcagtccaaaaaggttgacccaggtcatgtggttttttcaaccgcaacaatgggggcgcgcaagagctgtgcgttgctgtcctaaaaaaggcaccccctggtcttgccatgagactggggaaccctcgccttcctggagaacgcgacattgttgtgcagttcggagcattccgatgaagaccacttgttgcactgtgaaacaatatttaggttccatttcccctctgcggtggaaattccatttattggagcgaccacaagtgttatctgtgctctctggcttatatgagggaagggtgctgcctcacatcaccacctcccgtttgtggcgggcaattctgtcagttacaatttagggttccaaacgaaagtagcctcatttacggacacacggtgttgctcattgggcgggcccccccccaatgaacccccgaaggcggggggtcctcctccgctagatgcgaggaatcataatgcagccattgaaaggtgttgttcattgtagaccccatgaccagttgtgaaacaagagtgtgaaaaacattgtgggagcgacaacactccggacaaacatatcggcgcaagttgttttcctctgtgaacatataggcacacctccgcatcattgttagtgggggcacacatctcccacatttgaaagaagattattctgctcgcagacagttatttctgtttgtttcaacgtaatagtagtgttgtggaatatcgggagtgagacttacgagggaaactccttgtgcccaggaatatatgggcgaacaattgttcagtcgtgcatgcgcttgtacagcaaccctaggaggccaccaaacacggccctatcattgacagcaagcctccataaacaatggccgttctttataatattttaggtgtcccccccggttgccagaggtttcccccatttcatttaaacataaca

SEQ ID NO: 586424 - DNA, 1124 bp, Homo sapiens
gccttgcctcccgcacgccccgcaggtagcgcccccgcccgcggcccagagtgctgctcgctgcctgtgcaccatgctccctgtgattaaactgtgctgctgccgctgcgggaggatgacatgcctgaggcagatgaatggctgacctgagagctggggcgcatgtctggctgccgctgcccatggagggagtggacatcagccccaaacaggacgaaggcgtgctgaaggtcactcaagcagagatggtgcacatggtacaggagatgcccatgatttggggaccgagtctttgtccactacacttggctggctattagatggcacaaagtttggactccgaggtctggatctgcaaggacaaattctcctttgaccttgggacaaaggcggaggtcatcaagggcttgggaccattttgccatagccaccattgaatggtggcgcggaggtgtgccacaatcaacctgcaaaccagaatatgcctacgtgttcagcaggcagtccttccacaagattccccccaatgccacgcttgtattcgaggtggagttggtaggacgtaaaacgggagaagatctgacgggaaagagtgaataattggcggaatcatacgcagacataagacctcgaggataaaggctatgcaaagccaatgagggtgtatcgtggaagggtggcatggaaggtactacaaaggaaagaccattggacaggcggaagatcacgtatgagattgggagggggaaaacatggatcatgaatatggtatggaaggggctataatggattgaacaaggacagagatcaatgtgtaccaaggccggttatattggagaggtgggaagaaaagtcaactacacaagggataacgtaattgaatagaacgacgattggaaaacagaggattgagggagaatagaaagaaaaagaaagggatccagatgaggagggcgatgaaaaaagggagggaaagaagagcttagatcagaacttttgtggaaagagatataagaaagaagaaacgatacgaaaactaagggagagaaagaaatgtgaaataggcagagagagaggcgtgacagtaagactataacgaggtgtagatgggatttgtagtagtt

SEQ ID NO: 586425 - DNA, 173 bp, Homo sapiens
tgtggtctggcagccacaccacagccggccacccacagataccatcttggtgatggggctcccctgtggtgcccaaggatcactgattgtgaaggttctgggggtcccgagaaatggcctgcttcccttaggatagaccacaagctctccataggccagaaccacaaatatcg

SEQ ID NO: 586426 - DNA, 246 bp, Homo sapiens
gaacgcccaccaacactggggaacgcccaccatctctcctcaaaatgaaaaacattttaaaatattcattttacagaagataaaattgcttctctttatggcataacttcattatgtgcttctattgtcaagaacacacgaggtcacttgaggctcaacaagaaagaagaaattgaaatcatggcattttccccatagaacttttccaggatagaaactattatgcaaggtcccagtgttggtggg

SEQ ID NO: 586427 - DNA, 242 bp, Homo sapiens
ctcaagccgagatcgagcagaactgaacggtgtcaaagatgcgctgcgtgcccaactgggtgctctggccgtcggcggtgctgagaagatcctgggtgccacaatcgatcaaaacgcgcacgcgtgagctgtgtaaacaaactgtgctgcgtgaaatttaacgcgagtgtgcgatcatgtgcagaattgaccactgttggccccgacccttacgcctaaggcagccttcgtggcactgccca

SEQ ID NO: 586428 - DNA, 1153 bp, Homo sapiens
atgcagccttttccagttaaccaaagactataattcgtgaaattgggtggtattccaattgtttgcaaacaaaatcaaccaattcccaacccagaagtattacaagcaggaaacgcttttaaatgcactaaaataacctgagtgtgaatgtcgaaacatccaatcaagatacacgatatacatcagtcaagtatgtgaggatgtcttctctgtgttcctctgaactctgctgtgcagctggctggactgacattgttgacaaacatgactgttaccaatgaccaccagcaacatgcttcaccagttacatttacagacctgttccaggtgttacttactggacacatggaaacacgaaaggtgcaagttttgaaaactgcttttgaactctggtctgaatatccagcccatgaaccggaagggaacttactacggtgccccaagtggatttcatcaattcccttttacccttttattgcacaggcaacgataggccacacagggacgcatctctacttcgcagatacttcacggctatatacacgaagtaatagcagaactgcgctcacaaatacgaagggccatttaagcctcgtgcaagccctacctataccactggaacggtacacagggtcataaaccctgataacacttggacgcacgcactgttgcccagaaacatcacgaagcttatacacgcaggatccaccaatgattgcacacggatgacacgcgtcatacaacgtctgttgaccccctcaattaacaccacacagtcctgccattcgcgcctcattcttcccccacagacgttcactgcagctcctggacttcttaccacgatgatcacacccagacttaccttaattacacgggcaattctaccccagcatgcatcatgatgtcaaaaccaccgttacacgcccttacacacatattcagctgccctttcaacgctcaccactatatacccttatgcctgatagggatatcaccacaacactatgatatactgggaacccaaatacacatgccagcccacactacgatgaccattttaccaacatcttggtaacgctgtagtcacagcattcataacctcgaaaatatggcgaatagccgacgacttgcatattgataaattatcccacac

SEQ ID NO: 586429 - DNA, 1843 bp, Homo sapiens
  misc_feature (406)..(406): n is a, c, g, or t
  misc_feature (446)..(446): n is a, c, g, or t
  misc_feature (478)..(478): n is a, c, g, or t
  misc_feature (973)..(973): n is a, c, g, or t
  misc_feature (1071)..(1071): n is a, c, g, or t
  misc_feature (1195)..(1195): n is a, c, g, or t
  misc_feature (1228)..(1228): n is a, c, g, or t
  misc_feature (1296)..(1296): n is a, c, g, or t
  misc_feature (1299)..(1299): n is a, c, g, or t
  misc_feature (1306)..(1306): n is a, c, g, or t
  misc_feature (1308)..(1308): n is a, c, g, or t
  misc_feature (1314)..(1314): n is a, c, g, or t
tcgttatcgtgcttgcggaagacgatagggcgtccttgtgagtgatagtgacgatttcggtgctaccagtgcaatggagaatccaggcattggcaatgcgcctccagattggggatagtccccttgtgagttccggttccccccgagtacccgaagcctgggcaggttgtgacgatttggtcgtgcagaaatcttggggcaacccacaagcccccttttcgacctggtgtggaaggctcagaacacttgggcttcgtggaacaacctggctgtacggttttcaaccactccccttgggaagaatggccatgcgcaaacttggtgcgctcagtggactgtggttgaggacatcgaggatgaggatggagattacctgctccatcacccccgcgggtgccaactgcancagctcgggggacccccctgagtacaacctgcgctcgcgncaccgtgctgtgcgggacctgcgggcagcctnccgacaaggcatctgccagcggctcaggagcccaggtgggcggacccatctcctctggctcttctgcctccagtgtcacggtcactcgcagctaccgcagtgtggggggcagtgggggtggcagcttcggggacaatctggtcacccgctcctacctcctgggcaactccagcccccgaacccagagcccccagaactgcagcatcatgtaatctgggacctgccaggcaggggtgggggtggaggcttcctgcgtcctcctcacctcatgcccaccccctgccctgcacgtcatgggagggggcttgaagccaaagaaaaataaccctttggtttttttcttctgtatttttttttctaagagaagttattttctacagtggttttatactgaaggaaaaacacaagcaaaaaaaaaaaaaagcatctatctcatctatctcaatcctaatttctcctcccttccttttcccggcttccaggaaactccacatntggccttaaaaaccaaagaagggcttcctctaagaaagccagagggaaaggggtgctttttatcagaaggctaagcttctggcttttctggccctggntgctggcccccaaccccgggggaccctggtgacatgggtgcctggagaggcaggcatagaggcttctccggccaagcctccttctgggcagggcaggcctcaactggccaaggccaagcctccngagaagggagaagagagagagagaggacagctngagccggggcccctgggcgctgggcctggtggtagattcccaactaacacctgggctgaggtccctcnggnctggccncnggcccnaaaagccgccagacaccgtggcacccgagagccgcagggggctagatgccaattcatccccaggggtacccaagagaggacgcagaggcaataacagagaaataccacattacacgaccaaagcacatggggcgaaacctgaacggtacgagcaacgagtagaggcaacacgacagagggccacccacagcacacaggagagacacgccagacaagacgggccccatagccgcacatacccctagtgaagcacaccacagtgagatcggaacgacactcggccaccacagcacacagcgggacaaggtataagaacacagccacaaaagaagtgggacaaactagccagtgagaagaacaaaccacaggcccaacacaggccaaagtacaccacacggcggcacaaaaagggacagagcgaagacacaggaggaggacacacccaaacgccgggtagcaaacgcacagacaaaacgggccacacaacgggcaggatctacaaccagaagatgaggacacaaaggagaaa

SEQ ID NO: 586430 - DNA, 119 bp, Homo sapiens
  misc_feature (73)..(73): n is a, c, g, or t
ctgggagggggtgatctaaaacactgcttctcacgccggcttctattgacttgggttaatcgtgtgaccgcgngtggcatggcacgataattggaccagacccgtaggggttagtatag

SEQ ID NO: 586431 - DNA, 1651 bp, Homo sapiens
  misc_feature (406)..(406): n is a, c, g, or t
  misc_feature (446)..(446): n is a, c, g, or t
  misc_feature (478)..(478): n is a, c, g, or t
  misc_feature (973)..(973): n is a, c, g, or t
  misc_feature (1071)..(1071): n is a, c, g, or t
  misc_feature (1195)..(1195): n is a, c, g, or t
  misc_feature (1228)..(1228): n is a, c, g, or t
  misc_feature (1389)..(1389): n is a, c, g, or t
  misc_feature (1408)..(1408): n is a, c, g, or t
  misc_feature (1487)..(1487): n is a, c, g, or t
  misc_feature (1646)..(1646): n is a, c, g, or t
tcgttatcgtgcttgcggaagacgatagggcgtccttgtgagtgatagtgacgatttcggtgctaccagtgcaatggagaatccaggcattggcaatgcgcctccagattggggatagtccccttgtgagttccggttccccccgagtacccgaagcctgggcaggttgtgacgatttggtcgtgcagaaatcttggggcaacccacaagcccccttttcgacctggtgtggaaggctcagaacacttgggcttcgtggaacaacctggctgtacggttttcaaccactccccttgggaagaatggccatgcgcaaacttggtgcgctcagtggactgtggttgaggacatcgaggatgaggatggagattacctgctccatcacccccgcgggtgccaactgcancagctcgggggacccccctgagtacaacctgcgctcgcgncaccgtgctgtgcgggacctgcgggcagcctnccgacaaggcatctgccagcggctcaggagcccaggtgggcggacccatctcctctggctcttctgcctccagtgtcacggtcactcgcagctaccgcagtgtggggggcagtgggggtggcagcttcggggacaatctggtcacccgctcctacctcctgggcaactccagcccccgaacccagagcccccagaactgcagcatcatgtaatctgggacctgccaggcaggggtgggggtggaggcttcctgcgtcctcctcacctcatgcccaccccctgccctgcacgtcatgggagggggcttgaagccaaagaaaaataaccctttggtttttttcttctgtatttttttttctaagagaagttattttctacagtggttttatactgaaggaaaaacacaagcaaaaaaaaaaaaaagcatctatctcatctatctcaatcctaatttctcctcccttccttttcccggcttccaggaaactccacatntggccttaaaaaccaaagaagggcttcctctaagaaagccagagggaaaggggtgctttttatcagaaggctaagcttctggcttttctggccctggntgctggcccccaaccccgggggaccctggtgacatgggtgcctggagaggcaggcatagaggcttctccggccaagcctccttctgggcagggcaggcctcaactggccaaggccaagcctccngagaagggagaagagagagagagaggacagctngagccggggcccctgggcgctgggcctggtggtagattcccaactaacacctgggctgaggtccccccgcccgccccgcccccagcccccacccccgcccccagccccggggtgagcccatccccccaggtacccacggcgcttgcttttctgtattttanttagacaagagatgggaangaggtgggaggtggaagaagggagaagaaaggtgagtttgagctgccccccctagcttaagaccctgggggggctctgngcagtcactggagggggaagccaaggggggggcggggaggagggagagggaggtcactggaaaggggagagccggctggcacccaccggggaggaggaaggcaagaggggggggaggggtgtggcagtggttttggcaaacgctaaagagcccttgccncccca

SEQ ID NO: 586432 - DNA, 234 bp, Homo sapiens
  misc_feature (46)..(46): n is a, c, g, or t
  misc_feature (73)..(73): n is a, c, g, or t
  misc_feature (78)..(78): n is a, c, g, or t
taagatggagttttactcttgttgcccaggctagactccatctcanaaaaaaaaaaaagaaagaaagaaaganaaagnaaatagcggcccaacgcctcttcgtttccggattaaaaacaaacaaacaaacctttaagatggagttttactcttgttgcccaggctagagcgcaatggcacgacctcagctcactgcactccagcctgggcagcagagctagactccatctcaga

SEQ ID NO: 586433 - DNA, 455 bp, Homo sapiens
gccctcaatcctatcacagctcgactgacttttcccattcagctgtgagtgtccaaccctatcccagagaccttgatgcttggtctcccaatcttgcgctaggatgacccagatgccaatgcagatagctccttcttactagccagggtatctggcctgagacaagcaaggggtccctcagtgctggcaatgggagtctgagaactcctcattccgcgactcttagaccccgactcttcattcagtggaccccattttccttaggacagagatgagcattccccgtcagaaatgccagatctctgattccccaaatcggcatccttttcataacctaaaaacgcatcgatatacaaatcataacaaaaccaacgtcagaccagaactgtgttctcaacctgggacattcctagacttccaaaatgtgcctcttccagcaactgaaactcgccctc

SEQ ID NO: 586434 - DNA, 547 bp, Homo sapiens
aggaattcggcacgagaagaacttaaattttatcaggaactgtaagataaatatctagggcttataaattttctggccttaaatttatgtgacagggcaagatactttggctcttttcatttaatataggcatctgccatggacattaataaaacttagaaacagtataattagtataacatttactctgaattggaagatttcctgaaacaaagtttggacaagaagcccaccttggaattctgaagggctattttcttgttggataagcttttcttttaaacttaggtttaaaggtggggaaagacttaattaactaaaatagtattttctaaggggggacatctaataccacgaaacgttaatttggacagttctactgagcccggaaaggataaccactggcaaattttgtcagaataaaaatttttcactgcaagaaaaaatttcaggagaaaaaaaagggatgcgggggccaggtacaaatagtcccttaagagagggtaaatgattagcccaaggtttgggaccatgggaaaatactttt

SEQ ID NO: 586435 - DNA, 383 bp, Homo sapiens
  misc_feature (289)..(290): n is a, c, g, or t
ctctcctctcaaaatgactcttgcggtggtttctcttgtttctctttttaccttcctagcagctcctccagcttccccactatctcccactcatgcaatgtggcctcaacccctctctggctctgtcctgggcactttgtcccatccacagatccacagctccagacacacataaccaacttcctggtaacggctccagcgcctatcacccctgacttggggttagagggcaggacagaggctcagggtgtgctctcgtgctccccgctctgtcctccccgcagagtcnnatcccccaacgaaagtcggtgcttcccacggcgacaggagaaagtccccactccgagggcggcagagggctgcgaggagggacgggacgaagc

SEQ ID NO: 586436 - DNA, 430 bp, Homo sapiens
  misc_feature (4)..(4): n is a, c, g, or t
gttnctagaggatcccccaaacgcagagaggaccaaacccaaacacctacaaacccttagtgattaagcatcactgaagagattgatcctgcgtggttccgacgcttgttacctttgaagactgtgcttcttccaaacggttaggcgtcatggtctagagcatccaagaggaattgtggatcgccgagtgaccgagtctgtgaaggtttggaagtcgcctgaagacttaccacgagtgattggacgaggtctatgtgaccttagttcaaggagtatacggtgaggactgtgtgtcctgagctgcgtgctcagcaactgggtgtacgggactttgtgtcctcgagtttaaatactcagccgctccaaccagacgtacaactgagacaacaggtggaactggtctaacaaatcattgtcttcaccaacctta

SEQ ID NO: 586437 - DNA, 361 bp, Homo sapiens
aaaaaaaaaaaacccccatttttttcaggggggtgggctggtttttttgggggccccaaaccaacccgtttttcccccggtacccaaggggctggtttttccccccccagggggcccttaattttgctgggggtccccccaaatgggggggcccccctgggaaacctaacccccccaaagggtttttgtttttttaaaaccggccctttttaagggcccccttcccccccaaaaaatttttacctttttccgggggttacccctggttccgggacccggccggttgttttcccggcccaaggtttttttttttttttggggttttttaaattccctggttttattaattccccccaaggga

SEQ ID NO: 586438 - DNA, 182 bp, Homo sapiens
tggggggctttccacattttcagcccctcaggctggaggaccggggccacactctggagcctcggtgaagtggctgggcatgagccgtttctctgacgtcccccatagatctgggtcatggagccaaccccagcgccaccccggaggtacaggtgccgcgctggtggaaagcaggctcgcgt

SEQ ID NO: 586439 - DNA, 402 bp, Homo sapiens
cttttcaagttcccacattaagacattgatcagatgtgaatagttaaatacgaatcggcacttcttcaaatatgtactcaaaggtgattatttgcttttttcaactgcttcagtgagacacatcctttactatacaaacttccatcagtttaggagtcagtctgtatgccttaaatgagagagatccaagggcagattagatgggaacataaatgagaacgacagattcttcaatggcctgctggtaactaaactgagagtccaggagtgcccggataccgaatgagccatagtatgtggacagataccagcccatgtgaagatgatcaatgtatacatggcgaaggctccgaatcatttccatctgatataggactacatcaaattcagaatcatcctctg

SEQ ID NO: 586440 - DNA, 433 bp, Homo sapiens
cggggtcccggacagccgcgcgctgagggtctcggggcggtgcgccgcgggacctctccgggcccatggcagcccctgtcaaagggaacaggaagcagtccacgagagggtgacgccctagacccacctgcatcccccagacctgctggcaacgcagaacggaatccagaaccccatctcgctggaggactcccccgaggcaggcgggggcagcgggaggaggagcaggagcgggaggaggagcactgccttcctggtcattgactctacaagttcatgaagtgagcgacacatgcccatcgcagcagggtgccccatctcggcttcatgcacgattaacctgtggaatatctacaaagcagttggagaagctggtggcctatgagctggtgaccgggcgccgcctctggaagaacgtgtacgacgagctggg

SEQ ID NO: 586441 - DNA, 466 bp, Homo sapiens
  misc_feature (109)..(109): n is a, c, g, or t
  misc_feature (209)..(209): n is a, c, g, or t
cattggttttaaaaaatgtggttcccctgtgccccaggaacaatcaggtggttatcactttaaaaattaatttagaaatgaaaaatttttttggaatcccccccccccnccccccaaaactaatgagcagaacttttaggatagggcccacaaaccctgttgtataaaccctttcagccaggtgcagtggcccacaaccttgggaatcnagcactttgggaggccaacacaaggtggatcaccctgagtcaggagttcgagaccagctctggccaacatggcaaaaccctgtctctactttaaaaatataaaaaattagccaggcatggtgtcgggctcctgtaatcccagctacttgggaggctgaggcaggagaatcacttgaatccaggaggtggaggttgcagtgagccaagatcgcaccattgcactccagcctgggcaacaagaacgaaactctgtctca

SEQ ID NO: 586442 - DNA, 250 bp, Homo sapiens
cgggtcaggaactgggcgcggtgtggtgcgcaccatgccgggcctggaagagaacgtggcgttcccgttgcccaaggggctgtcgcgcaaggtggcgcagaccgaatcgctggaataggcgcggccccgccgcgggcgccgccaagaacaagaatcgaggagacttcatgcagttgtacagctatttccgcagttcggccgcctatcgcgtgcgcatcgccctgaacctgaagggcctgccgtacgaata

SEQ ID NO: 586443 - DNA, 339 bp, Homo sapiens
ctggctggggaatacaggatgacaagtgaagtgagaaggatgtgtctacctcacagacatccattgacaatacacatattctcctcacaaccggaagagtgcccctttgctttagtgagtgcagactcggcactcacacttgtgatgaacccaaatgcccacaccagcttccaaatctccctaagtgtcagttacacaagggagccgctctgcctccaacatggcgatcgttgatgtgaagatggtctctggcttcattcccctgaagccaacagtgaacatgcttgaaagatctacccatgtgagccggacagaagtcagaagccttcagataaaatg

SEQ ID NO: 586444 - DNA, 1278 bp, Homo sapiens
  misc_feature (1248)..(1248): n is a, c, g, or t
tatatggggcttgggtgagggaggtaggtgggtagttgggtgtttaattattttataggtgggggtgagtgaggaataggtggtaaggagtagtgggggttaattagtgggtgggccatacggatagatattatagtgggggcatttgtctatattcttttgggcaataagcacttatgttcccgtggaatagtggtccaaatttcaaaggagggtggttaaataaccttgtagttaacactaaatattatgtgggtgcgcaattataagtggactggtgagagaggacataagggtcatatagcgggaacttataagataaaactaattaatagtgggggtgggttttccgttcagagtcagcgtggagtggcgataatctaagacatagagtggagcgctcttgtagaagagccatttttctataagtgtgtggcgagaaaccttattaaagagatataccaaagtgtgtcaaactacaggtgggtaagataattaaactcgcacagagtgtctaagtgttgaagttgaaagcgccttttcctcttgtgaggagtggttggcataaacatgtgtggggaggaccaggggaccattacaagtgggaaggccatagttgaaagctatttagcgacagtgatggcaagcaaatatatttgtaaaggattagatacgttcctgtgacgatatataaggggggttagagaagaccaaaactttattttttgtgggaaaaaccacacaaggatgggggccatattgtcacacgaagcacgagttaagagaaagcaccgccggggagtacctaaaacggttgggggggagacgttagccaatccgatggatatagtctgggaacataaggaacagcgagtcggttcatgtataaacgacacagaacgacacctacaagggggtaataaagtaaccagtagataattggtatgagacaggcccaggcagaaacaactcggatggcgtggcaaggatatcgcacgttccgcccacaccagaagaagctccagaaaacaaactagggcgacagtaagggggacagaaaagacgaaaataaacgaaagcatagtcgaaggtatgtaatatgccacaccacgccgtcgtaagacagccccagagctgggcgatcttatgggggggagcgcgtgaccaaaacagcggacgacgcacaaacggctagtggagcacacacaagggtgggcctcatgaatacacacaacgagggcaagcagnctatctgaaagcatcattcaagacagcgag

SEQ ID NO: 586445 - DNA, 321 bp, Homo sapiens
caggtcttgtgtcccctgcacctggaggaaagcaggctaaaggcacagcggccacatggtgctggctttaaacgttggttggtgggtggaaaacagccctgcttttaagggccgctcagttttggacacgaaaccccctcctgaggggtcagctttgcccccgccctggggtgcagcctttggaagcaagcaccaggcatcctttgtgttggcaactccggggaaccagtaactacagccatttacaattgaccccgtttccttttgtaggtttccctgttggtgggtgttaggagaaaaataaaatcctatgaaatttga

SEQ ID NO: 586446 - DNA, 348 bp, Homo sapiens
  misc_feature (38)..(38): n is a, c, g, or t
cacacccacccgtaaattgttgaggtcacggccagagnctcaatggtctccatgtccaggtggtttgtgggtcatccagaatgtagaagttggggcaggcatagtcatctgagccaaggccactcggctcttcttgcccccaagacagcctggcagagggacgcatgcccagttctccggagatgccataccgaccccagctggtgacgggtctcctccttcaggccgccaggaaactttgcgttccacccggttcccacaggcactgacgtttaagggtccaggctgctccaccatggtgctgggcttgaaaatagcccaatcttcaagtttccctgcaggcaggaa

SEQ ID NO: 586447 - DNA, 121 bp, Homo sapiens
gtcccgggggggggggggggggtaccccccccttcccgggggctgtccctgtgggcccccaaaaggcaaaatttaaataaggggaataagggcccaaaaaaccccgtttttttccggggga

SEQ ID NO: 586448 - DNA, 275 bp, Homo sapiens
tactttatccacaggcagagtctggggaaggagggggagagagagaggagggttcctaatagtacggtgagaaacttaaaaagacactaaactttctctgcttccctacgctggccttaaagcgcaggtaattccactgctctgctcttcacatttcaaacaacctttaccatatgcatactaggatgaacgccataacacattaccactgaacttgactaaaaacaacattgacgcacggcgcccaacttactacaaatcgactgcgacacaca

SEQ ID NO: 586449 - DNA, 1564 bp, Homo sapiens
gaggagaagaaaaggagaactaagaagaaaggacaagaaggagaagaaagaagaactaagaagaaggagagcgaacgaactcaacgaacgcgaaccgcaacaacacgcaacaaaagctaaaacgcaacgaacgcaacgcaacgcgaacgaagcgaacagcaacgcagcgaacgaactcaagcaacgcaacgaacacgagcgagcgaaagcaacgcaacacgaacgcaactaacggaaccacagaaacggacgacaccgacacacgaactaccgacacgaccggacacgacacgacacacacacgacacaacgacacggacacacgacacggacgacaccacacggacaccgacaacaacacgcgacacgacacgaccacgtacgacaaacgcggacacgacacacgacaccccgacaccgtactacacgaaccgagacacgacacagacaccgacacacgacacaggacaaacgacgcgacaccgacaacacacaccgacacaccgacgggacaaacgacacgacaaccgggaacaccacaccgggaagggacgaacacgaaaccaaacggacgaaacgaaacacgacaagaaacttaaggacacggacgacacgaacacgggaccgaccgacacgaaacgaccgaagcaaaagacaaatcagacaccgacacgaacaacaccaacgggacaccaccacgacgacacgggcaccgaccccgacgcgacacgaaacgacaccctacacgaacacgacacgggatgacaccacacgacgacccgtgaccgggacgcaccgcgcccccacccggaccgaacccatatgacccgcgacgacagacacccgcactgaacccgacacgacagcgaacgacaccaagaccccagcgaggaaagaaccagcgacacgaacgggaggcaagcgacacgcatacggacgggcacgaaccgtgacgacccgaccaccctgaaccgacgcaccggaccgtctcgaacacgaaacaagccgacggatggaccgccacaagggaacaggaaagcgagcgaaagacagcgaaacagacagaccacgacagacacgcggagaagacactaaagcaacgacatccagtgaccaatggcacaacgaaagcaccgacgcgacggggacaggaacccaagaaggacgcaagacgggcacaacgcacctaacaggcacacaagaaagggcaaatgacgcaagacaaggatatggaccgtaaaacgaaaagcaagggaaacaagccaaccacaagacgaggacacacgaagacataccccgcaaggagaccacaataaaaacagatacccagcaatatgggaacaaagggatccctatacgagccaaaaatatataacaactgcgtagcagtttgaaggatacatctgaacacagtcgatagacaccagtacagaacaaccttgttttcacatatcgacacactaaactgtaaatcgccaatataattagtttactggcacgcaaatatcacactgtgcacaaagaatcaacacacataatcaatctgtaaactaatactaactcg

SEQ ID NO: 586450 - DNA, 222 bp, Homo sapiens
  misc_feature (103)..(103): n is a, c, g, or t
ggggggccccctccccccaaaattaggcccggggaggttttttttttttataaaaaaaaaattttttcccccgcccgggttgggcgccccctccttttttttnccccccccccccccccccgggggggggggtaaaaaaaaaaacccccccccttttttttgggggggggggtttttacccccccctttgaccccccccggaaggttttttgggtacaaaaa

SEQ ID NO: 586451 - DNA, 96 bp, Homo sapiens
cctcacagactggccggtgaagttgaggctgcagcgagccatgattgcacctacttgcactccagacctgggcaagactgagcaagactctgtctc

SEQ ID NO: 586452 - DNA, 385 bp, Homo sapiens
  misc_feature (8)..(8): n is a, c, g, or t
  misc_feature (63)..(63): n is a, c, g, or t
  misc_feature (375)..(375): n is a, c, g, or t
tcttctgntgtgtctgaagacagctacggtgtacttacatataataaataaataaatctttanaaaaaataaaaaaataaaaataaaaacaatcaaaaacaaaaaagtgaaatcaaatttacctcttgggtatacaattttcagcaagtgggttactgtaaaaatattaggcactattcaattacataatagaaccaaattaatactgtcatattggagggtatttaatataaagcaagatttgctttctaattagttttaaatgaagtttataatttaatgagacaaaaatggaaatagtttaagtaataaatgtttaatcaaagaattttacatattaacagcattcatttggccaaacatctacaggtctgnaggaatccta

SEQ ID NO: 586453 - DNA, 289 bp, Homo sapiens
cgtccatatagaatccacttgtcaaaatgagttgctgtagaggtatgaatttgtttctgggttctctattctgttccattagtctatgtatctgtttttaaaaccagagtaccatgctgtttggtacagtaccattactgtagctttgtagtataacttgaagtcggataatgtaattggtctagttttcttcttttggcttaggttagctttggctatggtgtgtcttgtgtggttttatataaattttaggattgttttctctctgtgaaggaatgtctaataggga

SEQ ID NO: 586454 - DNA, 833 bp, Homo sapiens
catattgcacaatccattcaactactatgagacggttctggagtgacactgttgagaagaggaagttccctcggagctccgggagcgagccatttgatctgccatattggactcctccagctgtgcggattcgcgtgcactataagaaacacatttctacgaccactttaaagctccactcattaccggtttgtgctggagagagatggataaaaagctgtatggctaccccaggctttcattttgagacagcaagagtacccagcactatgacggacgtaactagtggcgagcaagatcgtgtggcttctctctttgatagatcttctgtagctgaacagaatggaacttgtgtttttatgacatttttcaatttttctgggcagtcactgactcatatcattaccaacatcattttctctcacctgaggctaagagattttactttatgccatatcttaatacttcacccgttacaaaagattttccacctcttacattgggcagcttctaatattaggacatgcaatgcctgtgggttcgcaagccgtgtaaatggaacatgggagcaggagtatcatatgatccaatgcatggtgtattgtgtggcctattggtggtggtgttgtgaccagaatgatctagtgtctagtggttaacactataccctcgaagaaaggtcacttttgccctattcatttatggtcttttggctctcatgtggtgactgaacatttctggagattaatcagcgtcagggaataacaaatgtccgcgtttagggaaccatttccttcccgctctaaaatataaccttgttttcagggccacat

SEQ ID NO: 586455 - DNA, 125 bp, Homo sapiens
  misc_feature (42)..(42): n is a, c, g, or t
  misc_feature (109)..(109): n is a, c, g, or t
tcagagccttgagccgatgtatatatcgcagcgctatacgtnatccgcgcgaaatgaagaagtctttatgaacatccagctgtaaagaagcggttgtgatcggcgtccnggacgcttatcggggt

SEQ ID NO: 586456 - DNA, 147 bp, Homo sapiens
ccggtggggcagggtaagatatcacgtggatacatggtacggcagagcttctggcctcaatgatgcctcctgatcgatcgctgggctggacgaccaacactgggatgacgatagagcagcatggtcatgagtgatgcccatgaatca

SEQ ID NO: 586457 - DNA, 1478 bp, Homo sapiens
  misc_feature (1441)..(1441): n is a, c, g, or t
taaaacacagtcttgctcctgtcgcccaggctgggagtcgcaagggcactatctcggtctcactggcagcctctccacctctcccgggtttcaagtgtgattcctcctgtgcctcagccctccgtgagtatagcgtgggatctcacagggcgtgtgcgccaccacgccccgggctaattttgtggcacttttgggtaaaaagcgggaattttccaccagtgtgtgtggccgcaggcgtggtctctgtggaacactctcctgtgtcacctctcagagtataactccgcgtccccctctcggcctctcccaagagagtgtgcgtgggaatttcacgagggcgtgtgaacaccacactctctaagaatatagtgcctgtgtgcgtccccctctttatcttctcgagacagtgcgcacacacaaatgtgcgagagctgtgtctcacacccacaagaacagagagacttctcacagaagtcagtgtgtgcgacagagacgcgcagacatatctccgaacacggcccgagatgtgctgggccgctgtgggccacacatctcgagtgggggactgttgccccattactctctgtgtcacacgcaaaaagacactagtgcggggacgtttttccctgtgggagaagcgcgacaagcgctttctccaggcggggggtactaccgccggagagcacctgtggcgctctgctaccacacaaagcacgagtagtgccgccggcactgtggaggaacatccgctgttgggggcgctccccatcgacagagtagccacaagacgcggcgacaccaggcgggaacaacttccgttggggggcgccccccccaaaagacaaccgtagacggcgacagaacaagtcactaacagcaactcgttggcggaacaccctctgttgcaggaagtcggccgccacacaagcggcggcacaacagaagtccgagactgcccaacagacggcgggcgacgctgtcgaaccaaccagcaagcggccggccccgcccggcctaggttcgtcgcctcccccaaagaggccggcctcagtggcgtcggcgacagcgccaatgttggcgggcgcagagaacggacgccaccacaccagccggcgtgcaccacacaggacgggcgacatcacacccagcgagccggctagtatgcgtaggacaactcttctttcccaacgaacaaatcatgcgatgggggagaacaccaccccccctcaccaaagatggtggtgcagaacaagacggagggaggacggccgcacccaaaaaactcttttgatctgtggggcgagggggggggaacaccccccccccaccaaaacaagaacggctgtgcttgcgacgcttccggtcggacagacgacggctgggggggacagctcaactctaccaacaagaagaggagcggcggcccgcctgtctggatggntacaccacccatctgtttgtgtggtgggccggccccc

SEQ ID NO: 586458 - DNA, 341 bp, Homo sapiens
  misc_feature (86)..(86): n is a, c, g, or t
  misc_feature (133)..(133): n is a, c, g, or t
  misc_feature (193)..(193): n is a, c, g, or t
  misc_feature (293)..(293): n is a, c, g, or t
tgaggtctgaaaagctgcgtttctaacaagttctcaggtgatgctcatgctgctggtctccaggacaacaactcggaggacttctncttccaggagagtcttatgaaataccaaaatttgaaaaatcagccgntgaaggaagatgtgacagaaaagtcctgtccccagaaaactgtccttttggggcggcttnggagcaccctgtctgatctctttcaaaccacaacccagacaagtttggcaattgtggaaactgcctctgcttaggagggcaagggaccagaagcaagggngcttcccccttccacaaaatgttggccagcttttcaagtgctttggtg

SEQ ID NO: 586459 - DNA, 620 bp, Homo sapiens
gctcggtccggcggcggcggcggctgtagcggaggagacggtttcaggcctccggtgcggtgcaatgctgatctcccgggccgaggcggcgatgaccgtggccgacagggccatccatgcgcttccatgcgagaccagtgggcgggccgtcagatatcacgtcatgaagaacgtggggagatgataggtggaattagctgctgcgtcttgcagtcgagtgaatatatgtcatgagcgggtcccattagagcacatgaacgcaagcgtagcaaaagggcttgtgcctggtccttgttcatcttagcggaacaatctgcttcatgagctccctgttacaaggcctgtctgccatgtcctgctttcatcaggtggctggaagagttcacctcccagtactccagggatcaggaaggagcccccctcacaccagtatttatccttaacactcttgcaccttctgacaaggcttgtcctgccagagaagttactgatgatgaggtcttagatgcaagctgcttgttggatgtcttaagaatgtacagatggccagatctcatcatttgaagaacgggatgctcacgaattattcgcatgtcgattacctcgtcattggaagatga

SEQ ID NO: 586460 - DNA, 862 bp, Homo sapiens
accccttatctttgcggaatcaccactggcggactgggaccctgtacacgtactcctgacaaactggagggccttcaaggctctcatcgactgctcagatacagtcggggcctcaggtccgcgtgctctccgacaccacacccacattccactttgggccaaacccaaccgacaccccgtgaatttctccgccacatttcctgccggcaaggatcccagcattctgagggtgatgatggattctgtgtgtcagcgagccaacgccaattgcctactcatgtgcagcaatgcaggagctgcggggcaacgtcactccagcaggcagccagcccacaggtggtgccacagggctgagcatttgcatgattccgatcatagatgccccacagacagtacctgggatgtaaccccaccttgggcatcatgcacacaaccaggccactgagacatgcacaggaggacagtgcggcgcacattctgggcgctgctggcatgcctaccttgacacgaccaggagggacatcaacaggtggggagccgacaccgacgtcggacacatagggcactgacaatcacacagaacgtcatggcaccctggaaggtgggcccaactaaagacaggagcacacgaacgcctacaaagccgccacgggccctatccgcaaataccacacacggctgggtcgccatccacatgcacttaacgcaggcccagcgcacggggcggccaggggcgcacaagaccacatgcagtcacacaacgaagtgccaacacggaagccatacaccagtgcgcagcagacccaccccaacagcgccacacccacggaaagaacagggcgccaaggacaacacgcaaaac

SEQ ID NO: 586461 - DNA, 204 bp, Homo sapiens
accctgtggagcttggccaccgaatccctctagtctccttcggtcggacgtgctctgtctttgctgatttctctgaccttgacgcttctgtgggcgtaggccttgcttgcagtgactgcccccacgctgcgtctgatgtcctcacaggcttcagctgtgtgcatctttggcctgggattatcactggagctaccacgatgtctg

SEQ ID NO: 586462 - DNA, 732 bp, Homo sapiens
  misc_feature (136)..(136): n is a, c, g, or t
agcggattcttttccgacaaaacaccaaatggcggatgacgccggtgcagcgggggggcccgggggccctggtgtgccctgagatgggagaaccgacggtggcttcctgcgtgaggtttcaggcaagtggcgatcncggggcgcgggagtcgcaggccggtggaacaggggacctggggcgcgaggccagcgcgagctctgcggaggctaaggccctgaggcataatggcagtggatgcctcgtccaccaagttcgggcctgcttggtcgaagggacattgaacgatccaaggttcccgtgggacggagattctactcatcgttgcgtccactgtcccgatgtaacggaaatcatgacgatcgactttgagtattcattcgctgagggtgccgtcctctcaataggattgaagagttgtctggaacgaattgaattgcacagatggccaggaaaggcgacgtatcccgccgtgactctgggcgcaaggcagcatcccgaaggttttcagaacggccactttctcgtttgtggctcattgcggagcgaggtagcgtgaaccataactggtggcaccaaaccggttacggaggtccgtaaggggaggtgctattagaccggtgggcctacccaaaagggggacggcgttggggacccaaccgcgccccaatccgcaggttgggcagcggacccaattttccatttcacattggggccgcaaaaggcgtccttcc

SEQ ID NO: 586463 - DNA, 179 bp, Homo sapiens
cccctttaccccttggctttggttttttccccccccgaagggggggggggattttttgaaagatttttaaacccaaaattttttttaaagggaaaaccccggggggggggggccaagcctctttttttttttaatcatgtttgggaaaaaaattgccccccctggggaggggctttcca

SEQ ID NO: 586464 - DNA, 866 bp, Homo sapiens
tatagttctctaaaccgtttatttctccccaccacaaaggtgggggtgggcgggcctaaaacacagccggtgcggcgggtccccggggtggagccagcgcaaacacgcgtgtggtcccttgcggtgcctcttaagcgcagaatggtgggacgtttgtctccacgcccacattgtggcctgctgttcatgtccgtacatacgttgattgtaagacccttgctgctggtggatggatggccggactcaccgcgggtggctcagctcccgcggcctggcctgccgctgcctgccagccccttccccgctgccccctctccgggagactctccggggggtacccctggtcccggggctagattcgccgcatgagcggctcggtgcccacgcattgtgctcggccactagacacgcctgtgccgtgttcgagaaggtgtgtttctttgcggccgccgggccagacctcttggcccagaatgttgggtgccacgtgcttggcaatagactgcgtggctcacatcggtgtatactggattagcgaagcccggccctggaaggcgcccataagaccatggggctccggggggaccacgtgttgccacccgcgcggatttgtaacctcagggggggcgagcggcgcctatcggacgagtagttaggcacttatggaagcaccaaagacctgtggctttgggcgataaaatccaccccggaaaaaattggaaaacaccaggctcagtggagcaaccggagaatggctggcggttagaccacagataggacgtgtacccaccaacttgcaacatcacgcggcgacttgaaaaggcaaaagcggacccaatgaaaacccggcacaaaggagcccagac

SEQ ID NO: 586465 - DNA, 454 bp, Homo sapiens
  misc_feature (381)..(381): n is a, c, g, or t
  misc_feature (383)..(383): n is a, c, g, or t
  misc_feature (390)..(390): n is a, c, g, or t
  misc_feature (392)..(392): n is a, c, g, or t
  misc_feature (400)..(400): n is a, c, g, or t
  misc_feature (402)..(402): n is a, c, g, or t
  misc_feature (404)..(404): n is a, c, g, or t
ctacccgcggatcgatccagatcggccattcagcgggcagccctaccggggtgataccgccgtattccatcccggacatgccaacagtcacttgggcctgtgttatccctgatccaatgcacaccgcttcagcctcggctacccgcggatcgatccagatcggccattcagcgggcagccctaccggggtgataccgccgtattccatcccggacatgccaacagcctcatctatcggcgcgaaggatgctttacggacgtcgagctttttgcgcactactttgttgacgtcgacccttgtcgtcgccaaaaccagacatgcaacatacttttcgatgtcaccacgcttcccctgacgatgacgcagttggcgcaggtctncnggccctnancgaacgcntngnacaggcctcggtagataacacaggcccaagatgaggggatcctctagagt

SEQ ID NO: 586466 - DNA, 190 bp, Homo sapiens
tgctgggattacaggcatgagccagacctcatgagaactatcacaaggacagcaacaaggggatggtactaaaactttcttgagaaagccaccccatcatccaatcacctcccactaggctccacctccaatactggagattactacaattccacctgagacttcaaagggaaaggacaaatatacaagc

SEQ ID NO: 586467 - DNA, 895 bp, Homo sapiens
attggatacataggtatggtctagagctatgatatcaagtggtttcctagggtttatcgtgtgagcacaccatatattgtacaagtaggaatagacgtaaggcacgacgagcatatttcaccgtcctgcttgccaatgaatcatccgcatatccccaaccggcggtcaaaagtatttagcctgactcgccacacttctcacggaagcaaatatgaaatgatctgctgcgagtgggtctgcagcccgtaggattcatcatttcttttcacccgtaaggtggcctggactggcgatcgtatgagcaaactccatcgacgtagacatcgtactacacgacacgtacatactgttgtagctcacttgccacctatgtcctatgaataggagctgtattgggcatcagtaggaggcttcattcactgattgtgcccctatgctcaggctacagcctagacaaacctacgccaaaatccatttcactatcatatttcatcggcgtaaatctaactttctttccagaaagctttctcggctatacggaatgccccgaccgtgactcggactagcccgatgcatacagcagatgaaaagatcctatcatgctgtaggtcatgcattttctctaacgagagtgaatagttaactgaattttcatgagttgagaagctttcgctttgaagggaaaagtcctaatagtagaagaaccttcataaactggagtggtatttggtggcggcagcctaaaggttgagaaccgggtttaattggaaaaaagggggtttatcccccagtgtgttaacccaggcgcggtttctaaaacaaaggaaaaaagatgacgagacaacataaaattggggggcaaaaaatgcggggaaaaagagtaggtatggtaaag

SEQ ID NO: 586468 - DNA, 173 bp, Homo sapiens
  misc_feature (16)..(16): n is a, c, g, or t
atcagtgtgcgctcanctgtcggaaagcatcagccactctgggtgcggccggccgcattcttgcagaacgcggtgtggatggcattacgggtaatccggaaatcatggcgcgccgtgtggaggaatccatcggtctggccacagcgcttaatccgctgatcggctattatgcg

SEQ ID NO: 586469 - DNA, 931 bp, Homo sapiens
gctcttcccttgcgctagcgcagccttggctcgtggtcccaacagagcgtctgaagcgcggtggcagttccaatggcattggatgctgggataaattggatcaggtgtggtacgcgtccgtcgtccgatccgacgcggtcccctacaacggtgagaagcgtgtctcctccctcgatcattttctcatgagagaacagactgtaagtatgcgcctgacagtgagactgagacgtaataggaacgactttgcactgtcacgcgggtgtcacttaacacaatctgactggcgaacggctccggacagctggtatatatagcgctgagccctgtcgtggaagtgtcatgggtagtgctcatcagacacttgagcagagagcgggaggagatttgccagtctgttctagtgacaccgaagggtctgcttatgcgtcgttacaatcagtaattaacaacacgtgggagaggagtgccaacgcttaccaagttcgtcgcaagagctgagcaatagatcttgcgtgggcacaaagatagggaattccttcatctggtgtagtctatgatgcccgggaccgatccgttaccccgatcccctcatcaccgtgaatgataccattcagattgatctcagagactgctcaacgattactgaatttcatcacagttcgactactggttaacctgctgtatggtgactggaggtgctaatctaggaacgacttggtggtgatcaccaacagagagaggctgcctggggatccttatgaacgtggtgtcacgtgcacagatgccaaggcaacaggtttgcactcgactttccaacatttttgttatggcaaggcaacaaccactgattctcttcccggagaaaggtatccgcctaccattgtgagagaagacaaaaactgcggcaacaagcatggtgcactggtcc

SEQ ID NO: 586470 - DNA, 203 bp, Homo sapiens
taatggtatctcgagtgctagaaggaaaaagggcacataacagaaatccaaatacaaatgaccattcccacgaacttctggcaaaccaacatcaaagaggaatacaaccatcttggtttcaaaaaagggtgtcttttccagagcactaaataagctttctgaagccagtaccaaacctagattggtaacaaatctaccggggg

SEQ ID NO: 586471 - DNA, 523 bp, Homo sapiens
tctcccctccccccctttacattcccctgcggaggggttccccggggcaggggcagagcgggtctcaccccgcggggtctcccggagcccaggccgccgctatggagagagggagcccctcgcaaacaccgggctcgagcggcaggaggcactcagaacagggggtgcaacatggaacataaatccgcatgaccgacacaagatggcagaagccgtgcgctcccagatcgagagcgcacagatgtcaccggagactcaggagcacccccacgaatcgcggattctccccacgtgcatccttccgcttccactacagcgtcagggaccagacgactcgtatcgagcggcgtgcgtaccagccgacaacctagcggaggacggccactgatgaaagactgagcaagggctggaacacgggggcccccaccggggaattcacgcccagagggtacaaccaagatgtggaaaagggactgaaccaggagctcacgacccgaggagccaggcacggtataccagtgtc

SEQ ID NO: 586472 - DNA, 696 bp, Homo sapiens
cccttgttttaagggggagtagatgttactggaacccccactccgtttgctcgcatctaatccctcactgggagtcacatagtgaattacggttcgcccttaatccgtctccaccatcggcgcttcttcggctcctttggcagaccactgagctatgtaatatctgaacgagtaagctttatcgggcccataccactggatggaaggatggagaccccaggagatcctgtgtgcgacgaatcccatcagcagactcgggcatattgtcacagcgacctcgggcttccggtaacaaccattgacctcctggcgtgtacccagcacagcacacacgcttgagactgtttctcccgacccaaaccaccacgtgtgccccgaaccagaagcgggacccggcttgtgccggcctaccaggatgtcgtagcaaacgaggatctaactgccctatgctcgcttaccctcgtgtagcaaaactcaccatccgctatctgcgaggtactttgagaatgcctggatagaaccaccagtacccgagaccactggacactctccatgatactcggcaaaccagtggcgtcggactcgagtcccccggttttggaagagtggtgagcccttgaggtccccgtaacgacacatcaatgtgcgctatgtgtttgccgaatgtaactcaactccaatgaacaaaaatacaaa

SEQ ID NO: 586473 - DNA, 308 bp, Homo sapiens
ttataacctaatcgccttacgagcatggaccctaaggagccagatgtacgggaatttcaatggcttcgagcaactagcagtgtgtcaggtgtcaactgccacggaaaagactctgaaaaaaattgcagactggcggtcacgagcagccaagtctgaagagatgtgtggactagtgatgggactgttcactcggctctccaattgtgccaacaggacaattctttctgacatgtactcctatgtttgggatatcaagagtatcatgtctatggtgacctcttctgtccagcgattagggtatagtgggt

SEQ ID NO: 586474 - DNA, 255 bp, Homo sapiens
cccgggttgtttcaggctcctggggtcaggtggtccccctgcctttggttccaaaggccccggcccagttgtggctttttccctttcccccatggccccccaggggtttttttcccttttttggattggctttcgtaaattggtttttttggtgggcaagttcttttagttgggaactttaaattccccctgaaatgttttttcctcccgtttccttggatttttactcccttaaggggtggggttgggggtcca

SEQ ID NO: 586475 - DNA, 175 bp, Homo sapiens
  misc_feature (2)..(2): n is a, c, g, or t
  misc_feature (96)..(96): n is a, c, g, or t
  misc_feature (155)..(155): n is a, c, g, or t
cntgggcttcccaggcctggggtctttgtaccattcatggagcggctgataaccttttctgcataaggccacacagataacaccttgtgcctgggnctgggttacatggggccaggtgtcggtcggatgacgtgaggcccaatgctgtgggcacntgacccctggccccacaaaa

SEQ ID NO: 586476 - DNA, 456 bp, Homo sapiens
  misc_feature (199)..(199): n is a, c, g, or t
  misc_feature (230)..(230): n is a, c, g, or t
  misc_feature (286)..(287): n is a, c, g, or t
  misc_feature (293)..(294): n is a, c, g, or t
  misc_feature (320)..(320): n is a, c, g, or t
  misc_feature (339)..(339): n is a, c, g, or t
  misc_feature (397)..(397): n is a, c, g, or t
  misc_feature (411)..(411): n is a, c, g, or t
  misc_feature (455)..(455): n is a, c, g, or t
ccgttctgtttttgccttaaataaacaaccccccctttggcacaagggaaaacccaaaccccccaaaaagcccccttggggggaaaaaaaaaattttttccccttttttcccccccacaatttttaggggtttataaaaggccgtgcgttttttttttaaaaacaaaaattttttttttaaaaaaaaaaaaaagccggnccatatctcttttttaaaaaaaaaaaaaacntttttttttccttttttttaaaaaaaaaaaaaggccccacacaaaaaaaataaatnntctttnnttattggggggggagaaaaagaaggnccccccctctttttttttnaaaacccccccctttttcttttttttttaaataaaaaaaccaccccccatatattttnataggatattgcgnctcccgcccgcggggggttgtttaattaaagaaaaagaaaaatna

SEQ ID NO: 586477 - DNA, 498 bp, Homo sapiens
  misc_feature (92)..(92): n is a, c, g, or t
  misc_feature (158)..(158): n is a, c, g, or t
  misc_feature (260)..(260): n is a, c, g, or t
  misc_feature (262)..(262): n is a, c, g, or t
  misc_feature (264)..(264): n is a, c, g, or t
  misc_feature (296)..(296): n is a, c, g, or t
  misc_feature (325)..(325): n is a, c, g, or t
  misc_feature (335)..(335): n is a, c, g, or t
  misc_feature (378)..(378): n is a, c, g, or t
  misc_feature (382)..(382): n is a, c, g, or t
  misc_feature (389)..(389): n is a, c, g, or t
  misc_feature (403)..(403): n is a, c, g, or t
  misc_feature (427)..(427): n is a, c, g, or t
  misc_feature (436)..(436): n is a, c, g, or t
  misc_feature (463)..(463): n is a, c, g, or t
  misc_feature (468)..(468): n is a, c, g, or t
  misc_feature (470)..(470): n is a, c, g, or t
  misc_feature (477)..(478): n is a, c, g, or t
cgccccgggagcctacccagcacgcgctccgcccactggttccctccagccgccgccgtccagccgagtccccactccggagtcgccgctgnagcggggacatggtcctctgcgttcagggacctcgtcctttgctggctgtggagcggactgggcancggcccctgtgggccccgtccctggaactgcccaagccagtcatgcagcccttgcctgctggggccttcctcgaggaggtggcagagggtcccccagcccanananaaaaatgaaaccaaaagatgctggacccaaangagagatctagctgtgcataaccaaagancttctcctancttcgggaaatctggctggtattggggttccattacgagccancgangcccganaaaacctgcagaanatgccaaaaaggcaacgttcttantacagtganaacacgcaccccaactacctgttcacnctgtnantgaaaannaatcgtggccccacacaatg

SEQ ID NO: 586478 - DNA, 229 bp, Homo sapiens
ggacgtctggagggacatcagctgggagtggtgtcgtgtggacagtcagatcacacccgtgcccattgctgcatccagctctcttgatgctcaatattcgtcatttgtggacattgtgaacatggcaaacagatcaagtccatagatgcaggacctgtggatgcctgtactttggccttttctcctgattcccagtactctggtctcaggaactcatgtggggactcca

SEQ ID NO: 586479 - DNA, 829 bp, Homo sapiens
ggttgcagcagaaattgagttgcggcttgcccttgtccagacctatgttctgcttgcgttccaggaagacaggaggtgcactgtaccaccgcagattatctatgtgctaggccactgcatgtatgggccgacactgattatcagctctgatgtttcagagagaagacctcagaaaccgaaagaaaagcaccaccctcctatgtgtctgaagtttcatcgtgtgtttatgaaatctgaatgggaaatggatcagcacgattgtcttctaagggtaattaaagataaaagtaaaacagaattacggctttgacagcaataatacgattatcttataggaaaaaacaatgtcattgtaaagtatcatgacaatacgagtaactgacagggctgtcaaagtagatgacatcatgtgttagcctgttacctaatcccgctagaattgtatggttgtgggattgtagaattcagtttttatcatcctacttataacaatcaaagatgatcgctataagttgggcacctgtgctgattgtgcggtggaaactgctaaacgccatgtggtacatacttcctttacgaaatatcctgataagctgttgacggatactctgtgttcacccttttgtgtagactgcctggaactgccagtcactgttgtttgcaccagcagtatttgtcgcacacgtaccgtcgatttacttgaagaaggtgacagtatgttactggattaatctggcggcttttaagttccaacggccaaagtaacgaacttgggtccatacttgcatttttgtggtacggcacaaagcccgaaggtgccctgcaggcg

SEQ ID NO: 586480 - DNA, 1510 bp, Homo sapiens
ggtgcaccgtgttttggtattgttgtcggctcccgtgttgtgtttttgtttgggttcgacggactaggtgtgtctgttgttgtggcgcgtgtggcggtggggaggcggggttgggtgacgccccacggtgttgtgtgcttgggtggccggtccctgcgtcttatgttgtcgttggttggatcccccctcttgttgtcccaggtgtgtgttgtattgtggggcgcgcgtaggagtgggaggtgttgttttgggcggtgcgtccacagttgttgccccttgttgttggcagacaccgggttgtttgtgtgtgtgtggtggtctactcgccggcgtgttggggggtatgggtataatgtggggtggccggctggtcgcaaggagaattgagaaggtcttttttggccacgtaggatgccttgcgccgcggaaggatgagtcgcgttggtctagcagaagggtctaagcgagttagtgacaacattggtgggtcgttttttctcgttgtggagtgtccgctggtcgccggggtatggtatccacgaagtttgtccccaataggttttgtgcatatgtggaggaggccccccctccgggcgtaaccccaccggttgagtatcgctgttatgagcctttcgctgtagaaagatgcctaaagtggttgggaacttctcttgtagaactcttgttaagaggagaagaggagaggggagtaccgcagtgaaaacttctcgtggcttagaggggacccacctctgcttgtgaggagcagtggtgtgtgtctgtgcggtggtcactgacacatacacacagtgtgtagtgagagtgtgtgcacagtactcgcgctcacgcgtctccctccacgtcttcccacagtgagagggtgttgtgctggtgagagtgagaacagcgctgttgtgacaaagtcgtgtttctctcggcccaccacagagataatgacactctgtgtagacatcgagatctctttgacacacacatcgtagagagagactccaccgccgctagtctctctagaggtggggtagacacacgtctctctacatatgtgttatcagctcgggtgtataaaatcgtgtgtatatgtgcctcataagagaagagaccacattctatagagggcgcgcgcgcgctgtgtcgcgccgtcacacgcccgctgttagagatcccagcgccacacttttgtggagaggcccgagaggccgcgggtgtgagatcacacgagagggtcacgcgagcgagctccacagcacctttcctgggctctacacccgcgtggaaaccccgcccttgtcaccacaaaaatacaccacaaacaaatattagcactcgggccgctggtgtagacgcggcgccctcgttagttccccagcaccccttgggacaactcgaggcccgcgagatatggcgtgtaaccccgcgagtgcggagccttgccgtgagcccatatcgcgcccctgcactcccgcctgggcgaccgagcgagactccctct

SEQ ID NO: 586481 - DNA, 369 bp, Homo sapiens
  misc_feature (141)..(141): n is a, c, g, or t
  misc_feature (178)..(178): n is a, c, g, or t
  misc_feature (188)..(188): n is a, c, g, or t
  misc_feature (193)..(193): n is a, c, g, or t
  misc_feature (206)..(206): n is a, c, g, or t
  misc_feature (210)..(210): n is a, c, g, or t
  misc_feature (316)..(316): n is a, c, g, or t
  misc_feature (368)..(368): n is a, c, g, or t
ccaaacacaggcattctgtagcatagcaaaaccttctcaaatgacagagattctgtttgctgttgagaatgttgttatttggatttctgcactgtttaacaaatgaagtaaaagaaaaacactactgcaatcacgtctttnggtatgctagtatcagtcagatgcacttagagtgaanaaacactgtnttacngcacacagattgnaagnattgcgtaccaagtgatacaacttgaaatgcagttctcacttctggtttgagaaatgatattttatacgcctcaagcttcggctttgataatcttggatggtaacnattctagaccatcatgaattccctatggtactaatggcaggggcctttgtcnc

SEQ ID NO: 586482 - DNA, 952 bp, Homo sapiens
ccaggatactatgccttcgacctgtcaggagccactcgagtacttgcaatggatggatgacgaaggagatcttgtcgctggctatgaaagcctgaaaaagaatgaaattcttcatctgaaattacctctcagactttctgtaaaggaaaacaagggcttattcccagaaagagatttcaaagtgcgccatggaaggatttgcaggacaaggtcatatacttcgatctaaagcatgtgccacataccagattgctggtcaccagatggccttccaaggttgtgatctgcaaggtgtggcaggttgcagaggacagtgatgtcatgtaaagactgtcagcgaccatggctgtgcatgagaaagaggagagtctctggcctagggtggccgtcttctccacattggcacccggagtcctccatggggcgatggctccgcagtctgcaggtcgtcgatctggacgtcccggaagaccatgtacagtctcagatgtcagtgagagtgacgagctgagtagcctgcaggtcctagatgcagacgcctttgctttctgctgtgcttcgggccggctggggctttgtgagactcccggcgagtgtgggcaccgttggagaatcgcagcctggcctgggtctggtggagagagagggtgtgctgacatgttgggagctcgggggccgggccctggtgcccatgtatggccaggcttgggtcagatgggcgtctggtcttcttgacccgcggtgatctctggcatcctgtgagctcagtccagtggccagtatccgtacctagccctgaccgagctgctgcagtgattgggcccagcctgagaatggggggccctcgggttcgacggtccgcccggtcctgtgccccttgggtgtgacgggcccaaaccggccctaactctaccagagggacactagaggaggagcttgtggccgtccttga

SEQ ID NO: 586483 - DNA, 408 bp, Homo sapiens
tcaaccagggaggctggaaatcctataatgcacaggacatctccacaggacaaaggattatccagttcaaaatgtcagtagtgccactgttgagaaacctgttgaaaagcttggccagtcatagtgattcacacctttaatcccagtactttgggaggcctaggtaggcaggtcacttgagcccaggagttcaagaccagcctggccaaatggtgatacctgatctttactaaaaatccaaaaagttagccaggcgtggtgctgcatacctgtaatctcagctactcaggaggctgaggcgggaggattgcttgagcccgggaggttgaggctgcagtgagccacgatcacaccattgcactccagcctgggcaacagaatgagactctgtccataaacaaacaagaa

SEQ ID NO: 586484 - DNA, 433 bp, Homo sapiens
acctactggcctacttattttaaaaaatgcttagtttattgtgccatgaaaaacaggttttattttcataagccttctgtactgtcagctatggcaaatgcatacagtcaactcagtaacaggtgctgagtcccctttgtgtcctggagcactaagctgaccccagaggacatctgaggaaagaggtcagtgatgcctcccagggtctgaggtctgtgtgagggcaggagtgacgaatgtccaactctaggtgtctgggaaggaggcccaggtggcgaaaggctggcaaaggagagggtggcttttgagctgggcagagtagaaaacgtttccaggaggaggaggaaactgaaaaatataagaaaagaattcgttgaaggtattgccatacttcatacaaattagcatttgcttaattgggagtagaaaccaa

SEQ ID NO: 586485 - DNA, 187 bp, Homo sapiens
cggcacgaggttggaattcatccaatccaaatgcggcatcttcaaacctccatgatgctgcttacatgtctcgatcccacttaactatcttgggctgtgacaaagtcacatggttcacacggcaggcatggttgtggttaatctggtttatttttgttccacaagttaaataaatcataaaacttga

SEQ ID NO: 586486 - DNA, 127 bp, Homo sapiens
aacggggaaaaaaaacccggggtttttttttttgggggggcccgctcaaaaaactaggggggggggccaagtgcccccccccccccccccccccggtggggcgggccccaaaaaaaagggggtgctt

SEQ ID NO: 586487 - DNA, 404 bp, Homo sapiens
gttgatgtcttagtgcaagattaccaaaatcttagtcaaattgaacagtatattcattttcttctccaactaccaaaacacagtcttcattataaggtgattggggtgcggttgaaaaatctgtggtgaaacagagactcagaatgtttttgtgcacagagacccaaatgattgctcccaaacctgtcaatattcgcgtgctacgcactcaccaatgctgatattaaaatgtggttatctgataaatattcccttgtgtatggaatagctgttttgcatagtgtctccttccacagaagaatcttcacaaatctccttttcccatctcccctgtctttatgtgcaaaagagcacaggtgtcatctatatcctcatcatcatcgtggtctgtacactctcgtgca

SEQ ID NO: 586488 - DNA, 841 bp, Homo sapiens
ggccggcggtaggttgccagctagggtggaaagcggtggtagctgcatgggtgctggggctcggttgtagtagtcgcgatgtcttctccgaggcagagccaggtcgccggatgtgggaagccagtccttcgaaccacaggaggtatttaaagcatgtgatgaagatcagaaaggatatctcagcagagaggactttaagaatgctgttgtaagtgctgttgggtacaagccctccaagaagtgcatctgtgatgtcttcaataaatccaaatagttctggtatataactcgagggggttttgaaatatggtcgagggaaaaaggactggaagctcaagggatatcggaacgaatgtaggacacatcttcacagccttttgacacctactattgtgattttgaacctttggaagatttcaaaaaagctttttaggcagggtggctccaaaaattacccggaaaaggaactgtgcttgaggtatccaggaaggtagatcgaagattcaagatggtcacgtcagggttaaagagatttgaatatgccctgaattatggacagaaggagagcctaactatgtgtgaactactttgttggtaacttctgggggagatcactagattgtaatgtcagcagatctactctataatgatgtcatgctactgacttgtggttaacctttaaaattccaataaaaaaaaaaaaaaaaatttttggggggctggcaggaaatgttttaacaaattttggggggccaaggtattaaatggaaaggtttcaagagaaactgttaaatgtggttcacaaaaagggggcggggttaaaaatggggtttgtaaaggc

SEQ ID NO: 586489 - DNA, 846 bp, Homo sapiens
attatactagcatttaccatctcacttctaggaatactagtatatcgctcacacctcatatcttccctactatgcctagaaggaataatagctatcgctgtgcatgtatagctactctcataaccctcagcagccactccctcttagccaatattgtgcctactgcccatactagtcttggacgcctgcgaagcagccggtgggcctagccctactagtctcaatctccaagacatatggctaggactagcgtacataaggctaaagctactccaatgctaaaacctaatcgtgcccaaacaatgtatatagcgtaaccaggtgagatgactttccagaaaacacataattcgaatcagagacatgcagccagagcctaattattagcatcatcgcctctacgatttattaagcaaatctccttaatgataacagttcacaagcaagaataatcaatatttaatatcttcttcgaaagcacagtttatccccacttggctatcatcacccgatgagggaaccagccagaagggctgtgacgcaggcacatacttcctatgctacaccctagtaagtcccttcccctaagtcatgacgtgattaaactcacaaaggctaggtcataaagttctaataatcatctcagtgaccagatattaaatctgaagcagaattaatatgactagttaaaaaatagttgtataagtaaagtactattaggacacattatggtcctaaggcgttgtgggccagtgggaatggatgggaaattaaatggggaggaaagctaaaatgtaactgggaaaagacttggtacagggtaaagctgaaagaagtgagataaat

SEQ ID NO: 586490 - DNA, 459 bp, Homo sapiens
ccctcacccattttcttttcaacagtttaacaatatataaatacttctcatccttccttgtaatctcaagagagacatattacacatactactctctgaagctagcctctcccctacttgtaacttttttttttttttttttaacagtcctgctctgtcacccagtacccaggctggagtgcagcagcacaatcatagctcactgcagcctcaaactcctggactcaatcctcccacctcagtcttctaagtagactggactacaggtatgcaccaccatgcctggctaattttttttaatagagatgggatctcactatgttgcccgggctgatcttgaactcctagcgtcaagcaatcctcctgcctcagcttcctgagtggctgggattacaggtgtaagccaaaacactggctacttataacgtcgacgcggccgcgaatttagtagtagtaggc

SEQ ID NO: 586491 - DNA, 399 bp, Homo sapiens
ctattcatcggcactccctagagcctctaggaaatccacttgtcatgacttcccatgattcagatttccctgtcatttcggctaagccctggacccatctcctgttgcatgttctgaagcatgagagggctggacacactccttaacatttgttctctgaactgtggctcctgacatcgctctgagcctctatatgggactgtccattgtagggatcctagtccttctgtccctacccttgcgtttttcttctctcattctcccagcctttggcatttctatctgggtctctatttcggtgtattgtgaaagcgtgctcgattacctagcgacggctgccgatgaactcgcgtagggtaccggagctcccatcttcggtattcatcggtcatgccgtct

SEQ ID NO: 586492 - DNA, 1725 bp, Homo sapiens
  misc_feature (1)..(1): n is a, c, g, or t
ngggcgactgtgtgttttttatttttcggtatttgtcttctggtgggtggcgtctggctctcgtagtctcgttctgttgttctttgttcgagtccgccttagttgtgtgtgttgtctcttgtgattggtcttgttgtcttgtgtggtgattgttgtcgtctgttgcggttatggggtatcttttcccgtttgtggtgtgtgtgtggttttcttcttgctttggttttgggtttgctggcctttgttcgttgcgtgactcctgtgtgcggtcttgtgtggtatgtctagtctttgtgtatctggtgtctcctgttcgtttgttcttgctgcttcgttattgggctcgctgtttgtgctgtgtctttgtttgcttgtggtccatttcttctctctgtcgtctttggggtcttttgggttgctttggttggttcgcttcttgtgtggatccctctcgtttgtgtggtttttccccctctgtgttagtattttgtgccctatttgtcgctttctgtgttttactctgttgatattggtccttctttggttctcgttgctccttggtgtgatcaagtatctgtcaccggtggttatactgtattacttgccatcggggagtccttctgtgtgtatgtctgttgcggtgttcatttgtgggtcgatttcgttcttcggttgtgtatgtggcgtggtttggttggtacttgttgtgtttgtgtttaatcgttctgtggtgttatatcgcccctgttttgtgttgctcgctctccgtgtggtgtcggtatatcctgctcttgagtgtgctctgtcgttgtcgatttggtgtatgttcgcattggtttctttggtggttgtttcctaactgttcatctcatcctgtttttctttattggttgttgtggttcttgtctatgtcttccattcctcttgtttccattgttataggttgttgcggcttcgtggtatggtatcgtattcttgtttccaagcgtttgtgtcattgtttggctctatatatcttgtgttatgcattcgtgaacgggattcaataggttctatgccctattgttgttgtccttcatgtgagtgttatgtgttctccatgtgtttgggatgtcatactctgtgtatatgtgatattaaggtgccgtgtgctcttgtggtgtgtgattgctgcttgctagctaattatttgagttatctgttgcgctttgcctgtgttgagtgtgtgctcttggtggctactagctcctcttgatatgtgcaatcttgatgctattgttgctgcaatcttccactttggcatttagcttaaataccattcctatggtcatagaattctatgctgaggtggctcaaggatgactgcttgttgccgagagataccctttataagcgacgcttgcaccgcaatgcgcgtatgcctcatgctgtgcactggcacacctgggatgttggcatgacatgtgctgtgcagagatgccctatcttgaatattttgtcagtgactgaaaccatctggtgcattctgagagtgcatgatgatgttatatgttgtgcctgttaaaaaagcatagtgagcagtgttagcttagttctcttcttgatgtaggttattatgattagctttgtcactgtcttcactactctagcatggaaacaagatgcaattccatttgtaggtagtgagacaaatacgccgatcctactaaagaacatgaagtcagt

SEQ ID NO: 586493 - DNA, 191 bp, Homo sapiens
tttaggtggggttcccaaaaaccccttcagggtgggttgagctgctttcccccagggtttttgtgcagctggattttttttgttgcaaacaagcctggcatctgtttccccttgttcctgagtggccccccatggggtttttagcaggctgtttttggtttttggcaataaaagtactttggatgctgtta

SEQ ID NO: 586494 - DNA, 316 bp, Homo sapiens
  misc_feature (144)..(144): n is a, c, g, or t
  misc_feature (297)..(297): n is a, c, g, or t
  misc_feature (302)..(302): n is a, c, g, or t
tgcctttgctccagggcatttgtggaggatcgaaaattgtacaatttgggatttaaaggctattacatcagagacagtggcaacaattcaggagaccaggcgacagaagaagaggaaggtggtgtattcctgtgggtactgcangaatcacattgacaagcaaatggcatagcgcctgagatgaaaagtgaactgtgattgctgaggcttgaacttcatgagaagatatgggattgctcacttgcaatttggtaggtatttctgaaacataacgacttttgagggtatcgtatgaantaatnttaattaaaggtta

SEQ ID NO: 586495 - DNA, 188 bp, Homo sapiens
catgtcctgtaatttaccatggattttatctgtgaattactttccctatatttgtatatcactaagcattaatcaagtgcttacatttgtattatctcatatgatcccctcattaccctggacaggattgtctgattggcatatgtcgggaatgattatgtaataatggaaagtgtctaccgggagga

SEQ ID NO: 586496 - DNA, 103 bp, Homo sapiens
gggaaggcctctgatatgtaccatggtatgacgtgtgaagccctatccataagggccatgaggacgttgagttcatcccccgcgctttgggggactcctctag

SEQ ID NO: 586497 - DNA, 156 bp, Homo sapiens
tggggggggggacaccccatattacatgatgtgattattacacattgcatgcctatatcaaaacatctcatgtaccccataaatatatacacctaatacccacaaaacttaaaatataaaatgttttaaataaaaataaagaaaagatttcccaca

SEQ ID NO: 586498 - DNA, 2817 bp, Homo sapiens
cgccggcggccatcaagggctagaagcgcggcggcggtagcagccaggcttggcccccggcgtggagcagacgcggacccctccttcctggcggcggcggcgcgggctcagagcccggcaacgggcgggcgggcagaatgagtctgcaggtcttaaacgacaaaaatgtcagcaatgaaaaaaatacagaaaattgcgacttcctgttttcgccaccagaagttaccggaagatcgtctgttcttcgtgtgtcacagaaagaaaatgtgccacccaagaacctggccaaagctatgaaggtgacttttcagacacctctgcgggatccacagacgcacaggattctaagtcctagcatggccagcaaacttgaggctcctttcactcaggatgacacccttggactggaaaactcacacccggtctggacacagaaagagaaccaacagctcatcaaggaagtggatgccaaaactactcatggaattctacagaaaccagtggaggctgacaccgacctcctgggggatgcaagcccagcctttgggagtggcagctccagcgagtctggcccaggtgccctggctgacctggactgctcaagctcttcccagagcccaggaagttctgagaaccaaatggtgtctccaggaaaagtgtctggcagccctgagcaagccgtggaggaaaaccttagttcctattccttagacagaagagtgacacccgcctctgagaccctagaagacccttgcaggacagagtcccagcacaaagcggagactccgcacggagccgaggaagaatgcaaagcggagactccgcacggagccgaggaggaatgccggcacggtggggtctgtgctcccgcagcagtggccacttcgcctcctggtgcaatccctaaggaagcctgcggaggagcacccctgcagggtctgcctggcgaagccctgggctgccctgcgggtgtgggcacccccgtgccagcagatggcactcagacccttacctgtgcacacacctctgctcctgagagcacagccccaaccaaccacctggtggctggcagggccatgaccctgagtcctcaggaagaagtggctgcaggccaaatggccagctcctcgaggagcggacctgtaaaactagaatttgatgtatctgatggcgccaccagcaaaagggcacccccaccaaggagactgggagagaggtccggcctcaagcctcccttgaggaaagcagcagtgaggcagcaaaaggccccgcaggaggtggaggaggacgacggtaggagcggagcaggagaggacccccccatgccagcttctcggggctcttaccacctcgactgggacaaaatggatgacccaaacttcatcccgttcggaggtgacaccaagtctggttgcagtgaggcccagcccccagaaagccctgagaccaggctgggccagccagcggctgaacagttgcatgctgggcctgccacggaggagccaggtccctgtctgagccagcagctgcattcagcctcagcggaggacacgcctgtggtgcagttggcagccgagaccccaacagcagagagcaaggagagagccttgaactctgccagcacctcgcttcccacaagctgtccaggcagtgagccagtgcccacccatcagcaggggcagcctgccttggagctgaaagaggagagcttcagagaccccgctgaggttctaggcacgggcgcggaggtggattacctggagcagtttggaacttcctcgtttaaggagtcggccttgaggaagcagtccttatacctcaagttcgaccccctcctgagggacagtcctggtagaccagtgcccgtggccaccgagaccagcagcatgcacggtgcaaatgagactccctcaggacgtccgcgggaagccaagcttgtggagttcgatttcttgggagcactggacattcctgtgccaggcccacccccaggtgttcccgcgcctgggggcccacccctgtccaccggacctatagtggacctgctccagtacagccagaaggacctggatgcagtggtaaaggcgacacaggaggagaaccgggagctgaggagcaggtgtgaggagctccacgggaagaacctggaactggggaagatcatggacaggttcgaagaggttgtgtaccaggccatggaggaagttcagaagcagaaggaactttccaaagctgaaatccagaaagttctaaaagaaaaagaccaacttaccacagatctgaactccatggagaagtccttctccgacctcttcaagcgttttgagaaacagaaagaggtgatcgagggctaccgcaagaacgaagagtcactgaagaagtgcgtggaggattacctggcaaggatcacccaggagggccagaggtaccaagccctgaaggcccacgcggaggagaagctgcagctggcaaacgaggagatcgcccaggtccggagcaaggcccaggcggaagcgttggccctccaggccagcctgaggaaggagcagatgcgcatccagtcgctggagaagacagtggagcagaagactaaagagaacgaggagctgaccaggatctgcgacgacctcatctccaagatggagaagatctgacctccacggagccgctgtccccgcccccctgctcccgtctgtctgtcctgtctgattctcttaggtgtcatgttcttttttctgtcttgtcttcaactttttttaaaactagattgctttgaaaacatgactcaataaaagtttcctttcaatttaaaaaaaa

SEQ ID NO: 586499 - DNA, 348 bp, Homo sapiens
catatgtatgggatatcaggtcagtgggtgttgagcttgaacgctttcttacattggtggctgcgttaggcctactatgggtgttaattgttactctctctacaggtttttcctagtgtccaaagagctgttcctctttggactaacaagttacatttacaaggggatttagagggttctgtgggcacaactttaaagttgaactaagattctatacttggacaaccagctatcacccaggctcggtaagttttgtcgcctctaacctataaatcttcccactattttgctacatatgacggggtgttgctactttatagccagttcttcaggtagctcgtctggttt

SEQ ID NO: 586500 - DNA, 2475 bp, Homo sapiens
  misc_feature (54)..(54): n is a, c, g, or t
gcttctggtgtgagaatgtaaacctatgtgagaatgaatgctgaggcccctaanctcaccaggtactcgctgcttcacgtgattaagtctcttttaaaagccaacagctcatcaaggaagtggatgccaaaactactcatggaattctacagaaaccagtggaggctgacaccgacctcctgggggatgcaagcccagcctttgggagtggcagctccagcgagtctggcccaggtgccctggctgacctggactgctcaagctcttcccagagcccaggaagttctgagaaccaaatggtgtctccaggaaaagtgtctggcagccctgagcaagccgtggaggaaaaccttagttcctattccttagacagaagagtgacacccgcctctgagaccctagaagacccttgcaggacagagtcccagcacaaagcggagactccgcacggagccgaggaagaatgcaaagcggagactccgcacggagccgaggaggaatgccggcacggtggggtctgtgctcccgcagcagtggccacttcgcctcctggtgcaatccctaaggaagcctgcggaggagcacccctgcagggtctgcctggcgaagccctgggctgccctgcgggtgtgggcacccccgtgccagcagatggcactcagacccttacctgtgcacacacctctgctcctgagagcacagccccaaccaaccacctggtggctggcagggccatgaccctgagtcctcaggaagaagtggctgcaggccaaatggccagctcctcgaggagcggacctgtaaaactagaatttgatgtatctgatggcgccaccagcaaaagggcacccccaccaaggagactgggagagaggtccggcctcaagcctcccttgaggaaagcagcagtgaggcagcaaaaggccccgcaggaggtggaggaggacgacggtaggagcggagcaggagaggacccccccatgccagcttctcggggctcttaccacctcgactgggacaaaatggatgacccaaacttcatcccgttcggaggtgacaccaagtctggttgcagtgaggcccagcccccagaaagccctgagaccaggctgggccagccagcggctgaacagttgcatgctgggcctgccacggaggagccaggtccctgtctgagccagcagctgcattcagcctcagcggaggacacgcctgtggtgcagttggcagccgagaccccaacagcagagagcaaggagagagccttgaactctgccagcacctcgcttcccacaagctgtccaggcagtgagccagtgcccacccatcagcaggggcagcctgccttggagctgaaagaggagagcttcagagaccccgctgaggttctaggcacgggcgcggaggtggattacctggagcagtttggaacttcctcgtttaaggagtcggccttgaggaagcagtccttatacctcaagttcgaccccctcctgagggacagtcctggtagaccagtgcccgtggccaccgagaccagcagcatgcacggtgcaaatgagactccctcaggacgtccgcgggaagccaagcttgtggagttcgatttcttgggagcactggacattcctgtgccaggcccacccccaggtgttcccgcgcctgggggcccacccctgtccaccggacctatagtggacctgctccagtacagccagaaggacctggatgcagtggtaaaggcgacacaggaggagaaccgggagctgaggagcaggtgtgaggagctccacgggaagaacctggaactggggaagatcatggacaggttcgaagaggttgtgtaccaggccatggaggaagttcagaagcagaaggaactttccaaagctgaaatccagaaagttctaaaagaaaaagaccaacttaccacagatctgaactccatggagaagtccttctccgacctcttcaagcgttttgagaaacagaaagaggtgatcgagggctaccgcaagaacgaagagtcactgaagaagtgcgtggaggattacctggcaaggatcacccaggagggccagaggtaccaagccctgaaggcccacgcggaggagaagctgcagctggcaaacgaggagatcgcccaggtccggagcaaggcccaggcggaagcgttggccctccaggccagcctgaggaaggagcagatgcgcatccagtcgctggagaagacagtggagcagaagactaaagagaacgaggagctgaccaggatctgcgacgacctcatctccaagatggagaagatctgacctccacggagccgctgtccccgcccccctgctcccgtctgtctgtcctgtctgattctcttaggtgtcatgttcttttttctgtcttgtcttcaactttttttaaaactagattgctttgaaaacatgactcaataaaagtttcctttcaatttaaaaaaaa

SEQ ID NO: 586501 - DNA, 297 bp, Homo sapiens
taggaggccaggtggggatagcccaagttgagaacatatgaacaattattgtatgaacaattgttagaaacagctaatcacaaacaacctgcgggcacaatgacctcattccacacgtagcacccttcagcaggaccctataaaactttcctccagcccttgcctctttgcaggtagccccttctctgctgagctgcccactgcaacatattttcacaatttctctaataaatctgcccttctttacctacaactatcttggtaaatggctttaccacctgcaaaactgaccctagg

SEQ ID NO: 586502 - DNA, 161 bp, Homo sapiens
  misc_feature (53)..(53): n is a, c, g, or t
  misc_feature (107)..(107): n is a, c, g, or t
  misc_feature (119)..(119): n is a, c, g, or t
  misc_feature (134)..(134): n is a, c, g, or t
  misc_feature (154)..(154): n is a, c, g, or t
atactggcaaagtttaaatgtagataatactggaaagtttttagaatgttganaagtaattgaaaaaggtgataggtaaatttttaggcaaagataatttatttcantaaatctttcanaagcctcaccttganatgctgttagtaaatttctntgatttc

SEQ ID NO: 586503 - DNA, 433 bp, Homo sapiens
agtcggtaccagtcttacccttactgacacctaatgtctaaaacaccataaacattttcatcctccttttgtgccccctattaagaagcaaacctgtgaagctactatcgtttatcatcagtgtgaatgcactgagattagtcaagaacaactttttttttttttttttctttttggaaacgcagtctcgctcggtggcccaggctggagtgcaggggcacaatctcggctcactgcaacctctgtctcccgggttcgagcaattctctgcctcagcctcccaagtagctgggattacgggcacgcaccaccatggtgtggctaattctttaatttttagtagagacggggtttggccatgtgggccaggatggtcttgaactcctgacctcaggtaatccaaccacctcggcctcccaaagtgcggggatca

SEQ ID NO: 586504 - DNA, 420 bp, Homo sapiens
ctagctatgagggtatctctctctatagtcttgcctgtttctcagtcgtagatttctacttatgtgttacttggtacttgctgatctcggtggtgcgggcacgtacggtgatttttctgttgtcctggtccaggctcattcttaagcagaccctgtgtggcctctctttctcctgctcctccttcccatgacagttaactttgccttctatctatggcaggttttgtacaaaagaattttagaccctcccaccaacagtaggatacctctaatggttttggcccgggaatgtgtctagctcctcttccagggatagaggctttattcctttactgtttcactagccccagtaagtcttcacctgtgccttgagagcaatcaagaaggtacgctgcctctgtcccagatagcctttattct

SEQ ID NO: 586505 - DNA, 169 bp, Homo sapiens
cgccaggaggtcacggctacagatgagctgcgatcacaccattgcattccagtctgggtgaacagcaagaccccgactctgtagctaaaaagaaaaatgaaagacaggaagaaatgcaggaccgacgcacgctgcagcatggacacttttacatacgcccaggtaagca

SEQ ID NO: 586506 - DNA, 1318 bp, Homo sapiens
  misc_feature (488)..(488): n is a, c, g, or t
  misc_feature (491)..(491): n is a, c, g, or t
  misc_feature (1092)..(1092): n is a, c, g, or t
ggtcctctaattatataggtaatacggcagagatgatttaggtagcagacacgggaaaatagaaaacaatgaagcttgtaaataactaggggttcaaagcaatacataggtgtcgtttagtggatcatttaaagcattttttcttctatttatattgataccaactcaggattgtttacagtctgcagaaagtgttggaacggaatcattttatttacaggcagttctgcttttttttttttttttaatgaaggaagaaaaccccaaaccagtggtgttttggtggttgtgggttggtggtttccccctagccattgcagcgggtggccagaaaccattcagttttggcccagtgctagagcagagccttttcctcaaatgactatcttaggacaagaactccagtgtataaacactaatattaacgggggctgctctgacttacatgagggcctggggccctcttctctgtgacacttacagttganatncctgtactgaagcagatatacctgccgtggccatcttcatttgaagggttgagtttcttaagagtagccttagatcctttctttagtcctaatttatttaatgtttatatacagttttaacaattccgactgctttccaaatttaaaactggcttagaaaatgtacagtagaagggatgatgggtacggtaacctgggaggtggaggatggagagttgatatcaccagagttgggaagaaggcaggaaaaacaagtagaagaaataaaaaactataattatgaatgtttttagttcagtgttctagggcctatttgataccataaattacttttaataatgaattggaataattagacaaagattaaataacgttctgagcttcctgccaaggaaagtaggtaaatgtgtaattgattctggagaaatttttgttcaagatatcataactatcttaaataactgatgccctgaaggttttgaattttagaagttttgatgtatttttaaagcgatacacaaataattgaaagttgaaatagtaaataatactgttttccaaagtttaattaaaatactttataaagcttaaaaggatctcnagttacttaaatttgagaaaatgagtttatattgtgatatatgccattaccattgcatttcaacaagttataagaatgatataggtcgggtggggtggctcattcctgtaatcccagcactttgggagaccgaggcggcagatcacctgaggtcaggagtcgagaccagctggcacatggtgaaacccagtctctactaaaaaataccaaattagccgggcgtgtg

SEQ ID NO: 586507 - DNA, 431 bp, Homo sapiens
  misc_feature (1)..(1): n is a, c, g, or t
nttatttggacccatatcctggataatggcagtcagtgtcatatgcactgtcaaccggatcgcctaggcaacatttcggtatctattcgggtatgagccgtcggtttctttgacactttcatcaaagtcagcgttagcatatctctggtacaggcgagctgctgcataagctttgaaaggtctttcagcaaaacattatagacaggatcagttgagtatctgttggcatgactaagcatgtcgataatgctgtagctcagctagctttgtgaacatgcagtgggcagttatcagcagctcggcaccattccgttgaaagtgcttaaggccatgtagctaggaaaaggagttccgctgcataaaggtaagggtctcagctggaagcttcatattagtattagttcaaatatggcgtctctctgccgtgtatg

SEQ ID NO: 586508 - DNA, 1014 bp, Homo sapiens
  misc_feature (6)..(6): n is a, c, g, or t
  misc_feature (268)..(268): n is a, c, g, or t
  misc_feature (359)..(359): n is a, c, g, or t
  misc_feature (793)..(793): n is a, c, g, or t
  misc_feature (900)..(900): n is a, c, g, or t
  misc_feature (945)..(945): n is a, c, g, or t
  misc_feature (997)..(997): n is a, c, g, or t
ctccanataccatttataataaatttttcatcaagaagggcttcttaaaacacccactttctccattcccacctccaaaatccacttatgacaagggccccacttttgaacctaattctgggagcccccttacttctggctggccagacgctgccgtccgtcaagggctttcctcccttcataatcattaacatatatcttaatttcaatttattaataaccatttatttactttagcttcctttatctctaccgaactctttttaanaactcaaactttaccacccttataaaacgggtttggggtttggaaccacaggccatttctctaatttgccttcttttaatttttaaattanacctctacctttatgacctttacccatttccttacttcacttcccttccattcttgcttcttcacaacattttttaaacagggttccgacccccccctttatacccgttcttctcaccattttgggctttactaccttgtggtctttttttctcttcacacaaattctctctcaccaacttgccccactttcccaactcctctcctcttacacaaaaaactgtgattacctcaacttgaatatgaaactgtgattgaaaaaagtcaaaacatgaagaagcatcaaagccaaaaaggcaaaactggctgaggcctctgttgatgctcctcagcctactcgggaacgtgaaggggcagctggcgaaagggcattcctggggccacttgctctgccccactgataaggcacacccgcggtgcactgtgagctctttnaggactgaggccaggggatgcctcctggaacctgccaggcctctctgttctgtgaaggtcagtatccacttgattcctccaggcggcgctccaggtgggaggagcangggtcttctgctgtttccaaaggaatggccatgacactgcttttnaccttagaattggatccagggacccagcaaaagagcgggggttggttcccanggacaggcagtcctccc

SEQ ID NO: 586509 - DNA, 115 bp, Homo sapiens
cagtatgtagagagcttcccgccctccctgaggcagctgccggtgtgggcctgatggtggggtttggggccccagcaaatgtttccttaacgtgggaccttcagaaggctctttc

SEQ ID NO: 586510 - DNA, 132 bp, Homo sapiens
agaaataattcatcacactactacatatacaagctctccaagaatgcaaacacggtgacattgagcatgggtagtggctgcacatcaggtattccaagcaacgcactccattcttctccaccaagctcatcc

SEQ ID NO: 586511 - DNA, 239 bp, Homo sapiens
  misc_feature (121)..(121): n is a, c, g, or t
agatcgagtcgtacccctaggtggaatgctggaatgcagtggtgtatcatggctcactacagtctcagctcctcactacgaggtcaggagattgagaccatcctgggtaacacggtgaaancccgtctctactaaagatacaaaaaattagccgggcgtggttgcaggcgcctgtagtcccagctactcgggaggctgaggcaggagaatggcctgaacccaggaggcgaagtttgcaa

SEQ ID NO: 586512 - DNA, 197 bp, Homo sapiens
tagactgatacgaatcgagctcgtacctctgtgtgtagtcttttctctttttatgagacaggtccgctcactcgtgcagggctgcactgccgctggcgcgaagtcctgggcttcgagagtcctcccgcctcagcctcaaagcgcttggggctacaggggcgcgcgcgcgcctggcccattttaacttcttatttttg

SEQ ID NO: 586513 - DNA, 515 bp, Homo sapiens
cagaggtcaggtcgctgttcagtcccatggataaagcgaccattgaaaacaggattctcattctacccaatgttccgagcaaagtgaaacacgcgagctgtatcaatgtgaaatacgggaccgatatggtggcatccgcagtgacccagtcaccctgaatgtcctctatggtccagaactccccagcatttacccttcatttcacctattaacgttcaggaggaaaaactctacttgtcctgcttcgccgagtctaacccacgggccacaatattcttggagcattaatggggaagttgcaggtatcaggaccaaagctctctattccccaaataactatccaaagcatagtggggtctatgcttgctctgttcgtaactcagccactggcgaggaaagctcccaatccatcacagtcgaagtcgctgactggggattaccctgaattctactagtttctcccattccattttctcccctgggaatcacgaaaagcgagacccactctgttcccg

SEQ ID NO: 586514 - DNA, 110 bp, Homo sapiens
tagacaatagctcggactccaagatgttctcatcatggcggtaccgagtgggcctaacatttgggatgccccgggaacgggtaccacttctcatttcatttcccggtatg

SEQ ID NO: 586515 - DNA, 271 bp, Homo sapiens
tatgtctgtcaagtgattgctataaacaccccagacaccatattcatcagaagggcacgtcgtcgacgaaggcgactaattggccattcgcatccacctgatcatatctcaggacagccagcttagccttctttgctcttgtgcttattcttcttgggagtggcgtaggacttcttcttccttttcttagcaccaccacgaattctcaacacaagatgaatcagtatactccctttgaatattgtagtcagacgaagtacgtccatcttgt

SEQ ID NO: 586516 - DNA, 268 bp, Homo sapiens
tgcgcgtggattcaggcaggaggcttatagtgaggagtatccgcgaaaagcggaaaaaaaattccaggcgactgcgctggagatatcatacgggaccaacagtagcaggtggtctggccatacagggatttcttactcgcagcagagcaatgttgctgccactcaagtcaccagggcgctgaagagctcctgtggagacccacatgatctaacaacacacatactgaaaacagggaaatgcgcattttcgggagaggaagagacaaac

SEQ ID NO: 586517 - DNA, 534 bp, Homo sapiens
cgccccatctgtgatgaagagcaagatcttgtccgctagtaatgctcgaaagaggccagctaagtgtctcatatacttgaagtcacaggcgttgtagctacggtattcgttctccacgtgaatgctaatgatgttgcccgcattgtggtagagaaatggatatatctttggcagcaagaccttgaccgaggagtcctcagcttcaaggaaggcaggatctgaggttctcagatgaatattagggtttcgaagcaaccaagaggggagacctcccatctcccactcagcacagatgtaaggtcctggtctcagaataaccaacaggttcactttagctgcctcattcaggaaggcaatgaggtcccggctgccattaaagtaatagatcccaggctctggctcatggtagttccaaggcacataaaactgcacagcgttgaggccgctcaactgcatcttgagaagccggtcggcccacagaaccggcggtactcgaaagtagtgcaggctgccagaaacatagcggaagggggc

SEQ ID NO: 586518 - DNA, 937 bp, Homo sapiens
ggttttcacgccccttttggcgtggctcttccatgcctgcggttttcccgcctatccctccggggcttcctctccttctcccccttggccctctgctttgtcccttgccctgcgccttcgtctgccgtctgtctgcatggcttcctgtttcgcctattgggcaccctttgcttgttgtctttggctgtctcctgcacccctgtgctcttgtactgcctctcgaacggtccctctttctctgggggctccttgtttgccggcatatctactcgtctcctcacggtatctgcactttctgtgttcgcctcattaggcttgtgctatgttatcccccagctccgattcccctcaccctgagatcaagtttaccgtattaacaatactttagaacccttcccgaaagtcatagtctcctttgcttccatccaatgtctttgggtgcaacggctcaatttcggcccctacgtgttgctacgttctatgaggtatatatccatatgggtccaaggaggcacgtttgccaggacattatatattctcagtgcggacctcaggcccctgttctctctgagggtcctggctggtgatccggacctggacgattggcctctacagacccttggaggaccgcctggctgaacgcacgcatctgagaacctccgaccgctcatgagagtactcggcatggggcgtctggcttgcatctcaaggaccctcgagagttcactggtgctgaactcccgtctgctcctccgctcccgcagagactggggcatggatctggacatgagagcacccttggtgctcacagagggctgtgtcttactagaaatcaaccgcaaacctctccttcctcagaatagtgatgtgttcgacgttgttatcaaaggccccctttctatgttcatgttagtatagtcctggtgtcgtttttttc

SEQ ID NO: 586519 - DNA, 1087 bp, Homo sapiens
cacaaatgggatgatatatccaaatttctgaaccgaaccacgaacacaatatcggtcaaaacactacctatgcacacgcaaaccaactccatcacgaacattacggtacgaaactagccagccacaacgctggctcactgccatctaactcccgagtattttacggactgctgacggcacggcgacattaccttgcaggtcaggacgttcacagatcacgcctcggccacgcaccggtgacaatccctgtctctaccaaacacatacaaacaattcagcccgggccatgaatgcgcgggcttcctagtcaacccccaggttctccagagcaggctgcaggccaggcagcaactgcccctgaacctggagcagcatggcggcttgccagccgacgacaacaagctcgatgccaactgcacctccaggcccaggagagacactagacgatggcagaattcatgtcctcacacaacaaaccacccacaaccaccacgaacacaccccccccacacaccatggaccacacaccaagagctctacaaaccaccaacccaagacacccacacatccccacaagaggcaacaaaacagcccaccactgtagagcgagactcacgcaaaccaccccaaaaaacggaccaaagaatgcaccccaccacatgtcaaacgacacaaagcaccacagcaccccctaaggcgcagacaaagtagaaaaaggcaaatctgggcacccaaaactgaccgccgcaaaaatcaaaactccacacacaacgcacacaagacagacaaacacaacgcacagagtcaaccacaagccaaccgaccacccgcacagagcccccacaccacagcccacaccacagggcgacacccaccccagcaggagagcgaagacaaagcaaccccgccgagcaaacagacctacccacaacacgcgaccccttaccaaccgacccgaccactgagaccgaccaccacccaaccaacgacgcacaaccgagaacaccccgaccaccagaacgacacctctcacactaaactgaaaccaacctcaacacaaccacacaccaccccgaccacccaccaa

SEQ ID NO: 586520 - DNA, 607 bp, Homo sapiens
  misc_feature (145)..(145): n is a, c, g, or t
gagctgcagcggctccggcgcgaccccgaggcggcgccggcctccgccgctcggcccgggcccgcgcccccggtctcggtcccgccggctgcccctccagcaccgccgcggaaacccaaggccagcccccgcgtggcacagcggngggggccctgggtggctgggaagcatgcttgcttggtgtggccactgggtgaccccttcggtgggaggcgtgccgtggtgttgcagcccagcttgatgcggggtgttagggggcggctcccggtttgtcggctggtttggcgctgggcgccccccggggtgggcggccctttattctcaacccgggcgttctcccgtgacttggccagaagcgctgggacccaaagggggcgtacaacccgtttggaaccgccccaggtgggcttgtccaccaaaggacacgcgcatgtgtcgtgtgaccacatttctgttcaatgcccagcttggcacaataattctaacacgcccccttaagtaattcccctaggattgcgcgcgtgtacgtggggttcaccaacccttgcaacccacgggccgtgccatttagggcgcttcaaacacccacgcattaatcgcgacactt

SEQ ID NO: 586521 - DNA, 420 bp, Homo sapiens
cttgattggggtatcgattcttctgcatgcaaaggtcatgaaaatcgagatattgttgtcgatagcttgatgctgctgcaatttgatcgtccgcctggatgtcttacgagtggttcgcatttctcatacagcttcaacaattcatcgcttagagctaagaagaaaataataattaattggccactttaaaaaaggaaaaagtaaatttctcctttaattacctctaggaatgacttgatcgttatcgccgataatatgcaaagtaggcatactaattattttctgataggcaaagttatgaggactttggtgacttttaaagccagcaataaggatagcaaatttcaccgtaggttcaaaatctaaatcatgaaaaagaaagaagaaaagaatgaaaattagttaatgatccgtgtaatt

SEQ ID NO: 586522 - DNA, 368 bp, Homo sapiens
  misc_feature (279)..(279): n is a, c, g, or t
  misc_feature (334)..(334): n is a, c, g, or t
  misc_feature (343)..(343): n is a, c, g, or t
  misc_feature (363)..(363): n is a, c, g, or t
actacactttaagaggctgaggtgggaggattgcttatacctaggagtctgaaggcagcctgggcaacacaatgagactaaatataataatgatgaaaataattaaaagatcatactctcataatccagaaactcaagaaatacccaaactgatcaagaagaaacagaaaatctgaattgacttataagaagatgaatcaaaaccctcttcaacaaagaggaccaaaacaaaatagttttcactggattaaatttttacttaaacattttaaaaaaggntttaacattgggctggggcggcagtgggcttcacggcttgccaatttcccggcantttgggggngggcccagggccgggtgggntccac

SEQ ID NO: 586523 - DNA, 326 bp, Homo sapiens
tcgactctagaggatccagttccttaccagcctccctttctctgtcagtgggggacgttatcagccaagcgggaagccatttattgaactatttcgtttggaccacttttttaccaagcccctagtcttagagataccctctgagatagagagccaagctattgtggtagtgaaaattcgaggaagcaccttctcagcccctcagagattgatcaccctgaatttcattgtctcagtgaaggaagaccctgtagaagattacctcgttccggagctgggtatctcaaatctgctttcatccagccacggcccaaaggggtaccgag

SEQ ID NO: 586524 - DNA, 507 bp, Homo sapiens
tgatctagaggatccaaagtcgatcttcctgaggaaaaaaaatgaatggaaaggcaagtatgaaatgggaataaatatattcaaatcattcatttagataagaggtggaagaggagttgtaagaagagatttctcccaagagaaaaattggattgggccagagggattattgagaagatgttcaagatcacttattttacagggaatgcatatgaaggcagaatgaagtaccatcttttccacgtaggatgggcgctactgtgaaaacagagaaatataccggggttggccagggtgttaagaaattagaatacttgtgcactgtcataggggatacaaaatggtagaactggcaagggaaaacactatgaacattcctcaaaaattaaaactagaattaccataggattcagcaatcccatttctgggtatatatccataggaaatgcgatcagtatctcacataaatatttgtacccccacgttcaatgaagcattactcagtcg

SEQ ID NO: 586525 - DNA, 514 bp, Homo sapiens
tcgatagagctaggtgggaggtcatgcctattatcccagcaccttgggaggcaatgagagtggatcagttgaggccaggagctggagacggtctcacgggggcgtgtgaagaggccaccaaacaggcttggtatgagcaacatggctgtttatttcacctgagtgcaggcgggctgagtccaaaaaaggagtcagcaaagggtggtggattatcattagttcttacaggtttggggataggtggtggagtttggagcaatgttttgcgggcaggggtggatctcacaaagtacattctcaagggtggggagaattaaaaagaaccttcttaagggtgggaggattacaaagtacattgatcagttagggtggggcagtaacatatcacaatggtgcaatgtcatcagttaaggctattttcacttctgtggatcttcagtaacttcaggccatctggatgtatatgtgcaggtcactgggatatgatggcttaacttgagctcagtcgaacgga

SEQ ID NO: 586526 - DNA, 1103 bp, Homo sapiens
ggtctgggcacagcgccccaagtcccatgagtgtggacagaccaatcagcatagactgtgaggtacatgcagcgacccagaatcatggctacggtccgttacggaagcatgcgcctgaggaatattagtgaatgacacggtgtgatgcatgtaacagcgacgatgaagcataaataaataggacatgattgtggtctcctaggcttgacgaaggtggaaagtatctccagtctgacctccgttttccgggcaggagatggcaccatagtgtaaagtagggccatcatgccatggtgtactcggtaagggcatgcaggacattctcgactgctagtcgcgtaccgcgttgtgggacttggagattgttggatgttcgtgctatgatctgtaatgacctcttctgtcatacctaggaccgacctcaaagtactgctgtgtggctagagacacccatcgtgaatgggaagcacgctacaaaacgaggggcgccttgctaagtctcatgctctatgaaaccactatgtagaggaggcagccttcttggtatagaggcatcatgaagacctgctcgcctgactgagatgagagtgagtattacttgcctttcctgaggattcagggtgactgtttctcactgtgcggaccatgacctgcatggtcaattgggctgtgctggcttctggcacgtgtgatgagccagtccgcgaagtgtaaggatatccataacaatctgagatcaatccgcgtgatgataatggggcggcctcgttggtggcaattccatttgttgaaccgaagcttgctggatcaagtgcctgcaatctataccgttttggagattgactcgtgtgcgacatgactgatcgtcattgcttcaagccgataagcagatagcccagcagagagcgcctcaaagtgcagagtgcgctctgcgggtaagaatggcccgcctcacgatgcgatgaaaggggtcagcctgcccggaggtgtgggctcgactagggggttgttcctagcttaggtagcccggagtgggacctggagccattaggcgatcccacacacgagggctgagagagagccaagggcagttcaatccacag

SEQ ID NO: 586527 - DNA, 295 bp, Homo sapiens
atgcatgtggcacttaggtccaaggtctccagaggtgatgaaagcgtggagtctgtcaatgtcctactgagacagcacagactcacctggctagcaacattagtttcagtctgaacaatatatacttattgaattcagtcccagatacacaatctgaaacagcttcatgtgggtggactctaacatgtagttgcaatgtttcagaattgagacttacttctctgctatctagatctgaactccttggctacgtttacttaagttcaagcccccatgcctagggaaaggccaagtt

SEQ ID NO: 586528 - DNA, 150 bp, Homo sapiens
cattctctctgaaggtcgactggtcgatagccagggatatggtgttgctggcgtcaactactacaccaattcaggccgtgggtgacaggggaaaatggtgaattttcctttagctggggcgaaaccatctcctttggtatcgaaaccttt

SEQ ID NO: 586529 - DNA, 430 bp, Homo sapiens
cctagtcccagagtgttggcagtgtcccggacaaaaaccatgttttcctacccctttggccctcaaattcttgggtcctgtttcccccccccccccccccaggaggaagcctgggaagggccccgtgatttttggcccatgttttttgcttacccccccccatttttgtgaaagggttggcccgggccagcgtctctttaaattttgcctggccctttttgggaaatcccccctttcccccttgaaagcttttttccccccctttggaggagcctttggagtcctcctttttttggtcccggtcctttcccccctcagacttggccccccccctgattcccccccttggggaaaggcttggcccccccccggctttccaaaagtccccctttttccataaattaataaaccaccccttttttttttccca

SEQ ID NO: 586530 - DNA, 803 bp, Homo sapiens
  misc_feature (156)..(156): n is a, c, g, or t
  misc_feature (178)..(178): n is a, c, g, or t
  misc_feature (186)..(186): n is a, c, g, or t
  misc_feature (203)..(203): n is a, c, g, or t
  misc_feature (208)..(208): n is a, c, g, or t
  misc_feature (217)..(217): n is a, c, g, or t
  misc_feature (223)..(224): n is a, c, g, or t
  misc_feature (241)..(241): n is a, c, g, or t
  misc_feature (247)..(247): n is a, c, g, or t
  misc_feature (250)..(250): n is a, c, g, or t
  misc_feature (253)..(253): n is a, c, g, or t
  misc_feature (260)..(260): n is a, c, g, or t
  misc_feature (265)..(265): n is a, c, g, or t
  misc_feature (283)..(283): n is a, c, g, or t
  misc_feature (312)..(312): n is a, c, g, or t
  misc_feature (318)..(318): n is a, c, g, or t
  misc_feature (322)..(322): n is a, c, g, or t
  misc_feature (325)..(325): n is a, c, g, or t
  misc_feature (332)..(332): n is a, c, g, or t
  misc_feature (335)..(335): n is a, c, g, or t
  misc_feature (349)..(349): n is a, c, g, or t
  misc_feature (352)..(352): n is a, c, g, or t
  misc_feature (355)..(355): n is a, c, g, or t
  misc_feature (375)..(375): n is a, c, g, or t
  misc_feature (381)..(381): n is a, c, g, or t
  misc_feature (397)..(397): n is a, c, g, or t
  misc_feature (405)..(405): n is a, c, g, or t
  misc_feature (419)..(419): n is a, c, g, or t
  misc_feature (450)..(450): n is a, c, g, or t
  misc_feature (457)..(457): n is a, c, g, or t
  misc_feature (464)..(464): n is a, c, g, or t
  misc_feature (476)..(476): n is a, c, g, or t
  misc_feature (501)..(501): n is a, c, g, or t
  misc_feature (516)..(516): n is a, c, g, or t
  misc_feature (521)..(521): n is a, c, g, or t
  misc_feature (529)..(529): n is a, c, g, or t
  misc_feature (777)..(777): n is a, c, g, or t
  misc_feature (784)..(784): n is a, c, g, or t
gccatacctgcgaattttaaatttgtatagaaatgggttccccctgtgacccaggtggtctcggtgttcctgccctcatgatccacaagactgggtaatctgtaaagaaaagaggtttaattggctcatggctctgcaggctttacagaagcatgnactggcatctgcttggtttctngggagccncccgaagcttatagtcntgacngaaggtgangggggnnaggcacatcacatgacnaaagcnggnacnagactcngagcnagaagtcacttatcaccnaggggatggcccagccattcatgaggganccaccnttgngcnccaaacnccncccaccaggccccnccnccngtattggggattacatttcnacttgnggtttgggcgggaacnaatagtcnaattatattacccntctacatggttttctttttcttagtatgggngtgtccntgaatanattcatgggcancctcataactcttccatgaatggcnaggggtacttatggnaaacngttttccnaagatctgattgttttgaaatgtgttagattggacttgttccaatgttcatatttttgttctatgctaaatgcatcgttaggggagtagtggtaaatattcccgaatccatatgaaattcatgagtttatttatgtctaaaacactgaaaactgtgtcccatatcgttcagtttcctgggtctttttcttattagcacatttgagaaaaatattcctttcctttattgtagtaaatctattaaaggcnatagccnataaacatttttaatttta

SEQ ID NO: 586531 - DNA, 963 bp, Homo sapiens
  misc_feature (273)..(273): n is a, c, g, or t
aaggcacatggagcgcaagtaggtctacaagaagcgacttcccgctatcatcagaagagtctgatcgacctttcagtgatcacgcccgtctatagatcactgtgtcccttatcgtgcatgcccctacgtcctgctatgccgcgtgtttcctaaggatctcgaggagacaataactagactaagtactaaagcgatctctgacgcgttcaggaacgtagacaggaccgtactggagaactattagctgaccccggccgaatcgtatcgctcagntctctctatctgcctcatacgcacagttccgctagcggcagtcgcggtttaacggattaaccagagcgatggatcgaactgaatcgccgttaccgcgtgtagccatgtcaagagtcaaatgtggcgcgaccaaaagtgggtatctagagaggctatcgatgtacggcgcgagcgtagcggcgagagctacatgcttgcagactgcgctacagtaggctttcctacacgagtatagttccgtagcaacccagggcggaacttgcgaacgtccttggacgtttgagcacatctgagtcagtgtactccggcgatttggaagacctcccaattctggtactagatagattaacattcacgaagaacggtgcttgcacctcgatgaagcttgtgcgcccagcgatttaaggcgctagaaagaacaggattgcagattcccagcgaccgtcataagagcacaaccacttttcacgcggctaagacggaaccggggggatatacgtacgggtccaactggctcatgaaaattcttgtgagaagcaatagcgacagtttcattgcgccatcgtgcctacgacattaagtttccccttaaacaatgcttttgaacataggggccccgtaatttacgcctaatagcaacccccgtatagcgccgtactagaagaccaaaaaaacaaaagcaagaatcca

SEQ ID NO: 586532 - DNA, 191 bp, Homo sapiens
tgcgtatcaaaacaaccaaccaaccaaatggaagcaatgtgataatatagtattgacaaggaattgggttgtgtgtgtatatatatatacacatatatacgtatatatatacatatatatacacatatatacgtatatatatacgtatatatacacatatatatgtatatatacatatatatatatataaa

SEQ ID NO: 586533 - DNA, 439 bp, Homo sapiens
aaccaaaagggagaggtcagtggtcatgcagcaccccttggactgtggaaatgtgcagaaatgagggcaagtcataaagcagaagtgacttactcgcatcatcagagtctcttcggacgaacggtcgctctctaccgcacagaacgtattactcatgcccccgattacctggtaacaagttgctggatgggacgcaatgactgggactcccagccacaccgtacaacactttttctttacatcagtgaagatgtctacctcgtctagtggcccatctgaagaaagggtcacgtgacaacaggaaagacgttgttaagaagaaccaagtcccaaaatcctttactgcaagatgacactgtaacataactgccattccaaaatgttccctctgcctcaagaaaatgcttgatcggcttcctacaacctaaacaattacatt

SEQ ID NO: 586534 - DNA, 167 bp, Homo sapiens
cagccggaccgtcactcagccgggcacagagcaagagtcgtctcaaaaaaaaaaagaaattgaatactttgatatttggccaggaccctgccttccctcatctcccaactttctgcatgcccgtagctctctagtttacttcctggacacggggattaggtcatctg

SEQ ID NO: 586535 - DNA, 325 bp, Homo sapiens
  misc_feature (9)..(9): n is a, c, g, or t
  misc_feature (19)..(19): n is a, c, g, or t
  misc_feature (198)..(198): n is a, c, g, or t
  misc_feature (285)..(285): n is a, c, g, or t
  misc_feature (320)..(321): n is a, c, g, or t
tgttctagnggatcccgtnggtcgatcactgtactatgattggactgactgaagtatgggcctgtgaatatagattgaaaaataaaaaagaaatgctaaaaaaaaaaacttagctacattaatgtttaattatcaaaactcatccagatcaatccaatttttaaaggaaactggatggaaaaatgcttcccctaaacntgaactatggttagataagctttgtctggtcaggaaaattcaccaatttcagttagctgatctttatgtcggaaacaaacaataggngctttggtcctaattcataagttacagtgatcgannccaa

SEQ ID NO: 586536 - DNA, 438 bp, Homo sapiens
gccaccaggcgcacttctggctgtgcccatagtgctgtctcaccctgggcatacacctgttaccagcttggtcctgggcccccagtggtgggcggctgctctcagcttcacccgtggatgctgctatccgggtatgggatgtctcatcagagacctgtgtcccccttccctcctctcgaggaggtggggtgaccaacctgctctggtccccagcacggtcagcaaaatcctggtctatccactccttcagctgtctttcgagtctgggaggcccagatgtggacttgtgagaacgtgcgcctgggtgcgcaccccaggcgctcttctctgccatgggggatgatcaggctcgtgtctgactgctgaaacgggcacgagcctattactaccgtatcagcaagtacacttcgtttatcacctgccttttaccatgctctt

SEQ ID NO: 586537 - DNA, 955 bp, Homo sapiens
cagggttccatattgggactccacagggtgccgtggggaaatagtgtgacggcggcgttttgttcagctagacttttacatggggtagtgcccgcccaagcgggtttcaccgtgccttatatagaactagctgtgggaaccaccatgggggggcactatatagtcgcgctgtttgggcaacaccaccctgggaatatttgggtcccaacctgctgggggtgtccgccggtgcccgcgccttggggaacatttggtgaaaatgccttcgggcccccaccagactcaatacgccctgcctaaggacccgggggtgcggctcgtttgcaacccgcgccgcggtgatgttggttgccacgccccccgcggggtgtccgcggcgcccccttcccccccgcgctttgttggcgcggtctcactcgacgtgctcctggctgctttgccggaaattacggcgggcccccgacagggccccccgcggcggagcttcgctgggttgggacctcccccccttctgcgggcgagagcgaggaagccgttttcctcctcagaaaaaagatcatcatctatgttcccggagacttaatgagtttgggaaaaacgtcggccgccccattacagggccgccccccgggttgccccacgtcaacgctggagtgcgcgccttgaccaccccggtggccacccgcccttcggattactatgcttggttctctcccctcgctgcgttcctgtcggtgtcaagagccacgaatccatagggcgggtgtacaacaacccacttcgcccctgtcgtaactgtatgcgtggcccgacgcagagttgggtactggtttgggattctatgtgtggggtgcgtatgatgtatatgttttatggggagacaagatgcgttcaggaagatcaaacgaccagccaccaaaaaaaaattaaccccttttaaacaacaaacaaaaca

SEQ ID NO: 586538 - DNA, 158 bp, Homo sapiens
gtgcccacttattacatccatgttgattccttgggctgtgatgggcttatgttctctcctgagaagcccactgaggctggggaagcatagcaccgttccatgatggagtaaatggaacggggtggggaccgcagggttggaaccgctgtagaaggcac

SEQ ID NO: 586539 - DNA, 848 bp, Homo sapiens
  misc_feature (360)..(360): n is a, c, g, or t
ttccttgagacgatagcagcggtaatatggtactacgggaccgcccggtgccctgttctgtggtggcgccctgggcgacatgctcttgagaatatagtccccggcccctgtgtgaaccccgatgtccaaatatttgagacgcttcgaggaaaaatattatgtccacggtcaataatgggagacaacggggcgcctcccgcgtctttagcgtccccgttagccgcaccagagatacccgcgtgcggcgcccacttccgacttcttttaagaggaccccgcgttagtcgcagatagcgaagggcccgcagcccgcccaaagccccctggggacaaaaggcaccaagggggacaaccttctcnaactctccgcgagcacacgttcgcgcgagacaagtaacccaacggggtcaagtgtcggcaaagctcccggctgtgacgaccggaggcgacgccccccgtccgtaggggagacaaaaaaacagggaagacattattaaacaagggggaagcgaggacagctcggaacataacaaatgccgtacaactcccgggagaaacacgctggaggagaggctctccgaaaaaacccagaagcgccccttcagggcacaagttctccccggaagcggatcgccacaacaacttccccaccatagggtaaggggggaggtagaaactccccaagatagtgcgacaggtgtgacaaaccgagctgccgcccgccaacaagagcaccgacaaaggaaaagacaaccggctatagtctgcccgcccaaacggggaagtttaaaggataaaggttttttgagaaaaaatttttttacaaaaaagaggtaaaaaaacaaaac

SEQ ID NO: 586540 - DNA, 360 bp, Homo sapiens
  misc_feature (130)..(130): n is a, c, g, or t
  misc_feature (150)..(150): n is a, c, g, or t
  misc_feature (169)..(169): n is a, c, g, or t
  misc_feature (190)..(190): n is a, c, g, or t
  misc_feature (228)..(228): n is a, c, g, or t
  misc_feature (318)..(318): n is a, c, g, or t
  misc_feature (342)..(342): n is a, c, g, or t
  misc_feature (355)..(355): n is a, c, g, or t
tggagatcaaatgccttcatacatgtacagcacctagattactgactgacacctaaataatcaataattaccagttgttaatataccatcctattctttacacggatgcccgagtatccactttatagancgagaacaaaaaagaaatcncatactgtataaatgattncgtcccaaaccacaaggctcnacaaagtcagagatggacctcatgcctggtcaaggtgngtagggtgagtggaggagaggatggaactcagtttccaccaggtgagctccactaacactttacctgcaggagccagtttgggagagagngaaagtttatttggaccaagggancagtgggctatgnaaacc

SEQ ID NO: 586541 - DNA, 1060 bp, Homo sapiens
attcataagccacctgaactttgagtggggtccaaaccaacacagagggagatgctttggtaaaggacagaagccttactggcacaatatgtttacacataacctcttactttatcattacgccggtcacccaaaccctactacctgaccctaggacgtgacttctacgaaaagccaacgcttaaacacactaaaaacttgacggacacaaagtaaacaaaacagaaagaacaacctaaaccagagacatcagtggtcatacactattgcgcaagactcatagacaatagtccagcgcacagtctcgtcaaacaaacagcaaccacaataatctggcgcaggtgtcaggcagtcagcaatctcgcagtcgtccatattcatggcaccaatgtccgacatttccaacacacaagttttcgcagctcatgctacaagaaaccagcactgcaaaacaaaagcctcaggggcactcatcaacggagactaacaatgacacagacacataccaatgcaaaacataacttcctaccacactgattctgtatttaaacatacaaccagctatacacgacacactatgggagagtgcaagaaacttctacaatatacggctacactagctcacactccccagacatcgtccacacgcttaacatctactcgcacaagctgctaaactaccatcagatggcatcattctcgcgacaaatggcccttgtccattaaaggaacatgcattgcctcggaacctaacgacacggccacaccccgcacgacgcacctcacgaccacaaagcacgacagccagctggcagaccaccatgattgacacaaaggtaaaaccaccacggagcccctacaaggggcacacaacacggcaccctggctccacccaatcgaccgcactacaccggcacgtgcctggaactatccagaccaccacacacctcgcacccaacccccgccaacgcgggacacacgacacgcccgaagcacacactccaacacggacaacagaaacaacgaacacacaagcacgccgaccaccacacacacggcc

SEQ ID NO: 586542 - DNA, 82 bp, Homo sapiens
aaatccatggggagtgctgatgcttatccagtctgggcttgctcatatatctgtcatcagctgtcgaatcagcctggcaaag

SEQ ID NO: 586543 - DNA, 287 bp, Homo sapiens
gatgcgcagtgccttggcacgatgcgggtagactaccagcaggtgccgctcacggcgctgaagacctctaacaaccggctcctcaacaagaggagacccaagcaagcaggcagctcctctgcctcagaggactgcaataaccagtagctcatggggccatggcggagccctgtaaggcagagtccaggagggcccagggtcattcttttcacaaaaggcacttctgtggtgtcaacatttgtcactcggaccttcaggatggaggaccctgaccataagcctcctga

SEQ ID NO: 586544 - DNA, 80 bp, Homo sapiens
gacagcagcttctacatctgcagtgccggacagggtgatcagccccagcattttggtgatgggactcgactctccatcct

SEQ ID NO: 586545 - DNA, 501 bp, Homo sapiens
ggtctactggtgtgacaacgactgtctctttttagaaacaactgctgagagacttcgccactaccaagctaccacaacaagaactgctaaacgggctgtaaatctcggaaccactcctggacacacatcaaaacagaacctctttacagcataactctcacaggacctatagaacaaaaatacgatttcaaaagcacgaacaaaaaaccaaggtacacaggcgacaaatagcatgatgaatggaatggtacatcacatctcaatagtaacatggacagtaaatggcctaagtgctccacttactggatacagaattgcagaatggataagaactcaccaatgaattatcggctagcttcaggagactcacgtaacacataaggactcagataaagtgcaagtaaaggcgtggcacgcgtcatttcatgcaaatggataccaaaagcaagcagaggtagctattcttacatcagaccaaacaatctttaatgccaatagccg

SEQ ID NO: 586546 - DNA, 388 bp, Homo sapiens
ccccagctgtccagagtagccatgcatcatgcatgtattttgtcccattaattaattcaacagatatttattggtatacttaccatatgccagattgttctaggttctggaatatagcagtgaaaaaaaaaaacagtcctgggatcttatatacgggggggaaataaacatatatggtagaaaattagagggtaaggggtggtgagcacatatattaattatttctcatcatttctggagacaggagaggggtattcgggctgggggactcacatgaggtcacagttacatgtgggtatgggttgggtcatatgaaggctgggggggggcgggaggatccacggggagagggctcaatccctactcgggaaagggggggtaccgagct

SEQ ID NO: 586547 - DNA, 192 bp, Homo sapiens
acagatgagctcggtaccgcacttcctgcatcacccttacaccttaaaaaacagctccggcggctcaacacttcacacttgtagtcccagcactttgggaaggcgaggcagacggatcacctgagttcaggagtttgagaccagcctggccaacatagtgaaacgtcatctctactaaaaatacaaaattag

SEQ ID NO: 586548 - DNA, 190 bp, Homo sapiens
acatctaaagcaatcgactagaactgaattatcttctacatagataaaatcacaattgtaggaatatacaggaattctaggcgcatattaacggtgaacataacaacaacacaaacaggccctcattttaacagattgatagtgaccagtaagtatttaataagacacctagtaactatcatataaagga

SEQ ID NO: 586549 - DNA, 334 bp, Homo sapiens
ttatatggaacagtaagggagcagagtggttaaggacttcaggaacttaactattctaggaataaggaatgaatcaactagacctatgggccggcaggtaatttaacataaatagtaacttgcctttctcacccagttaatcagtctctgtacttgtatccctttttgaaacaagtgtacttggttaactaattctgtattatggttagtgctaaattcatagcaggtgccttatactttgcttataagtcaaaccattccatatcagaatttaccttggttatactatagatatttggctttaagttgttctttgtgttttttaatgtacaat

SEQ ID NO: 586550 - DNA, 237 bp, Homo sapiens
  misc_feature (13)..(13): n is a, c, g, or t
  misc_feature (59)..(59): n is a, c, g, or t
  misc_feature (79)..(79): n is a, c, g, or t
  misc_feature (90)..(90): n is a, c, g, or t
  misc_feature (169)..(169): n is a, c, g, or t
catcacactgaangaggcaaatgaaattctgcagcgcacaaggaagggaaagttgcccntgtaatgaagatgatgagcntgtggccatcntgcccggacagacctgaagaagaatcggactacccattagcctccaaagatgccaagcagctgctgtgtggggcagccntggcactcatgaggatgactataggctggacttgctcgcccagctggtgtggatgtagtggttttggc

SEQ ID NO: 586551 - DNA, 382 bp, Homo sapiens
ggcccgaccacctacctccccgccgctccagagggggctcgcagagctgaggacgcgcgcagcgctgctcaaggtctctctctctcagcaccctcgccggccggcgtctgacgcgggtgccagggtctccgggcacctttcagtgtccattccctcagccagccaggactccgcaacccagcagttgccgctgcggccacagcccgaggggacctgcggacaggacgccggcaggaggaggggtgcgcagcgcccgcgcagagcgtctccctcgctacgcagcgagacccgggcctcccggccccaggagcccccagctgcctcgccaggtgtgtgggactgaagttcttggagaagggagtccaactcttcaaggtgaact

SEQ ID NO: 586552 - DNA, 149 bp, Homo sapiens
gtcctctgcggatcctttgcatggctggcggagtgcatggctgtcggagtcatggctggccggagtgcatggctggcggagtgcatggctgggcggagtgcagtggctgggcttggctgggtctagagagctttgttatttttattttt

SEQ ID NO: 586553 - DNA, 176 bp, Homo sapiens
atataatggacttagcttcctgttccacagcttatgaaacctcacagtatctatgctacagctagactccaaaagatgtactttgagttagatctagacccagatccaggaccactaaacagcctgctccttttcacctgctggggcagatgtggcttgggttttagaattagttg

SEQ ID NO: 586554 - DNA, 593 bp, Homo sapiens
cccagtgacaatttgaaaaattaagaaagttatcccatttacaaaagctccaagaatataaacaccttataatgcaaatgataaaatatgaagaaagaaatcaaagaggacacaaccaaagggaaagatgtcccatgatcatgtattgggagaattaatattgttgaagtgttcatactgcccaaagtgatctacagattcaatgcaatccctctcaaaataccaatgacattctttacagaatagaagaaaaattctaaaatttgtatggacccacaaaagactctgaatagtcaaaagaattgtgagcaaaataacacagttgagggcatcacactttttgacttcaaaatatattacaaagtcataataaccagaacagcatggtactggcataaaaatggacacatagaccaatggaacagaatagagaactcagaaataaatccatacatttacagccaatttattttcaacaaagcctccagaaacatacactgtggaaaggacagcctctttaatacacgatactggggaaactgtatatccatatgcagaagaatgaaactagatccctatctctcaccatatac

SEQ ID NO: 586555 - DNA, 166 bp, Homo sapiens
accagaacttggcactctttgccagtgagttacttaattccaatcctgtgtatcaaatttctgaattaagctttctgaatatcacgggttactacaactggccttaagccaaaagtctgataacctaggctgggaaccatgtaacccaggccaagaaggtccgttg

SEQ ID NO: 586556 - DNA, 114 bp, Homo sapiens
gtcatgagcattctgtattccagttactcaggaggatgaggcagaacggatcactttagcctgggagacggaggttgcatgtgagctgagactgtgtcactggacgctagcctg

SEQ ID NO: 586557 - DNA, 524 bp, Homo sapiens
gcagatgtcctcagtgggggtgtatcgctctccagaacggacaaatcgcgaggtctgtagtagaacgctgtcagattatgaattcgcattgaatctacataagtcaaagtcgaacgaagcgaagtcagaacacaggatggcgattgtgaacatatgcctggttgaaggatacaaggggggattgtcaagagtcaagcgtaggatgcaagcttggagaggcgatggtaaaacatgggtgagatgggtcacaattgcttcaaagagaataaaatacctaggaatccaacttacaagggacgtgaaggacctcttcaaggagaactacaaaccactgctcaaggaaataaaagaggattcaaacaaatggaagaacattccatgctcctgggtgggaagaatcaatatcgtgaaaatggccatactgcccaaggtaatttatacattcaatgccatccccatcaagctaccaatgactttcttcacagaattggaaaaaaaactactttaaagttcatatggaacca

SEQ ID NO: 586558 - DNA, 833 bp, Homo sapiens
gggcttctttgctagagaatgatgagactaaggccctcagtccagcttccttgcagaaggaattaagagcaatgtagttgaaattgtaattcctgatttgtggctggaaggagcattgagtctcagctacttaagacaactctcgcgctgtccaacgatgtttatcaggttcaaacacacaggtactcctccatgaatgtatgagtcggtctgagttcttacacggagtccgacaagcaaagagtaactggaggagagagggcgtatggcgaggagacttgagactacgccgtctctgacatcttgaccggcctgacactagccgcttctggtcgactatcaacagagcagagcgtcgccgctgcagagaggcaattacggatatgcccagcgagtccagacgatgcacgtagtgtactccatgcacatgtttgcagctggcattatagtgtagctgagggcagaaagaagatccagatacgctatgttactgctggaagcattctagtgaagaaggcaggacatatgagagttaccgatacctcgactccctgggaatacagtccctaggtacaagagagagctagcagctgggaagacggcaaacaagctgatggatgccataaaggactccgagctcctgaacaggaaacacagcctgtcagagcacatcgatatcagcgatcgcacagaaaacggccatctggcaggctgcactggccgaaggaccatgggcactgcaacaggcccagatgaagctgagcacgaacagactggaggcgggaatgcggacagtaaacagaacaaaacagaaccctaagcagacaaccctg

SEQ ID NO: 586559 - DNA, 1090 bp, Homo sapiens
agcgggaggccgaagctagtgctcaggctgtcaacatcgaataggccgcgaaggtcccttcgccctattcttcactagtccgaatacccggataactcattataactaacacgaccgggtcagcatctataaatcattcgcataggaaacgaccattactagaatgacagctcgtcaccacggtacatgtactgagcagcaggactatatttgtaggtcagcctggtgagcacctacgttcataaccatcccgggtatctatatttgaaattcggagatagggcaataaccccgcgaaaattcggactgaccgtaaccagccgtctgtaatgacctcacgtatgcaaaaataacatttaccgtagacatgtcagcctagatcaatataccttaggatgagatactgtgcgtcgaataccacacttaacaggtactgcacagctactttcccttccttgaaaagactaaatgaagaaacaaaagaaaaagacgacaccagaatgaatatccaatgatttggcgaaacgcgagatggaaattttcccctggaccaacaggatatgggaggccacagtgtacaccatctataagggggagagcggtgccactgtgcgtgggacattggctataagtgtgacctctcatgtaacaattgcgagaaggggttttaaggccttttgcaaatgggttcttaggcgagtggcaaaaagaaacgttggtgtggcacacaaaagttgattggtattcccacagtggggtggggaaaaaaaacttgcgctttgaaagcggaggactataccgacagaaggaaaccatatacaatatatttacaagaagaaaaaattatgaacttttttacctgtggcaaaggaaaggaaggggacacggcccccaaagggtatacggcaaagatcgaacgaaacccaacgtggggtggttggacgacgcacgggaaacgttggacagaattggttttggttgggcctttggaaccaacttggttaaacacacttggttaaaaggcgagattgtggtgttcccaaaaattatcttaagttttggcaacttggcttcttggtttttaattaaa

SEQ ID NO: 586560 - DNA, 611 bp, Homo sapiens
agggagtgccagaacgccgaggaatccacagtgctctgtatctccacgtctccgcgcctccacccatctcaggaacccgcgaaccctctcttgagcactatgagcctcccgtccagccgctcggccgtgtccgggtccttcgggcgtccttgtgctgcgctgctcgggctgctgctcctgctgacgccgccggggcccctcgccagcggtgatgagctcctggacactaggggtgcactcccaggccgtctgcggggccgctgcgttccagtggagactctcccagtcaacctgccctagtaaaaatgtctttcttccccagctggtcctgtctctgctggtgctgacaagagcttggcgtttgccaccttttgctttatttaacccgggcgttttaccggccttgatggagggtaaaacccccaaaaaccgagttggtaacactgcatgtgtgttcccctgcaggcccagcagtgctccaaggtggaagtggtagcctcgcctgaaaggaaaaccgggggggaaaaggccaaaacgggtttatgctcttgggaccctggaaagccccttttctaacagaaagtcactccagaaaattttggacacggtaa

SEQ ID NO: 586561 - DNA, 169 bp, Homo sapiens
cgtcacacgcttctcttctaggagttcagatgtctatcccttggacccactctggagcccctcaagccctgcggcgtgctcccgctcgacctcgactgcacttagtgctacgtgccatccagtgtctgtgcaccctatgctactgtcgggacaatggtgggtgtgcagt

SEQ ID NO: 586562 - DNA, 901 bp, Homo sapiens
  misc_feature (828)..(828): n is a, c, g, or t
ggcagtggctcacacctgtaaccccagcacttgggaggccaaggcgggcggatcacttgagctcaggagttcaagaccagcctgccaacatggtgaaaccctgtctctactaaaaatacaaaaattagctgggcatggtagtagtcccagctgtagtcccagctattcaggaggctgaggcacaagaatcccttgaacctaggactggaggttgcagtgagctgagatcatgccactgcatttccagcctaggtgacagagctagattctgtttaaaaaatactgctttaatagtatgtatcggccaagaaaaaatgcaaaatattagggaaacagatctaacaaaaatataagacgcagttgatgtttggctcttagatttgtttatagcctaagtaaggatggcttgcttaaagggaaacgtgtgccgtttgataaggttattagaagatagccaaggtccttgtaatagtaagtggataataagagaaggtgaattcactgtatgtcatatactatagtaaataaactgtagggctctggtatgaatagatgtattaatgtattctagagatggaggagagtttgcgtgagccaagatgtgcacaaggcactcaagactgcgaaccagagtggactccatctaaaacaacaaactacagaagaaatcctggttggaaggtcgtggtattaacaacacagcacacacaacctcagtggtgctggcagcccgcaccatgtttaaaacggtacgggcggcagggcccaaggatccccacttggacacaggggcaccacagccgtacagagcgcacaggaacgttcaanacacaagggggagtgacacgagccgtgacgaaacccgcggaagcgtccccgactatgagtgaatgtcgggggc

SEQ ID NO: 586563 - DNA, 675 bp, Homo sapiens
cgaagtctagaaatagtgtatgtatataggtatattataattaacatattatacacgaggcactcatactatgacaccctgcaaatattagtacgccttaatccattattacatgtattttggaactggtagatcatcacaggaacaaacttgatatatttatagcattgtatcatagcattaacacttatggcagcaattttgaagaatgttaattaaagatacagactgcagttatttaccttctttagttgccttattatagcatataaatttccatgttgagtcttttgagattaagattatttccatattgaatatatgattatgctgcctattcacaaacatgtttgatttcttattacttcttaattcattcatatgacttgagctccaggtttcattattgtgtacccaactttgagataccaatagataaaacgtaataggatgaaagccaggggactggccttggtattcaacaagctcagtatttgtctgcagtatgtttctgacccttaatttctcagaagtacaaatattaggcaaacttcttagatttatactggattatcttgatgtctctacatatatgtttaaaaccatagtaacttagattttgtactagaaaatctctaactcttaaaagcagatatatttatagcttagtcacta

SEQ ID NO: 586564 - DNA, 865 bp, Homo sapiens
cacccttaaatttttagcggccttccctctaatccagattctccaccctgcccacttggcaccaccacccatacgctccgttctaggcacaggcttgacagacgtccccaacatctagcgtgtggagcgtgtttccattcttgagatcccattacatggcctgcccatcccttgcctccagaacacagtagggatccatctggagatgacagtcacccctgctcaagatttcctgtctgaccaatttgtttggtcttcagcttccacttacccagcttcccattcccctcgcatcaggtgtggtccccagcccaccaccgcagaacgaatgatcagcgctctgtctgcctcctgcgggcagagtacacccgcgtactacaaagacacccacttctgatgtggctctcagcgcttggacactctattgcacacacccagggtattccatagcttgatgcccctatctcgagatccagagacaatctacctgtttgtcagtatgtgtattatatggtgccacacctcacgcacactcccttggtatgtgcccactcctctcctcacctgttggtgcccgttttgagatccacagatgttcagggtcccatcccatgcgagcctgatgtagggccaacaacttgtgccattctgaggtagataaccaaccatcactaaccccccgggatgactcccagacacgctgaggaattccatagttggtaatcatccccttggtcagttgccacatgtatgatggtgcgttattctcgatagtcgtgtaagaggatcacgtttctgggaagggcggggtagtagccagataatgagaccaaccccaagcacaaatgtggaacgttatagatca

SEQ ID NO: 586565 - DNA, 595 bp, Homo sapiens
  misc_feature (309)..(309): n is a, c, g, or t
  misc_feature (336)..(336): n is a, c, g, or t
  misc_feature (343)..(343): n is a, c, g, or t
  misc_feature (351)..(351): n is a, c, g, or t
  misc_feature (353)..(353): n is a, c, g, or t
  misc_feature (360)..(360): n is a, c, g, or t
  misc_feature (367)..(367): n is a, c, g, or t
  misc_feature (369)..(369): n is a, c, g, or t
  misc_feature (371)..(371): n is a, c, g, or t
  misc_feature (373)..(373): n is a, c, g, or t
  misc_feature (384)..(384): n is a, c, g, or t
  misc_feature (386)..(387): n is a, c, g, or t
  misc_feature (392)..(392): n is a, c, g, or t
  misc_feature (396)..(396): n is a, c, g, or t
ccttacacagtacaccgcttctaatcctgtatctggtccatacaaagagtgtctgcatacaaagtaactcgaatagtattatagaagaatcccccccaagattgccccaacactgaactacagacaaacactattttatgttaaataacggagacagctttctaaaaagtatacattactcgtaataaaaagtagtttattatttctgaatagatttaataggttttctacacacatttacatacacaaacatgtaatattttaagcagtaagcatctagattctaagcagcacatcatagctattccntttcatagagccttcagagattcaatngctaaancaaatttncnttagttnggcatcnangncnctgatcacttnannaggcntttnaagaaattatttaaaagatgcaaatgcctctgagtgaagtgtactatcccatcactgaagcccacaggaacaagtcctacaattttaaaaaggctcgatggaaaaatttctcaatcctgaaatcccctagggaaggggtcaggagaaagtctggtgtttgaccacagctctcaaaaataagcactatccctacacagcg

SEQ ID NO: 586566 - DNA, 642 bp, Homo sapiens
  misc_feature (309)..(309): n is a, c, g, or t
  misc_feature (336)..(336): n is a, c, g, or t
  misc_feature (343)..(343): n is a, c, g, or t
  misc_feature (351)..(351): n is a, c, g, or t
  misc_feature (353)..(353): n is a, c, g, or t
  misc_feature (360)..(360): n is a, c, g, or t
  misc_feature (367)..(367): n is a, c, g, or t
  misc_feature (369)..(369): n is a, c, g, or t
  misc_feature (371)..(371): n is a, c, g, or t
  misc_feature (373)..(373): n is a, c, g, or t
  misc_feature (384)..(384): n is a, c, g, or t
  misc_feature (386)..(387): n is a, c, g, or t
  misc_feature (392)..(392): n is a, c, g, or t
  misc_feature (396)..(396): n is a, c, g, or t
ccttacacagtacaccgcttctaatcctgtatctggtccatacaaagagtgtctgcatacaaagtaactcgaatagtattatagaagaatcccccccaagattgccccaacactgaactacagacaaacactattttatgttaaataacggagacagctttctaaaaagtatacattactcgtaataaaaagtagtttattatttctgaatagatttaataggttttctacacacatttacatacacaaacatgtaatattttaagcagtaagcatctagattctaagcagcacatcatagctattccntttcatagagccttcagagattcaatngctaaancaaatttncnttagttnggcatcnangncnctgatcacttnannaggcntttnaagaaattatttaaaagatgcaaatgcctctgagtgaagtgtactatcccatcactgaagcccacaggaacaagtcctacaattttaaaaaggctcgatggaaaaatttctcaatcctgaaatcccctagggaaggggtcaggagaagagtgccatggttgatatttaatggagcgtgcagcagctgtgtgaaaagtaagcagctgatccctgaacatgcgatgactgcatgatgcaagtgtaaaa

SEQ ID NO: 586567 - DNA, 331 bp, Homo sapiens
ccagactgtcccatcagataccaacaagaagtcaattatagaaatccgctgatgggacgaagatgcgccagtcttctcccatcagcatagagaaataaaatgattaaaaatgttaaagtgagcatgggaactagtgtttgtggaatgagaaggtctaacatacatgtaataggagtttcagaagaacagaatagagggtggagaggtgcaatattcaaagcaggacactttgacaggtcatagtataactggagaataccaaaggcaaaaataaaaaaatcacagagcctgatgggagcaaggacgtgcggggggatccctctagacgtcg

SEQ ID NO: 586568 - DNA, 122 bp, Homo sapiens
ctcggtacttctctcctcccacctctcatactggacatgctagacaactctcccatttctcagattttatatccaattcaaaccaagactctgacagtttccctccaaaaaattattcagat

SEQ ID NO: 586569 - DNA, 358 bp, Homo sapiens
gtacaccgccataccccatacacaagaccccacagcaacaccacccatcaccgttcaccactcactgtcgtcaccaccatcatcaccatcaacttcaccactcactgtcgtcaccaccatcaccaccaccttcaccactcactgtcgtcaccaccatcatcaccaacaccttcaacacatcaatgacgacaccaacatcatcaccatcaccttcaccactcaatgtcgtcaccaccatcaccatcaccttcaccactcactgtcgtcacccaccatcatcaccaccaccttcaccactcactgtacgtcaccaccatcatcaccaccaccttcaacactcactgtcgtcaacacccat

SEQ ID NO: 586570 - DNA, 137 bp, Homo sapiens
  misc_feature (118)..(118): n is a, c, g, or t
  misc_feature (137)..(137): n is a, c, g, or t
atttggcagagggaaggttcagaaatgataaagactcgaaagacaagagatatctagcatgttgaaggaaacaaaagttccccaatactcttcttacgtatttttaccaatatattanaaagcttggggcgacttan

SEQ ID NO: 586571 - DNA, 831 bp, Homo sapiens
  misc_feature (521)..(521): n is a, c, g, or t
  misc_feature (528)..(528): n is a, c, g, or t
  misc_feature (534)..(534): n is a, c, g, or t
  misc_feature (538)..(538): n is a, c, g, or t
  misc_feature (830)..(830): n is a, c, g, or t
ctggcggggcggggcctgttgcggttctgtcttttttcttcttttcctcttccctcttcccctcccttggcttcctttcctctctgctgcccgtccgcctctggggttctgccttccctttcctccgcgggtctcccgtcccctgcccccgctctcccggcccttcggcccccgggcccctttctcccgtgccccttcccctccgcgccccccgcctgcttcctgcccgcctgtgcttgcggccgggcgccggggccgggccgcggtgcccttgccgttccggccttgcctctccccccggtggtgcgctggtggctctctggtgcgctcgtgtctcccccgcctgtctccccggcctcccctctgtccctttccgtgcgctccctttgctttttcctccccccccccgcccctcctccttttctttctgcttcccctgtgcctcgtgcctgcccctccctgtcctcgctggccggtccgccccggcttcccccccgcgccctggcccttcctggctgcgntccgcgntctggnctcntgattcgcctcccggcccctcctctggcctcccccccgcctcttctcccccccctgttgcctgcctccccgttctggccccccgcggcgggcgccgtcgggcgctgttcgtttccgccgcctccccctcccttgggggtttcccccttccgtcggcgcttgggggtggccgcgggcccgccggctgggccccctgcgccgccggtggtcctgcccccctccgctgggctcttgggcgcccttcggccggcggcgcggcccccctctggctcttgctggtgtggcccgttccnc

SEQ ID NO: 586572 - DNA, 337 bp, Homo sapiens
  misc_feature (215)..(215): n is a, c, g, or t
gatttgggggttttgtttggtccctgagagggttgtgtttagtttttgtttccttttgtttatggttgggcctttcctctttgtctttccaagtagaccagaaattgtcaagggcagccgagggctaaagggttaatggcccggcttgttaaacgggtattttgggaaacttaccttggatgggaaatcgaattgtggattcaccaggccggggntggcacactcaccctcgccctttccctccggttcaggacctattgtttctcctttcaaaaatgggattggactagctctttccaaatgaaagaattctccttatttaaataaaaaaagttta

SEQ ID NO: 586573 - DNA, 167 bp, Homo sapiens
  misc_feature (60)..(60): n is a, c, g, or t
ctcaggcagcgtttgaggcagaccagcaggtcctcctggggccttcctgccttttgaacntgcggtggcgcttggtgtgtcgggtggtgtcgggggtcgggttgtgggtggtctgggtggggcgcggtgtcggtgctgggtgtgggcgtcggtgggtgcttgggtgc

SEQ ID NO: 586574 - DNA, 920 bp, Homo sapiens
atgggcatgcagcgcaagtaggtctacaagacgctattcccctatcatagaagagcttatcacgctttcatgatcacgccctcataatcagtttccttatctgcttcctagtcctgtatgcccttttcctaacactcacaaaaaagtaactaatattaacatctcagacgctcaggaaatagaaagccgtgtgaacatatcctgcgccggcatcatcctaggtcctcataccgccgctcccatcccttaggcatcctttacataacagacgaggtcgaagatccctcccttagcatcaaatcaattggccaccaagtggttactgaacctacgagtacaccgagtaccggggaactaatcttcaagtcctacatagttcccccattatttcctagaaccaggcgaactgggagctccttgacgtgggacaatcgaggtagtactcccgatgaagccccattcgtataataattaccgtcacaagacgtcttgctctcatgagctgtccccacattaggcgtaaaaacagatgcatcccgcgacgttaaacaaaacactttcatctgcgacacgaccggggtatactacggcaatgctctgaatctgtggggcaagcccacagttttaatgccaatcggtccttgaattagttcccctacaaattttggaataggggcccggtgttatcctattaggaaccgttgtatctccttgagccataggaaagaccactacggattacaacacagagtcagattcacacacacaatttggtgcgcgggccgccacagaagatgcttaacaccattgggggcgcgccccagtgatagaaatgggataagggtccaccggaactggagcactacgggtgtgtctccacaacacacacggggcgcaggtcacaaccaacagatgcgtca

SEQ ID NO: 586575 - DNA, 146 bp, Homo sapiens
ttactacagctaaaagaagcgaaataagtaacaaaatatgtgaaagacggactctctggtgccaggatcttttaagtcgcccacactagcctttttctttcagaaatgtcaaactcagccctttggtaatagagcaaatgaacaga

SEQ ID NO: 586576 - DNA, 288 bp, Homo sapiens
  misc_feature (75)..(75): n is a, c, g, or t
  misc_feature (97)..(97): n is a, c, g, or t
  misc_feature (213)..(213): n is a, c, g, or t
  misc_feature (225)..(225): n is a, c, g, or t
  misc_feature (247)..(248): n is a, c, g, or t
  misc_feature (277)..(277): n is a, c, g, or t
gcccgcagaggaaagagcaggaggaatcccatcccccgggacaacccatgcttgcaagagacgaactccgcaccnaaccttcacgtgtctcccacgncctagttaatcaatttaaaatgaggtcactagggtgggccccaatccaatatgactgataactttataaaaaggagagatttggatacagaaagagacagagtgaaaaccatgtgnagaaacataggnaaagatggcagctacaagccannggagaagcttgcagtgtgtattcatctgntctcatgctgt

SEQ ID NO: 586577 - DNA, 651 bp, Homo sapiens
caggcagtgcgaactcagacgcctgaatgtagggacaatcgtttctagtgcctcgtactaacagtcagcctcgcatctgtcttctcaacgcttattcccatcagttgtctgacagttcatgcaggacttagcccccgtgtgccaccaatcgttcttcggtacttcacatgcagctctctcttctgccactggatacatgggttcaagtccatttgtgaagctgtcgatactgtaactggaaagctagtgtggtcaaagattccggctactgatttatgttgttaacagtgctgatctttacccggacaaatgaactgaagggtaatttactggaactctcgtgtacagcttcatcaactgtaaccatataaatataactggaatattccttaaacaaagaagaaagtaggggttttgatgtaagtgtaaagtgttatgactagccaacagagttgttactattttgattgtatggttggtattaacaaagagcctagctgactttccttctgtaaagtcctccttgtaggattttttaaagtactggacatatttgcaatcacattgtgatagattcgttaatggtagagatgatgtcatttgtcaggctacaacaatgaaatgcagattgccttgtttgtaatgtaaata

SEQ ID NO: 586578 - DNA, 763 bp, Homo sapiens
  misc_feature (19)..(19): n is a, c, g, or t
  misc_feature (88)..(88): n is a, c, g, or t
  misc_feature (150)..(150): n is a, c, g, or t
  misc_feature (163)..(163): n is a, c, g, or t
  misc_feature (215)..(215): n is a, c, g, or t
  misc_feature (260)..(260): n is a, c, g, or t
  misc_feature (262)..(262): n is a, c, g, or t
  misc_feature (265)..(265): n is a, c, g, or t
  misc_feature (269)..(269): n is a, c, g, or t
  misc_feature (314)..(314): n is a, c, g, or t
  misc_feature (329)..(329): n is a, c, g, or t
  misc_feature (333)..(333): n is a, c, g, or t
  misc_feature (344)..(345): n is a, c, g, or t
  misc_feature (351)..(351): n is a, c, g, or t
  misc_feature (380)..(380): n is a, c, g, or t
  misc_feature (387)..(387): n is a, c, g, or t
  misc_feature (397)..(397): n is a, c, g, or t
  misc_feature (401)..(401): n is a, c, g, or t
  misc_feature (404)..(404): n is a, c, g, or t
  misc_feature (410)..(410): n is a, c, g, or t
  misc_feature (412)..(412): n is a, c, g, or t
  misc_feature (431)..(431): n is a, c, g, or t
  misc_feature (438)..(438): n is a, c, g, or t
  misc_feature (442)..(442): n is a, c, g, or t
  misc_feature (446)..(446): n is a, c, g, or t
  misc_feature (454)..(455): n is a, c, g, or t
  misc_feature (462)..(462): n is a, c, g, or t
  misc_feature (464)..(464): n is a, c, g, or t
  misc_feature (468)..(468): n is a, c, g, or t
  misc_feature (479)..(479): n is a, c, g, or t
  misc_feature (503)..(503): n is a, c, g, or t
  misc_feature (508)..(508): n is a, c, g, or t
  misc_feature (748)..(748): n is a, c, g, or t
gggttttatttggtttggnttgtattaataaaagcctgttcaagcgcttttggggctcctgcaccgtggcctggagcttccgcatctnctcctccagccgggacacggcatccgagctgggagtgccactggcctctggtgctgccctcntgcgcccggtgtncaggccccggttgaccctcagctcccggctctttgggggtacgtagccatcnttgagggagatgaggaggggcccagcatcccgaccccccagccantnctnagcngtgagggcagggtcgggccctgcggtgggtgggtacaggtcctcntggaacaggtccgantttnggggcactgtnntggcantgggctcacacctccgctcgtgcagcttnttgaacntggcgttttnacanttnttcacntncaggccacgtttgggcttnttgcccntgcnccgntgggattnnttggaantnaacntggagagttanttctggaaaggggcctcggaagtnatctnaaagtaccggtttgagctgttacccttgctacagaggtagacgatgttggtgttagggttaagaagggcagcaggacaccgctgctggtgtccagctcctgcagggacagcggctcctccaggtgctttgtgtcccacagcgccacctgccgctcactcatgcggctgaagcccgtggtcaggatcttcccctccgacacgaacactgcacgcacgggccgggtcccctcgtggggacgngtccttctcagctac

SEQ ID NO: 586579 - DNA, 427 bp, Homo sapiens
  misc_feature (194)..(194): n is a, c, g, or t
  misc_feature (370)..(370): n is a, c, g, or t
aaaaggccgttggaaaaatttgattaccggaagctgttcctgcaaggttggcaaacggagaaggtggtgctgcgtggccctgtgcggcttcccgacccgcacgctgaaagtcaccacccgcaaaaacgccgtgcggtaacggcaccaacacgtgggacacttacgagctgaagatctacaagcgtcttgtagantccgcgcgccgacggagcttgtgaagaagattacatccttccctattgacgctggcgtggacgtcgccatcacaatcccacacgaccagtagcctgccccgcatgtgggagaggtgggaggccgcgccgcaactgtctcatgccatctggggggaagagtttattttccccccgangtcgtcacgccaattgcaatacatttgttcttttgttttgtttaatgcttccattta

SEQ ID NO: 586580 - DNA, 421 bp, Homo sapiens
  misc_feature (242)..(242): n is a, c, g, or t
aacccatggaattatcccttcctttgggaaacaccaactcaactccttaaagtctggtcaaaaacaaacctttctaaatatcagccaacgcttccaaaataagagcacgttcttccctatatgtaaaagaactctcactttgtatcccccccccgagagagatcgcttggtaaattgtgatatcccctcacgtctcatgatcattgtacgacatacacacacacgtgttgcaacattttgtnttatacatctatgtatataataaacacattggtttagatcttccccttctcttttgtccacaacattatctacatcccttgtcccactgtatcaactagttctgagacaccacaacggagttccacaacctcacaattcatgaaaaaatacaaagaaccttaatcttccacataacaca

SEQ ID NO: 586581 - DNA, 1094 bp, Homo sapiens
  misc_feature (295)..(295): n is a, c, g, or t
ggaacgagatctatactaataagcaagtgtaaaaaaaaaaaaaaaagaggaaaaaaatcttaaggtgaatgtgagtgcgtgtttctttttaaaaaaaaaaaaaaaattcattttctctttggggtaagaagcttaaaaaaaaaggccccaaagctttcctaagtggtttctttctaaaattctaattgggctataaagttattgagttattgttccactttacccggggctttctgtgtgtacaccgtgggtgtacttctacacaatgtgggggtaacgtactgtggtgtatacncttaactgtaccctctcatggggactttgtctgtttcacagcgcgatattttggaggtgtttaacatctctctccattataataaagtggtgtctcctcaaaactcttttgcgtgctacaaaacgctctccaaaaattttttggggggcgcccatatattgttggtaaatatgcgccacggtgtgtgggaccacttaaacgcatattttgtggtgcccacacacacaaagcgctttttggtataacactacaaacccgtggggcacacacaccaacgggggcgttcccaagtcacccatcttggtccctgggaattctggggcgcacagttccaaggcacactcctgttgtccaaagaactcccttcgcgtggtggcgcactcccaatattttcttataactgacacacaagtggggggcggggaaattgccccactaatttctccaccaggaggggctccccacacgaaactttgtgtcgtcttccccagacacattattttggcgggaaggaccaccgtggcgcctctgtgcgtccaaccaatcacctctacacgcggcgggcaatcaagaccaccactaatgaggttcagtgtggcacacctccacactgcaacagcacttctacagcggctggggacacacttcaacgaaaacgcttaaatctcttggtgggaacccaaaaagaagaatgtgcctcgtttttaaaacatttcctccacccacacgtgtggtttgaagaaccccccaacttttttacaacaaataaccctgccagggggcctaaaataaaacaggc

SEQ ID NO: 586582 - DNA, 101 bp, Homo sapiens
tgaaagggacacgtggataaatcaatctcatcaggatagcataacttgactgtagctgatgaaaatgacattcactgggatctagttacgctgagggtatg

SEQ ID NO: 586583 - DNA, 1068 bp, Homo sapiens
  misc_feature (8)..(8): n is a, c, g, or t
  misc_feature (101)..(101): n is a, c, g, or t
  misc_feature (158)..(158): n is a, c, g, or t
  misc_feature (161)..(161): n is a, c, g, or t
  misc_feature (163)..(163): n is a, c, g, or t
  misc_feature (189)..(189): n is a, c, g, or t
  misc_feature (443)..(443): n is a, c, g, or t
  misc_feature (492)..(492): n is a, c, g, or t
  misc_feature (507)..(507): n is a, c, g, or t
  misc_feature (635)..(635): n is a, c, g, or t
  misc_feature (668)..(668): n is a, c, g, or t
  misc_feature (961)..(961): n is a, c, g, or t
attacccncttcctagccaataaccgagagaagcgggcctcgccttggacggaagttaagcacgaagacacgaattggcttctagcaccctgttgagggangtgccaaccgtgagatcctggggatcattgtttcctacaaagtgaaagtgaagctgntgntntctcggggcggcgacgtggccgtggnactgcccttcaccctaatgcaccccaagcccaaagagaacccccgcatcgggaagttccagagaacgagacgccagtagataccaatctcatagaacttgacacaaatgatgacgacattgtatttgaggactttgctcgccagagactgaaaggcatgaaggatgacaaggaggaagaggaggatggtaccggctctccacagctcaacaacagatagacgggccggccctgcctccacatggctccggctcnactctcgtgcactcggatgcttactctgtcttcttcctgttctggtttnttttcccctttgttnttccagtttctaccagggggccccgtgggcttccagatcacagtgatgaacctctggcctcaggattggccccacatcaccacgccaacaggaccacagcgcactggctccaccccatctctgccatntccactcccctccttttcatgctgtctcccagnaaagctgccagggctctggccttggaattggacttgagatggggagcagacaggggaggatggggaatgtgggacacggtgtggtgggcatgagggcttggaggggtggggatgagggctcaagacacgagagaagatgtccacggtcccaggtggttaacaaagttctggcagctaaaagatgaccgcgttgaaggccacctccttctggctgggaggggcagaactgtggacagattctcaatgcctttttgaagttctgacccaccaaagaccttctgccttcaccctcntccccacctgatgtccctctgtgtctgatagtgatgttggtgaaagttcgtagaccaccaggagtagagaaaagcaactggactataactactaggagcagttaacc

SEQ ID NO: 586584 - DNA, 6843 bp, Homo sapiens
gacaaatctcagcctgaccctaaagactacctccatcctcaaagtaaatggggttaagggggaagaagtcaaccagccaggtgccggggagttacggctttcaggtgcaggttttccaggcccctaggtgatgctaggtgctgcagtggaatgggtggatgagcagaggaggatgacacacacacggagtagaacacaccacacacacacacacacgcgcacgcacacacacacacacacacacacaggggagaaaggaggaatgctaaggaaatgccctgtgatcatgccctgagggagtgaggaagggcttgggcacaggagccagcctcagagacggcctgaataggatgagagggctgactctgctgagccaggaacgacacctacactccaccttcataggaatcagaaaagcacccactctcagtgttagaagcttgcaccaccccccacaccaaaaaatcccctcaaggccctgattcccttgggctctaaaacaaacaaaaaagctaatgggtttcccaggaagccatgtggtaggatggatatcacagaaaactatggttgcgagaacttcccttgggcccatgcgcagaacaggaagtcaggcagtgagtgggctcccaggaagttaatatacactatggacaggtagcaagttatggacagatagcaagatagccagttaatatactctatggatgacccagcaagtttgctgtttcagaatcctcctcttctgttttttgaactttcgaaaacaaaagatatgctgggagacgcggcccctagagtgtgcttactccaggtccttgattgtccagactgtggagggggaagggcagatctatgccaagaggggaacaggctgtagaggccacagctgattcatttttgtgaccttagcactctgcccagcacctggaatatagtaggtgctccataaacctgtgttcaaggagagaatctgtccatagcatatgtattaatgggacctttatagtcaatggacatccttagaaatcacatacccatcgttggctggtggttgagaaaaaaaggtaaaaaatgagatacacccttctacatgtttggcctccaatatggggccgggctgggcctcgagaaggagaccgcaggacctcaccagcaaggcatcgtgtcctctttgtgtcctgagatgccttctcactaagcctctttccagacctttggtcctggggatctgcagtgagcagagaggcagctccttgcgggtgaaacccagcaccggcctgcaaggccaagcctccccatgccaacacagcttatttcctctttcactacctcactccctagtggaaaaaacaagaaaacaaaattcccctgagcaatctgaaaccctgtgaccccctggccaagtggcagatccagctccaccttgatcccctccactttcctctggctcacctatacttaagcgcagaggccagcctcgaggttatttataactgtgtcagaggaggaggaggcaggaaataggaaattatgcaggagggggcgaggagtagctgcaggggccaagtgaccccgctggctggcttgaaatccactacctgcctggcccgtggcttcagagccccatgacagggaattcttacccagactggattcctcctggtctctgagccctacctgcgaatctcttgccagtcacttccccttctccagatccaggtggaagcagttttatcctgagactttccccctaggccggccacagtgacatcagcttttctgactgcagttaatggtgcaagagctggaggccaagcaggaggcccagcgccggaggggagacaaacacccagccctgggagcaaatggggtggcggcaaacacacggccttttaagtccaccagccctatccttctgtttcctttcctcctttaaatactctgaaagcgagagtctgaatagtgactacttgagaacccaagacttctccttaacttcatccagaggactcaaagggaaggccactcaaccagaatcacacagcagaaggagcagagccaggcctggggtcccattttctggaggcactggcccctttttctacactaccatgctgcccccagcccctgggctaactaagactcccccattctaaatgtgagtgcccctgatggaccgcataggctggatgtgcccgtccttgctttgcccagcagagccatgtccataaagatggcatcccacgtcaaatcctgtagactactgcaaaatatccatcagccaatttcttcaccaaaacgctctgagcagccactgaactggcagtgccattaattttcagacaatttcagactaagttaggttacctttttggggggattttgttgctgtttagtttcaacaccattattgactcagtgatactctagggcaagtgttctaatgatccaagatagcttttaggagaatttctgaagctcttgaaatttgtatgcatagctttaatcagaatcccaaaggtgctcctatcggtaaaatgattaggtaggacggtgatgtaagagaagtatagaacagagaggggagagatctggcccagacgaccaggggaccagggtggggttgcaccggtatgtcccctactgttcattacctgctcgcagggtgcctgccccatggaccttcaatcagaaacatctcaccttcacactcaccacaatgtccttcaatcatgtccttaacggtataaacaagatcctaggatttaaaaatctgatgtgtgcccagaactgagccaagcaagattataaaacaagtcatgaccacaggaaggaactttaaatctggcaaatgtgtgaccttgaaggtcagccttcccttcctcctttttcttctggtccctacaaagcacccactggcaccactacagccatttctgtttggcaaccctaggagagcagcttccctgtgtaatgcagatgatacttcctaatttcttcttccctactcagcaatcacaatggcaggcaagtgggcaaaaggggttttcagaatcctcatctgggcagtgtctcaccaactgcatttgtaggtgcttcttgggaaaattagttccttggctagatatgttcagagaacactggattaaacagagctaaacaggtcaccatgcagcaggacttctcagagcttttactatgctaatagccacatgtctctccaagaggggaatacaataaacagctctcccaaataacatttttttttttttgagatagggtcttgctctgtcaccctggctggagtgcagtggtacggtcgtggctcactgcagcctcaacctcgtggactcgggcgattctcccgcctaggcctcaggagtggctgggactgcaggcccaaccaccttttcttttttttttttttaaattagtggagacggggaatcttgctatgtggcccgggctggtcttcggttcctgggctcgggcgatcctctcgcctcggcctcccaaggtggggttgtatgcgtgagccgctgtgcccggctccaaagaacatttcttaagattggtggtgcaaggatcacaccttgagaaacactgatttaggccttcccacagtacaaagaaatgttgcctgccccatccttacagcacacctgatgacttacaagaggtgctgctgaattcctcccagggaagcaaccttaattcttctcagcaagacaaggaggcagccttcaggaaggacccaggagcttggtattagaggatgatccaagtctgatggcaaatttagagtgctccagggaacactgaagtcttgatgatagggcaaaagggagtgattccatctttctaacctggcaggatagcaggtaacaagacagaaataaggaaaaggcaagctgaacttgtctttccctgacatttgaactgcctgctgttctcctcaccaaaaataaaaaagctggtctcaagacaacaaaagtagagaagtaaaggtaacagaggtctccagcctgcaggaagactcatataacctcagtccaaagttctttttatacaaagcacagatttttactggctaagtgctcacccaatgacccattttcagtatttgtttattcctgtatttcacccatgtttatcgagcacctactgagtgtgtggcccgtagtcaggaatgcccatcaattaccaggcagcaaggctattcttagttttctgatgtctatttaaagagtgttaatcctctggcctcccccctacccccgcccctgcaattagacacataccactttccaacctggtacactgacctcgcccaactgggaaggcggaatggacaagtgttcttcccaccctgcttaacttggccaagaatctggcttcatgggttagggcagcctgggaaccagccaagccagaggagacgagcctgctttgcctgggcccttcaatcagtgctggggtcaaaaacctccctgttctgttccttactagtggcacagtaaggcagaaagtgttgagactcaagagcagaaaaatccaggctgtctagtggggcggtgaagaccacagaccacagaacagacacacctgctcaaatactagctctgccatcatgcagtggggtgaccgtgggcagaattggtgagattgctcggactctggagtcaggaggtccggctcaaatctggcttcactatgtaggtacatactaggtaagttacctagtctctctcagcttcagtattttcatctgcaaagtggaatgaggaggacaaggatgataacactaataatttctgacatgtatgtttatagtaaagaatagaatttattacatgtatatatgtatataaagatcttaaaatagctgtcaacaaatagtagctgctttcatatttaattcctcttaagtcccaatttttttcatctgcaaagtagaaataggagtgcctacctcaatgagtggttatgagagtttaaaggagataatgctttaaaaggtcttggcatataaaaacaaatcaataaatgttaaaatattatcaaatggttattatttttgttccagttccatctctatctcttaaaccaagctgctgtacctctttggacttcagtttccccatctgtcaagtgagagacctggatcagatggcttctccagtgtcaccgcacatgggttccctgcactgggacccacaaggcctagaggttacttgcagcaaagctgtcagtggcctctgagccttggtcagcccaaaagtacctcgaacagccccatatccctgtgcacagttcatgaaactagaaatggggaggggaagatgccttgcctttgcaaatgttatcttgacctgtgctgtagtattaacatggcggccactaaccacaggtagctgaaacgcaactagtccaaactgagatatgctatgagtgtaaaatacataatggatgtcaaaaacttaattttaaaaatattaagatcttattaataagtgtaaaattgattacatattgaaatggtcatattttatacatattgggtttagtattaaaattaatttcactttttcctcgtttttttaaacatgactatgggaaaattcaaaattgcatacatggctcacgtgtagccacaatcctgtttctcctgagcaatatcaatctagtttttttccctttctgtctccccgcttgtgagccacccagtaagaaactcttctcagagggataccagaaggaattcgaactatttgtaattaactttttgaaacaaaataaaatccagatgttaactatccaggtggagcattctattttagcagcctccaggaatctcctctggcttaaaggagccctgaataaataaaatctatccagctgccaaagcaccccatgatgttaccatatttatcagcacctgaagttctaaatctccactctggtcaagccatctcttgtctttctccgttagaaaaagatgggcagtggtttctgttttattttccaaggtacttgccactgtttaatacggtagcttagcagttaggaatggccttttctcattaagctcagctcccaatgtttcaaaccaatctctttctttctttctttctttctctctttctttctctttctttctttcttcctttcttcctttctttctttctttctttctttctttctttctttctgtctctctctctctctccttccttccttccctctctccctctctccctccctccctctttctttctttccttctttctttctttttttttctttctttcctttctttgttttctttctttctttctttcttttctttctttctctttctctctctctctctctctctctctctctcacacacacacacacacacacacacgagtattgcctggaaaggctggaatgctgtctttctcaaatgttcttattcattcatgatacttttattgaatgcctactaacatcaggcaatgagctggtgagcaagacttggctcccatctaaggggaggcagtaataccatgtagtaataatatgatggctgacatttatcaggtccttactacatgccaggcaatgagccaggccttttatttccattgtgtctgtgaattcttccacaacctatgaggttaagagtactattattgcatactccattttacagataggaaaaatgagaccagggaattaacttgtccagggacaggcaactagccatgaacgaggccaaggtttgagccaagtggtctaactccagaacctgtgctccagctcagaaagtgtgggaaatgcaggacacattttgcc

SEQ ID NO: 586585 - DNA, 550 bp, Homo sapiens
  misc_feature (325)..(325): n is a, c, g, or t
  misc_feature (387)..(387): n is a, c, g, or t
  misc_feature (414)..(414): n is a, c, g, or t
  misc_feature (522)..(522): n is a, c, g, or t
tattagtccgttttcacactgtcttcatacccaagactgagaagaaaaagaggtttaattggacttacagttccacatggctgggggaggcctcagaatcatggtgggagatgaaaggcacttcttacatggcagtggcaacagaaaatgaagaagaagcaaaagtggaagcccctgataaacccatcagatctcgtgagacttaatcacaatcgcaaaaatagcacatgaaagactggcccccatgattcaattacctctgcctgggtccctcccacaacgtgggaattctggaagatacaattcaaggtgagatttgggtggngacacagccaaaccatatcattctgccctgatacctccaaatctcatgtcctcacatttcanaaccaatcatgccttcctaaccatccncaaaagtcttaattcatttcagcattaacccaaaagtctgcagttcaacatctcatctgagacgaggcaagtcccttctgcctatgaacctgtaaaatcaaaagcaangtagttacttcctagatacaatgagggt

SEQ ID NO: 586586 - DNA, 319 bp, Homo sapiens
ggatgagaatgctgaacagttcttccgagaccaagggaggcagacttcctcgcttcaaccagccagtcctgactctgtgtataacctcatgctcagctggtgaataatagataccaaggtccgtccctcattccaagaaatccaccttgtgctccttcaacaaggcggcgagtgatcctgtcagtgcctgaccatgttcctacggctcaggtcctcccagcaagacgtaccgctcacccatgcctatgccactccaagtggtcacccacactccctacccgtgagtcatatatacgtgtttttacattaaaaatcaaac

SEQ ID NO: 586587 - DNA, 185 bp, Homo sapiens
cccgtcatgctcttctccaaagatcgatctggagctgctggaaaaaaggctttccgctaggctgattggactgtctagtgagaggtgatagcactgattctgtttttggataccacccaagcagatgtgctgggtgaggcagaatctcgtcttcctttagatgaaattaactggcgccgtaggag

SEQ ID NO: 586588 - DNA, 424 bp, Homo sapiens
  misc_feature (337)..(337): n is a, c, g, or t
  misc_feature (376)..(376): n is a, c, g, or t
  misc_feature (393)..(393): n is a, c, g, or t
catgggtttgtatttcctatttaggtgggaattttaagagggaaaagggttagcactgataggcctttttccaatgttttattggggaattaaatagggagaagtttggattgaaatcgtaaaatcctcaccccagacattggggtgggttgtgctttggttaatacctctttccctaaagaagattaacccaaaatcccttcccggtaggtcggcccccactaagaaaaaaagcccaaagttttcagagctttcgaggaaagtggttgtccccgtccccccatgccctgtaaatatccctcccctctttccctggtcccctcccccatcccccccnctgatatcatggggagtaataggaccagagcggtatttntggcccccccctagggnctatcaggtaataaaagctttgactccctga

SEQ ID NO: 586589 - DNA, 291 bp, Homo sapiens
gcccagcccatagagcaaaagggtggcttccggcagggaaaaacgcgcgtttttcagccggttgtcttcggcccggatcgtgtagtttttcgccccacgaagatccgctttctgcaggttcgtgcgcgaaaaacgagcaccggcgaaatcggtaccgcgcagatccgcaccgccgaggtcggtttcgctgaagtcggcctctcgggctgaacaatcccgcaaaacagtcttcttcagatcgaggcccgcgaaacacgccagagtgaccacgctcttctcgaactccgcgtg

SEQ ID NO: 586590 - DNA, 195 bp, Homo sapiens
aaaaaaaaaaaggaaaggaaaaaaatgaacctggggccccaatttcaaagtaagatctctctgcgtggagctcaaaaaaggtgtagttaaaaaaaaatccctcagatgatcctgaagcacagccatttggggtgccaccaaggggaaatcattcaaagagagtggcaaatgagtgtgggggaactcagaaaggcc

SEQ ID NO: 586591 - DNA, 529 bp, Homo sapiens
  misc_feature (359)..(359): n is a, c, g, or t
agtctcccggttctggggacgcagctacggcgcctgaaaaaaaaaaaaaaaaaaaaaaaaaaaaaatttttgggcgccttgggcccggaaaaatttttaaaacatttgtttgggggcggggccccaggttagtcgacctaggggccaatagcgtggtccactaaggaaaaaccccggggcaaagaagacatagggggctgggggttctcctcccaaataataaaaaaaacgccccggggagagcacccaggagcggttctcttgagaacaaaaccctccaggagtgggaggggttgtctaggaggcgctacaaacacgggggagctctctactctcaaaccacgggggagtttccaagngagagatcgcctcgaatatatctaataatagttaccgggccccgggcctggtgggataaccgacaaagcagacacataagcgagagcagagaacagagacagagcagaaacacatacaaaagaagctagtaacaacaaaaggagagagagagaaggaaacacagacaagt

SEQ ID NO: 586592 - DNA, 315 bp, Homo sapiens
  misc_feature (14)..(14): n is a, c, g, or t
  misc_feature (30)..(30): n is a, c, g, or t
  misc_feature (58)..(58): n is a, c, g, or t
  misc_feature (132)..(132): n is a, c, g, or t
cccattcatggatncattaaaattaagggngtgccacattatccttgggagtatgtgntaagaaaacccaggaggctctttaaacagcttgagccctctgagcctaaattttaaatgcggatgaatcaccangagtttactagtttctttgttcggaaaatcagttagccatataaaaaccaaccaaaggtgtttattgactggcaaaaactctgaaggaaattctgagaccatgaagaaatcattaatcatgcattaaatgacagcagtgagcaaattaagcctctgaaacattactaagcctagaatatgtat

SEQ ID NO: 586593 - DNA, 262 bp, Homo sapiens
cgttgtcttggaaaagtcatgtgggtgggcccctccagtgctggccccattggagtctgcatgggaggcctggggtgcgccgatagtacatgtccttgtagatctcctggagcagatgggtgcagcgatggtctcgtgtttctggtctatcttgatccggctgcatcatctgtgtgcgtgctctggttgaccatgttgcctgcaggtacagccactcttcttgcagcagctttgggggaagagtgtacttggtgcatcaggg

SEQ ID NO: 586594 - DNA, 583 bp, Homo sapiens
aaacgtgacggtgccgcctgcgcgagagatgccaaagtgcttgctaaacatataacataaaaatggcttccaaaagagctctgtgtcttcctggctaaaggatgcagaggaaatggagatggtcatccctgtagatgtcatgaggcgagctgggattaaggtcaccgttgctggccttggctgtgaaaagacctcagtacaggttgtagcctgtgatgttggtcatttgtcctgatgtccaggccttgaagattggctaactaaaatgaggcgaccatatagatgtggtggttctaccaggaggtaatctggggccgacaacatgacactttactgctgaagtatccttgcattggcgttgttaacagggacgactacctgcatagggacgaccttggacaataccccgtgataaggggggcacttgaacttagttcgcggacgcactacttggtgcgcatgagattcacataaacttgagcttcttgagttggggtctgcactgcacatattacgcgtttgtagtgagacacgcttatagacgctttaccaaaacagacaactcctccttgtcttaacacga

SEQ ID NO: 586595 - DNA, 431 bp, Homo sapiens
  misc_feature (406)..(406): n is a, c, g, or t
  misc_feature (413)..(413): n is a, c, g, or t
tcaatcgtagctcactgtagccttgacctcctgggctcaggtgatcctcctacctcagtctcccaagtagctgggaccacaagcatgcatagccacacccagccaatttttgtttgtttactttttgtagcagagaggtctcgatctcctggcttcacatgatcctcccgcctcagcctcccaaagcactagtattacaggcatgagccaccgtgtgtgggcaccactgactttctgaaccccaagtgtattagccaccataacaaacaccttttgtctgatacattctgtgggatcatattccttttttatatataattttaccttttattttaggatttgagtgggtacagggtacaggtttgtttcagggggtatattcatgtggacactgagggtttgggantgcaggnggattcccttcacccggg

SEQ ID NO: 586596 - DNA, 580 bp, Homo sapiens
  misc_feature (183)..(183): n is a, c, g, or t
  misc_feature (260)..(260): n is a, c, g, or t
ctagaggatcccgtggggtctcttccggacctcaaggatccccgcttcagactctcaaattcgggaatacaggtgtgagccacggtccagtacccgggtctttaaataatatggtatgtggtgtcttctggagtgttccagggagatcacggttatagatggtatggaggacacatgaaaagngggatggaaaagcagagaggcaagggaggaagtgggtggcaaagatgcagatatgagaagctgaggactgtgagccnggacagtaacatgtcagggaagagaagaccggcatgaaagtggtttcaaaatcaggctggacggggcatggtgtctggtggcatatgaaggatgcaagaagagaggggtcatagatggactgcagaaatctgaacctgggatctgaggttgaggataccagggaacgcttggaggagtaaccgggaagaaaagccctgagtttttagtgacgctggatgtgcccgtaggttacttgagcaggaaaggtcaaagctggggatggagagatacaggctgtagagttggacgatagtgaagccgatctgacttccagcctggt

SEQ ID NO: 586597 - DNA, 346 bp, Homo sapiens
aacgccatagtcgtatctaatcggagctggagccaccagcctacgccagagccacagcaacccgggatccaagccacgtcggcgacctacaccacagctcacggcaatgccagatcgttaacccactgagcaagggcagggatcgaacctgcaacctcatggttcctagtcagattcattaaccactgcgccacagatgggaacacccatctaaaccattttagagtgtgcagttcaggggcattaagtgcacagtatggtgcaaccatcaccactgacctctccagagctgttttcatcttgcaagcactgaaactctaattcccatgaaacattaactcccctc

SEQ ID NO: 586598 - DNA, 468 bp, Homo sapiens
  misc_feature (148)..(148): n is a, c, g, or t
tgacgggtctcttcctggacggtaggagaggcacctgtgtgtgagtgatggttaaagaagaggcacgcttcctgatggaaaagcagagaggcaagggaggaagtgggtggcaaagatgcagatatgagaagctgaggactgtgagccnggacagtaacatgtcagggaagagaagaccggcatgaaagtggtttcaaaatcaggctggacggggcatggtgtctggtggcatatgaaggatgcaagaagagaggggtcatagatggactgcagaaatctgaacctgggatctgaggttgaggataccagggaacgcttggaggagtaaccgggaagaaaagccctgagtttttagtgacgctggatgtgcccgtaggttacttgagcaggaaaggtcaaagctggggatggagagatacaggctgtagagttggacgatagtgaagccgatctgacttccagcctggt

SEQ ID NO: 586599 - DNA, 563 bp, Homo sapiens
agcggagttacaacctgcagtaggcccggagaacacaacctcccgagaagcccaggtccagagccagacccgtcactgagcccccagccaggcgcccaggcatccccaccgtaccatggccgaatgacgcaggacatgcgcaatgagctggaggagatgctaggaagggctgaccagttggctgatgagtcgatggaaagcacccgtcgtatgctgcaactggttgaagagagtaaagatgctggtatcaggactatggttatgttggatgaacaaggagaacaattggaacgcattgaggaacgggatggaccaaatcaataaggacatgaaagaagcagaaaacgaatttgacggacctaggagaaattctgcgggctttgtgtgtgtccctgtagacaagcttataatcaagtgatgcttacataaaaagcctggaggccactaatcaggacggagtggtgtggcagtcgagactgctcgtgtagtggacgaacgggagcacgatgagcatcagtggcggcttcatccggagggtaccgaatgatgcccgggacaatgaa

SEQ ID NO: 586600 - DNA, 98 bp, Homo sapiens
caaaacccagaagtccaagcaggtgtgtttccttccttttattccccccccgggtggttttcttataagtaaattaattaattccttaattacctgga

SEQ ID NO: 586601 - DNA, 426 bp, Homo sapiens
  misc_feature (382)..(382): n is a, c, g, or t
ctgaattgctgggactacagtcacacgctacaatgctgagctaattttcgtggttataggagagaccgggttttgtcatgttgatcatgctgttctggacctgctgaccttaggtgatccccctgccttagtctgccaaagtgtagcgattacaggcatgagtcactgcacctagactacaggcaaatttgtacagagaataattcctatccagatgtagcctgatatatcagaaagcatgagactggatgtgagacagacttagctctacatctactatgtgagacttaacccgtgatagctatggacacatgacctgaactcactgatcagtttctgcattctgtaacgttgggatgctagcatctactctgatgagatnttgcgtatttatctgaagcatatttaagtcatgtcatatggtgt

SEQ ID NO: 586602 - DNA, 116 bp, Homo sapiens
aacggaggttccttggtgggctttcccggggggggggggactcgaggggtacccttaatatggatttttggaacgccccccctccgttttttgggttgtgggttggggaaaccccg

SEQ ID NO: 586603 - DNA, 265 bp, Homo sapiens
ccacgccgacgaggggccaagtgtttgtaccatttcagaaacccacttgttgtatatgagagttgtagttgctctagcgtggtcattttttctaattttagccatttccttttagtaggagtatactggtagcttcttttaatttgcatttctctaattaataaaaatgccaagcaaatttacatgtgcttatttgccatctatagatcttttttggtgaagtgtctaagcaaatcttctgcccattttaaattggcttatcgag

SEQ ID NO: 586604 - DNA, 431 bp, Homo sapiens
gggggggggggtaaaaaaaaaccggaaggtttttttgcccccccaatgtgggggggggggcaaaacttgtttttttttttggggggggaaaaaaaaccccttttttttttttccggttttttttaaaaggaaaaaaaaaaacccccccccccccccgggggggtttggggttttaaaatggggggaaaaccccccccccccccaaaaaaaaacaaagtttttttccccttttttgggggggggggttcgggaaaaaaaaaaagggggtaaaaaatttcctttttcccaaagggattttaaaaaaagggggggtttgggggttatttttgggaaaatgggtttcccccttttcccccgggggggggggggcccaaaaggggggcttccccccccctaaagggtgggtttaaaggggaaaaacttttttttta

SEQ ID NO: 586605 - DNA, 110 bp, Homo sapiens
gccaattactgtcccaagccctccaggcgggcacatgtgtgggtcaacatgctataatgtgtttggagcccagtcaccctttggtggctacaagatgccgaggtggagcg

SEQ ID NO: 586606 - DNA, 167 bp, Homo sapiens
  misc_feature (3)..(3): n is a, c, g, or t
cantctagatgatccccgttcatccatgttgttgcatgtgccagaattcccttcctttttaaagctataataatattcattctgtgtatgtataccacattttgcatgtgcgttcttttatcaaggaatatttgggttgcttctaccttttggctattgagaataat

SEQ ID NO: 586607 - DNA, 100 bp, Homo sapiens
gattcatgggatcaggtatcactatgtgcagtgtgcgaaaactacaatcatagagatttcacctaagtttacaatctccatcattagtaataatgcctgc

SEQ ID NO: 586608 - DNA, 195 bp, Homo sapiens
tagccattggacatctagtgaaaaaaccttgtagagatgagtaaaaatttaagcacctcattgtaggcctaaaagcagccaccaattaagaaagcgttcaagctcaacacccacgaccgtaaatatcccacacatattactgaactcctcacaccctattggaccagtctatcaccctatagaagaacgacccga

SEQ ID NO: 586609 - DNA, 135 bp, Homo sapiens
ttgacctctctgggctcagggatccacccgcctcgacttcatgtatggtcggaggatcacacgagcctccctcttgtgagggacaaacgggtacgttgattcctttaaatcatctcaggtatttattgcagaatg

SEQ ID NO: 586610 - DNA, 123 bp, Homo sapiens
gttcgggtgtgagatgtggcgggacggatatggtatggggtcgataggtcgctcggggttggaggatagggaggaggtggcggccatcacccacgactccctgaacatacacaagccgcttca

SEQ ID NO: 586611 - DNA, 162 bp, Homo sapiens
ctctctagcctgggaccgagaacaagtcgggttctctcagacattcagcagtcttattgccggggggccttttatcccataatatattacttcaaatttaaataatctctccttcaaccacgcgtcctcaagatagcgttcatttgaggggtaccgacgctc

SEQ ID NO: 586612 - DNA, 708 bp, Homo sapiens
gactcggccaggccggagacctgaggggagagggaacgcagctgaaagcgtgaactgtacctgtcatttactccatcctttatatgatgctacaggacgaaaggaatggataaaacatgggacaatcaataaagcgtatgaagccttccggcaggcatgctggatagagatctgcagtaaagaatacgcaaaagactgagaactatgagcagagaatacgtgaacacaggaacagtgtcacttcaacagactatatgcagctaatctcagtactcttgtgatccactcaagatacaatatggtgtgtcctctgttgaagacgtgaccaaagataatgcctgatcagcaagataaggattcggaatgcagaaaaactacaagtagagacagagttctctcctaaaagaactccgaagagctggcgccttgtccatgaagggtatataacgagattcggatctgcaaaattcataattgctgtacaagacgaagacattagcaattacttacaaaacgcactgacaaggtctgtgctatcaggtcggtaacaataccaaagcctgctagctcagctagatattaatgagtggcaccataattgtcccgagatgtgcgagacagaacctcttgatcaccaatcagcccgtcaccatgcacagatcacttactagcactcaggagccggtcttgctgcagttagctgtccca

SEQ ID NO: 586613 - DNA, 1193 bp, Homo sapiens
gctcgtgctgggtgagctccgtgtcgcaccggtgttcttgggactggcctgtgtccttctccctcgtgtctgccactggcccatgatgtccccattggcagactgtgcatgtggtgccatgtgcccagtggtgctgtgtgcatgtcctgacgtgtggtgcttgcgtgctgctcctgtgtggtgcatcctgctgtgctgtgcgttggcctggttgttacgccagcactgtgtgcctgcaaggtgttccaccgtttcagcactcttgacccccctatctgagtacctgtgtgtgggacgacctccctgtgtggaaccgttgattcaccaggcctgacacacaattgagcgctttgtggagtgttgccccatccctcccttggctaagtccttattgttacacctcttgcgttgtgctacgaactttgagcagactttagccacgctgtattacccgtttctgcgttgggtgtcgagagttttgccctaaccctgcgaggtccaaagtccattacatacattggtgagcgcctttaaccttttgggacgggcaaggtaagagcttgcagttcagtttaacgatatgtgttagatacaacgcagggattctattcaagtggggcgtttatacctatgtggcttccaattcctttggcttgtggagcggggaaagtccgcgttttggcagttgcctgtgctgggaggttcgattactccactattttatcgttcggtccataaacgcaatttgtggcaaatgtttgggttcgcccaattgtggccgagggccaaggaaagggcagatataatcaatcaaacgggccgtttttagaacgaacagaagattccttcttttagtgggctgcgctggtggccttggcatttttaagttgggcggttccattttacaccgttgggttaagcgagagttttattttggacatgggtggagacaatggcacacaggaccaaaagtcttgggcattaagatgtcggagcggaacatggaatgttcaaaacagaggggggttaaggggctgttaagaagcaaagagattttggggggtgttggcgcttatttcctgttggcctatagatttgggggcgcctttaataaggggatatatatgaacgtttggttaaaaagagcacgccagggggcaaggacgagcgagaaggtgagagagataaaggtg

SEQ ID NO: 586614 - DNA, 692 bp, Homo sapiens
tagcagacacatagatcaatggaacatgaatagagggcccagcaatataaagctacacacctacaaccatctaatcttggacaaagttgactaaaatacgcaatggggataacgaacttccccattcagtaagtggtactgggagtaactagctagccatatgcagaggattcgagaactgaaccacttccttacaccatatgcaacaaatcaactcaagatggattaaagacttaaatgtaaaccccaaactataaaaactctggaagataacctaggctataccattctggacataggaacggagaaaagatttcatgacaaagatcccaaaaataattgtaacgaaagcgaaaattgacgagatgggacatgattaaacagaattaccatttgactcagcaatcccattattggttatatacccagaggaatctaaatcattctgtcataaagacatatatacacaaatgttcacggcagcactatacacaatcgcaaagtcagggaatcaaactaaatgtccatcagtggtagaaaggtttcagagaacatgtggtggccgggagtggtggctcatgtctgtgatcccagcactttgggaggctgaggcgggtggttcacctgaggtccggagttgtgacccgctggccacatggggaactccggctccgtgaaattcgaaaattgcg

SEQ ID NO: 586615 - DNA, 893 bp, Homo sapiens
gctgcagatgtctgacgtaatgagaatgcgtgagccaccacgcccggacttaactttctaaattaactgacaccatctcagatattcagggttcacaaaggcttggaggggcctgcaaatatatacaattatagaattaaatagtgatggatagagtcccttattcaaaaatactgttataaattaagttaaaatattaaagtcaaagaaacttcacacccataatcgcaatgctttcagaagatggaggattattttgagctcaggactttgagagcagcttgggcaacacagcaagatgccatttctacaaaaatttttcaaaaatagctgggcatggtggtgtgtgcatgtggtcccagctactggggaggttgaggcgggaggatcacttgagcccaggagtttgaggctgcagtgagatgtgctcaaatcactgcactccagcctggctgagagaccaagaccttatctcttaaagaaagaaaataggcggctgggtccggtgactcacgcctgtaatcccagccagggcacgcgaatcacctgaggtcaggagttcgagaccagtctggcgaacatggcgaaactccgtctctactaaaaataccaatattagccaggcatggtggcgggtgcctagaattctcagcctcctcaatagctgggattacaggtgcccgcaccatgtccagctaaagtttttttgcatttttagtagagacggagttcaccatgtggccagactggtcttgaagctcctgacctcagacaatccggccgcctgtaatcccagcattctgggaagggtgaggcgggcggatatgaaggccggagatcgagacagtctgggcaaagggtgaaaccccggtctgtaaaatccaaaaaaattg

SEQ ID NO: 586616 - DNA, 367 bp, Homo sapiens
  misc_feature (347)..(347): n is a, c, g, or t
atgcaatgcctgcttccgtatcagtccacggagccctcgtgtgtgtcacctttacctttgaacctgcccctgcctccctgcctgtgtccggttttgcagcttaatgcagccatgacaaggaatggcagtggaggtgtcctgagcaggcagaaggacactcaagcgccctatgttgcatgacattcatgacgtggacttggagcttctgactaggtcagactgtcacgccaaccccaggctatacctgacatgccagactagtgaattcctaggagattccatctatgctgcaatctgaccatataccaagcctcgcgattcagacacatcgcaacgctgacaggctntagacgcagatctggtctgc

SEQ ID NO: 586617 - DNA, 506 bp, Homo sapiens
acgtttgcatcaggatgagtctgcacaggactgcgtagccaccttcctctagtgcgtggcaggtctttgtagtgttgcttctctgacattcccttcattatctcctaacaagatggtagaagattttcacgtcccggctgatggagttgttattgtcctatgcgcaacaccttctttgtggttctcattgtcatccttgtcctgttcgtcatcgatgcctgttctcgaaatacggaagtatgatgatgtgacggaaaaggtgaacctccagaacaatcccggggccatggagcacttccacatgaagcttttccgtgcccagaggaatctctacattgctggcttttccttgctgctgtccttcctgcttagacgcctggtgactctcatttcgcagcaggccacgctgctggcctccaatgaagcctttaaaaagcaggcggagagtgctagtgaggcggccaagaagtacatggaggagaatgaccagctcaagaagggagctg

SEQ ID NO: 586618 - DNA, 226 bp, Homo sapiens
ccggttctgcttcttctttaactcttatcaagtttttctggaagctctgttctgcttcttcgtttgacttccattgaattggggaactttcttcttcctcttcccgattgtacaaaaatgacttaaaggatatcaatatcactatattctctataacacacaaatatactagcataaatacgtgcaattagacagtatagtctaaatacaagtccctgtcccattt

SEQ ID NO: 586619 - DNA, 324 bp, Homo sapiens
gaatccttcatcgttcgtccccggtggtgtcagcaacgatgtgatgtcaccgagtgtcaggcataagccccttgtgatggaaatcgatgggcccttcccaattaagttttgggtagtggtcgaccgccctccgggaaggtctcccagacaccgacctcgtgaacgtttgccttactggcagccttctggagggccttggtgacgtcgtcgctagtttggccgttgacgagaagaatggaagctttcttctgggtcagcaggtcggtggtctcgtgaacgaccttggtcgacgcggccgcgaatttagtagtagtaggcggccgc

SEQ ID NO: 586620 - DNA, 214 bp, Homo sapiens
tcacgtagctgtgtgttgaatgctctcagtctaatgacgcatggggtacatcgggagggcaaggggcagcagcgcatgcatctgctcattgctgcttgttaatcatcttatacttggtgcgtagggcctctggaacatgctcttggtcctctggatgttgaggaggatgttggcggaagacccgggatggcatccgtggtaacgacgcatcgat

SEQ ID NO: 586621 - DNA, 1029 bp, Homo sapiens
tgcagcacggtgagagtagaagggtggaaacggggaggtgcccagtgaaatggagcctgtcccgtgcacattaacgggcatttcgagcatcttgtgggctctcccaagtccgcggccctcctctgagaagccacagtcaggtctttgtcctccagttgtgtctgatgtgctggcttgcgcttggagtgccgtctgtgacctgtgggatctgatgtgctgtgttgtggcactgtgcttttaccagtattatcccgtgcgtccccatctgcatgaatgccttacatagtgtgcccaggtgctgctggctggtgcgtcaacatgcctgtcattccacacgactggcattaatggtgcgggatatgggtagtgcagtgatatagcttgatggccacgtgatgttcaatgaccatggcatgggccaacatatgtggatgaaccacagccaacccacaagccagtgctctaatttgagaaagaagaaacaaacaaaagtgttttccaaaatacacagagagagaaaagaacgacattaattacacaaaaaagggagaaaaagcaatgacacaggaacataaccttgggaacacactgcggagagcatatccggaatgtgtgcgagagtaccaccacgtgggccccttcgagacaacccagtgaaccaaacaacggtgacgggtcgaccccagaaagaaaatggtgataacgagcaatggggtcgcaataggataccacaagaatgagcataaagtgccggatgttttggaaagggatttgtcatggatcaaatttaatgatcaaaggaagtgttatattgtatgcaagtggagtcagaaatattgaaagaggcacaggaatgcgtgagtgtgtatggtgtgaaaattatctattcaagaaatttgtgtaccgagtggagatataggagttgtgataaaccgaggacgagtggactatagtggaaaaaaggaaaattaatgagaatatagttggaacatataaataattgataagtaagaataaaaaagtgatata

SEQ ID NO: 586622 - DNA, 427 bp, Homo sapiens
ctgcgctgaaagaactacccagtcatacctgccacatatcaccatgattatctgggaatacctttcatacaataactcaggtaaaaaaaacctcagattgaaacagcaacctagatatactatacgctctctaatcagcattgcaatgtaatataataaataaatgttctcaaaaagtaactaaaaaatagtgtcggaccctacttttgagaaatctacgtttcccaagtattatagggaactggctaattccttgtcccggcacaccttctcattccttcctttcagagcctaaaacctcatttgataagcactcctagtctctggcctgtggatccagagctattctgtcaccaacctaagaatcccaattgcaccttctgtatctgacagtcacaggtgacagctgtgattctataatacagac

SEQ ID NO: 586623 - DNA, 492 bp, Homo sapiens
  misc_feature (399)..(399): n is a, c, g, or t
tcactgcctggtatgcgccaggtgggcagcaccttttttgctttaaagggtttttcagtgctggtcttacaagaacctttattagtcattgtatcggcttctggccttgggggtgtcaacccttgggacagtgtggacttaattctggcggagataccaagggctggctgcggacatcgataagattgttattattcttaaactaacaaaaaaccgtctaaacctctttataagccaaaacgtgcagcccgcattccgggaacatcacaaaatttaatatgggcaactactccattgagcgaaattatatgcgcctatgggatggccaaatccccattgatggcggccgctgctactaagagccttgggatttccaataaacaagtgtcccgcggagtntaagggaagtgactcaaccttctgggaagctcttacacacctacatggtagtttgtcagatctgactgaaactggctacatttgtaaacagaa

SEQ ID NO: 586624 - DNA, 451 bp, Homo sapiens
acgctcgcgggtgtggatttacagcctatcggggaagagacctcgatagtatagaaaaacttaacgttcacggtgagttacagaggaataagggtgaaaagatctttgaaaaattgggggaacgagtaaggtgtagtgaccttgcatagaagtacgtcaaagtggtctggtgtccatacagatgatgagttgctgcctttcagtggtcaagcgtgggcatacaggaacacgatgctgtgcccttcatttccagcgactgcgatattctctctaccctgaatatgtaaaagggtaatggagagattctcctcactcttacgggtaaagagctatgtcctccctgctgggtaaagttggtcaccatgattattaggctgtgtatgaagagaatgaatgtctgattgataggtttattataatctggaagtgataggaagaaatgctggtactg

SEQ ID NO: 586625 - DNA, 245 bp, Homo sapiens
atactctaggtgaattagttgtgggatcattaagttcatggagatggggagagctgacgtgatttgacaggccaaacaactaagcaataaagttgctcacttatttgtaaagtgttagcagaagaagtttgattactcataccatatcaaggatctgggcaaggaatgtatcctactgtatgtcagcaagtgattattttattgagttcctagtagatagatgcaagggaagtgtacagtaatga

SEQ ID NO: 586626 - DNA, 289 bp, Homo sapiens
tattaaggataggccaggactcgttacacagcaggaggaggggctgggccagtctgatgcaggttgtgtcccggccaaggactgggatcagctgcagaacaaggtgccagggggtccagatgacctggaaggtcaggatgcaactccccccaaacaaggtgcagcgtgcggggctgcgtaagcagctggtccaagaaggcaagttgggaacactagttcctgctggacttgacgagacgctgagcctgtctcgcccataggggcggttagccccagtcttgcctttttt

SEQ ID NO: 586627 - DNA, 255 bp, Homo sapiens
tgcagaggcgttagagggttctgtgggcaattaaagttgaactaagatttatcttggacaccagctatcaccaggctcggaggtttgtcgcctccacctataaaatcttcccactattttgctacatagacgggtgtgctcttttatgctgttctataggtagctcgtcttggtttacggggggtccttagctattgtcctctccctttgcaaagaatattttctaagttaaattccatttattgcagaaaggta

SEQ ID NO: 586628 - DNA, 979 bp, Homo sapiens
  misc_feature (424)..(424): n is a, c, g, or t
  misc_feature (462)..(462): n is a, c, g, or t
tggccctgttgggcggcgagacaggtgagcggctccactccggcgctctgcgtatgactgcagcgatcgccaaggctccgctggagtgcagtggcatggtggcatgatcttggctcactgcaactgctgcttcctggtctcaactgatatcttctgcctcagctctcctgagtagctggtggactacaggcacacactaccacgtccagctctatgatcagaagatgcgcataatgtggggctgtggcacagtggctcagtgcccagctgggattacgcctgtaataccagcactttgggaggccaaggtcctaactcctcacccttgtcacactcctggtaatgctgtaaaactttaccatggaccacagttccaaggacccccgaatgcagtcatggagttaagcctgtgaacaacccacanctcctgtcaatgctggcaatgttcagagcataacaaangaaaccagaaagctgacatacttcctaccccaaaatattttgtcctgttgggggaagaggctcatatccacctggatgagcactttcatgtgcatgagtcgctaggacaggatggtgagaccggagtccaggagcatctgactggcaggcaacatctgccgtgacagcacctgtattatctggttcatgctgctgattaaagacataccaagactgcgaagtaaagaggttaaattgacttacgtccacatggctggggagcctcggatcatggtggaggtgaaagccctcttcatagggtgaggaccgacaatgagacaagcaagcggaaccctgaaaccaaacatctgagactacttgggaagaccgtgctgatactacccctggtctccacaatggactgcgatcacacatgaaaaagaggccacataccggtcaacccaagacaaatttaggaaggcgccgtgagaacacgagaccgaggccaaagtatacattatgagtagactccgtacca

SEQ ID NO: 586629 - DNA, 452 bp, Homo sapiens
ctctagggtacatgtgctcatcaatcagagggaataggtagggatatgttgcccaggctggccttaaactcctggcctcaaggtgatccttctgtcttggcctcccgagtagctgggactagaggcgtgcaccgtcacacccagcttcgagtctcttattataaagttctggccacgctcagtggctcgcaactgtaatctcagcactttcgaaggccaaggcggtcagatcaccttaggtcaggagttcgagaccagtgtggccaacatggagaaactccgtctctactaaaaatacaagaattagctgggcatggtggcacacgcctttagtcccagctactcgggaggctgaggcaagagaattgcttgaacctgggaggcagaggttgcagtgaaccaagatcaaaccatttgcactccagcctgggcaacacagtgagaatcagtcc

SEQ ID NO: 586630 - DNA, 416 bp, Homo sapiens
gtcgacatacaggccaccaaacccagacactattgtagatgccaagaagtgcattctgataggagcctgatacggctgtctcttgagaagccctgacagagccttaaaagtgcatagggagaagctcacagccatccattggactgagtgcagggtccccaatagaggagttagagaaaggactgaaagagttgaaggggtttgcaacctcataggaagaacaacaatatcaaccaaccagacccccccaccagagctcccaaagatcaaaaggaaggaagaccaaagagtggatgcttcagtcctacttagaaaggggaacagtataatcaagggaagtagagggtggatttctaagggtgggattgggaagaaaggagagagaaggggttatgattagaataaaaggtcgacgc

SEQ ID NO: 586631 - DNA, 215 bp, Homo sapiens
cgggcttggtaggactggtgggccccgccaagagggttgatgcccggcacaggctatgtctgatccccgcggctggtattgtgagttcacgcggagcgtgcagtatttcctccagtgaaggactgcagtgtactcgaatggtacgcctctcctcctgggtacagacgcccatgtctgttccactggcctcctatcagcgcgatgcttgagcagac

SEQ ID NO: 586632 - DNA, 384 bp, Homo sapiens
gaaccactggtaactcttaactgctgactgcttttctgtggagactgctggttgcatacaccaccatccccctattgctgcacgttaggcgatcttcacctcattactgaggacatcttgggccggatagccctgttgcgcggtcatcctgtgcgtcgcaggagatgcacctgcatccatgaccgcaacccatcagagtgctctaagaacggaagcatctgggctggatggaatttaccatcaagcacagtccccttgctgttcagagtgtgcgcaggtgcataaagatgaagcaggcaccagaaatcctcagcagtgccatcgggaagactccgagctgcgaggagaaccgcgagtgtgctgcgttcctcagcaaagcccatc

SEQ ID NO: 586633 - DNA, 448 bp, Homo sapiens
ctgttccctgcaaatgtatactcaatgtctctgctgtggacaagagtacgaggaaaatataacaaaattactatcactaatgacgagggccgtatgatcaaggaagacattgaacgtatggtccatggaagctgagatgtacagcgctgaagatgagaagcagagcggacaaggtgtcatccaagcaattcacttgagtcctatgccttcaacatgaaagcaactgttgaagatgagaaacttcaaggcaagattaacgatgaggacaaacagaagattctggacaagtgtaatgaaattatcaactggcttgataagaatcagactgctgagaaggaagaatttgaacatcaacagaaagagctggagaaagtttgcaaccccatcatcaccaagctgtaccagagtgcaggaggcatgccaggaggaatgcccgggggtaggaggt

SEQ ID NO: 586634 - DNA, 127 bp, Homo sapiens
ccccgtggcgacttgctccttcatcgccttggggtcggcgatgacgaggcggtggccttcatcatgagcgagggcttgaccttgaccgcggccatcgagaagccggtgatctgctggaccgtgttcg

SEQ ID NO: 586635 - DNA, 1382 bp, Homo sapiens
tatggctcatgtgcatcaatataatgcgtagaatataccattctgcaggtgcctggggaagtactgagtatgatcgcatcacacctcatatcactccctactagtgccataaaaggcacatactactatcgacggtatcatgatagcgtaatctcataagccatcaagagccaacatcactcatatagcgcagatatcgatgcctataggccatgagctagctcattaggccagaactgaggaaagaacagacggatggggccaaacgccacgtagataggtcgtcaacacttccaagaagagatatggccatagacctacgatacatagagccgtcaaaagcctacataccaagagcataagagactaactcgatcaccaggacacatatatgattaagtagacactgaagcatgcactataccaaaaaagaacaaccataaatttggaactcaaaagagaaaccgcacaccaacagcaactaagtcacataaagaccatacaataccacgtactaacctaatatgcaggagaagaccagagaatcagagagaagaaacacgataagtcggagcgatggaatcgcaacaaaagcctaataaccagaacagaacccaccaataacaagaaccaacaccgtacaccaaagaggacagaaacgaacacaggaggaccacagaaacacacacaccacgaaccaaccactaggacaacgcaccaataacaacgagcataaaaaatacaagaagacaaaccacacaaaagcgacgaaacaaaaaaaacacaaaaaacaccaagcaaataccataagcagacacacataacaacatctaccacagaaaaagataacaaatacaaccacaccaacaaaacacgacacacagaaagtagaaacactcaacacacaagagaaaaacaaacgaataaaaacacaccaccaaatagcagaaaaaagataaaaaccagaacagaagacaaaccaaacaaagaaacgcgagagaaaacggacgagaaaaaaaaaaaccgaacaaacacaaaagaccaatagaaagagacaccaccacaacacaaaaagcaaaagacaaacagaggacaaaagaacaaaagaacaaagagcaactaaaagagaatcgaacatcgcagcaacagaaggcactaaacagacgtaaagtcaaggaaaagaaactaaaaagcagaaagccaacaacaaaacaaaaacacaaagaaccaattaggaacgacagtagaaacaaaaccacgagagcacacaaaggcaaagtaacgcgatagaaaagcacaacaaaagagaaaaaaaagaaaaaaagaactaaaagagaaacaacaaagaaaagacagaaaaagacaacaaaccaaacaacaaa

SEQ ID NO: 586636 - DNA, 167 bp, Homo sapiens
cctcagctcccaaaagagctgggattacatgtgtgatccatcacgcccgatctatttttatttttctttagagatgagctcttgctctgttgcccatcctggtctcgaactcctatgctcatatgatccttctgcctctgcctcccatagtgatgggatctttagtc

SEQ ID NO: 586637 - DNA, 362 bp, Homo sapiens
ggcttcctcgagctctgccctgtcccctccacatgtccggagttcggcccgggagcaccccaccccgcagagggcgccactcccggcttcctggagacgcaggaagccctggggcgcagcaatcccacagcgcggccgaggtaggactgggggtcccgcagcgacagcttttctatggtgggtctgcacgcacatatccggacaggcggagaaagaggccgaggcggccacctatctcctgaggcccgcaaagacagcccgatctcataaaggtctgaccagctactaagaagatcctacgcccgaagataacagaagtgatcgccgaaaacaaaccatgctatcctcaacagaaaacgtga

SEQ ID NO: 586638 - DNA, 595 bp, Homo sapiens
  misc_feature (65)..(65): n is a, c, g, or t
  misc_feature (76)..(78): n is a, c, g, or t
  misc_feature (81)..(81): n is a, c, g, or t
  misc_feature (83)..(83): n is a, c, g, or t
  misc_feature (108)..(109): n is a, c, g, or t
  misc_feature (114)..(114): n is a, c, g, or t
  misc_feature (126)..(126): n is a, c, g, or t
  misc_feature (129)..(129): n is a, c, g, or t
  misc_feature (149)..(149): n is a, c, g, or t
  misc_feature (163)..(163): n is a, c, g, or t
  misc_feature (220)..(220): n is a, c, g, or t
  misc_feature (291)..(292): n is a, c, g, or t
  misc_feature (389)..(389): n is a, c, g, or t
tgagcactttttaatcagaactaatctttactatgttccgtcctttcaagtcctgaactttgctntcaatcaatannncangntaatatgtggttatttttgagtggnnattantatattaagagnganagtcattaatttggtgcagnaaactctaattatnatataataaacgtatacaacatctatgcacccaatattatattgtattatttgatanaagacttccagaaacaatgaccaactcaaaaggcataatcctagtggtgacaattatggggaccagggatnngtgaaagaaaaaaatattcccaagtagtagaactctttttcttttcttttcttttttttttttggagatggagtttcgctcttgttgcccaggcggnagtgcaatgacgtgatctcggatcaccacaacctcggcctcccgagttcaagagattctccggcctcagccgcccgagtagctgggattacaggcacccgccaccatgccaggctaatttagtattttcagtagaggcggggtaaccccgtgtaggacaggcgggtcttaaaagccggacctcaggtgatcccgctgctcggcccc

SEQ ID NO: 586639 - DNA, 618 bp, Homo sapiens
  misc_feature (13)..(13): n is a, c, g, or t
  misc_feature (88)..(88): n is a, c, g, or t
  misc_feature (99)..(101): n is a, c, g, or t
  misc_feature (104)..(104): n is a, c, g, or t
  misc_feature (106)..(106): n is a, c, g, or t
  misc_feature (131)..(132): n is a, c, g, or t
  misc_feature (137)..(137): n is a, c, g, or t
  misc_feature (149)..(149): n is a, c, g, or t
  misc_feature (152)..(152): n is a, c, g, or t
  misc_feature (172)..(172): n is a, c, g, or t
  misc_feature (186)..(186): n is a, c, g, or t
  misc_feature (243)..(243): n is a, c, g, or t
  misc_feature (314)..(315): n is a, c, g, or t
  misc_feature (412)..(412): n is a, c, g, or t
agaggaaaaacgngcctagggaggaaagttttttaatcacaactaaactttactatgaaacgccgtgttgtgttaataaattttgctntcaatcaatannncangntaatatgtggttatttttgagtggnnattantatattaagagnganagtcattaatttggtgcagnaaactctaattatnatataataaacgtatacaacatctatgcacccaatattatattgtattatttgatanaagacttccagaaacaatgaccaactcaaaaggcataatcctagtggtgacaattatggggaccagggatnngtgaaagaaaaaaatattcccaagtagtagaactctttttcttttcttttcttttttttttttggagatggagtttcgctcttgttgcccaggcggnagtgcaatgacgtgatctcggatcaccacaacctcggcctcccgagttcaagagattctccggcctcagccgcccgagtagctgggattacaggcacccgccaccatgccaggctaatttagtattttcagtagaggcggggtaaccccgtgtaggacaggcgggtcttaaaagccggacctcaggtgatcccgctgctcggcccc

SEQ ID NO: 586640 - DNA, 633 bp, Homo sapiens
gggaagtaatggcccttgtcttgagtaacgtcaagtgttagtggtaggccagctaatggcaaatcctcaggctgagaggaaggctgggcctgtagtactggttgtgactgcgattaagactgaagctgtgactgagactaaggctgaggttgagccacaggctcaggttgatgctcagactctgattcttctaactcctcagactcctggtccaagtctatagcacatacattgtctatagcaggagacagcgatctacattctagatctggctcaatatctcattccatgtctggttccaattctctgctagcttcatgttctgaaggttctacactctcaactagatcagttgccattacctagtggtcagcaattacatgtttgacactctcaaccatctgtagcacatcgataacttcttctgtctgactatcatgctgcttctcaccataccttacctcagtttcctcatccatcataacctccatttcctgtatgtgttcttcctcgtcctgttctttctgtgcatcactatgaacaatcgctatttcctcatcctcgtcctctcgtgcttcctctatctctacatcattgtgataattacctgtctcctccaactcttcctctcgc

SEQ ID NO: 586641 - DNA, 1092 bp, Homo sapiens
ggtggttattatgtgcctaactctcggagggccggtggtctagatgtgccgacgtcgactcactcgtatccgagaacgaagagcgctactaatgttgcctcatgcactaggatcgtgcaaaggtgccaggcgctgtgaattggaagagactacattgctggacgcgcaggaagagagtcactgctgggtcgtagcagagttctgcagttccgtgcgtgcatggtagactgcatgttgacgacaccgtgggtcacaggagatctctggaccatcataaaggggtactgaggaaccgtcatgaaatagatactcgcatcaacgacgttgttcggccccagtacacctcaagaaccgggcctgtctcaacttacgcgttgcccaacctggactgtggtgcgccgtgtacgactagctgaacgagaggcagagcgccgcgaggttcctatacggggcctcctgacgcctatggtcgtatcgcatcggcggccctcggaaggtagcgacgttccaccacctttgttcgtgccctccttcgagccttttcctgtggggcatcggttgtcccctcgatgtcgcctcgctttcgttgcgtcctagccatcgatcgttcggagcgttcctggagtatacgtgccaggagaaaggtcgataggaacgtccgttggacctggcttgggatccatgcccaggggttcttgaaacctcgcttgaataggaggcatacatagtggtagtgacaacctattagatgttcgaacatgggccccggaaccggttaccccgcccaagaagaggaaacgtgctcacccgtgaactgcttgcagtgtgggccccaggaaccgtactggttacccgcttgagttgcccgtggttattaggggcctggcgccgatccgcggtgctttgcgtcccgcgggccgcgtttgcccttctatgtccccctttttttcctctagactttctcaataagagaaactccaaggcccggtatttaattttcgcaatctaggatcgggcttcccgtgtccttttggtgaccctccgaggttggcggtttgggctccccttttagggaatttcgtgcttcctcag

SEQ ID NO: 586642 - DNA, 159 bp, Homo sapiens
cgatcgtgtaggcaggacactggcagatcactgagtccaggagtcaagacagcctgggaaacatagaaaaagcccatctccacaaagaatacaaaaatgagctgggcatggtggcatgcacctgtggccccagccagtcactcctcgacacctccacgc

SEQ ID NO: 586643 - DNA, 941 bp, Homo sapiens
cagaagtctcctaagaggtggcgcgaccaccaagaagggaaagggccccccaaataaagtgtctacaagggtcccagaccacgaaaaagtggcgctgacgttgtgacagagacagccaaccgtggtatcctgtcaagagacggccccccccccaccaatggctttgagacagccctcaccagcaggatgcgtctagacaaagtgtgccgagcgggaacaactaccgccaagaagcggttcgcggtccacctctcgggcccgggcggggcgaaacccccgcgtgaaacgcaacatgggggcgggaggccacaccaccgctccgccgtcatagcccgtgctcttggcgccagcggctcatatgtctatagtgaggttccccccagtatggcgataggctggtatatggttgtaggccccccccgtgagagaagtaagggatgaccaccctgtcccgccggcctgcttgaacggcgaccggagatccctcaaccgccagcgaggagtcgatttctcttcgccctccgaggccagtcgctgccttctacaagtgccgacgttgccgcaggttttcccgcgtagttcgcgcgcgcacgccacggggtataccacgctgtcggcgcccgtgggagaacgcctccactcgtttaccgccgctttgaatcatgttctcagcaccgcagttctcccccccacgtcgtggtcatctcccgcaatgcatgctgtgatgcgagctcttgtgctgcgggacgcacagttttttgggggcgctctggcgcaggccccccccgatgggggaccccccgcctcgcccgcgaaatcccgcgtgtttgcctggcattcctgcgttcctcttagtggggtgggtgcagcccgcccgcggttttatccccgggcccccgtctgggcagttaaaaaaattcggatttccccttccacatgac

SEQ ID NO: 586644 - DNA, 322 bp, Homo sapiens
  misc_feature (298)..(299): n is a, c, g, or t
actgtcaaaaatttttttacattgtgttagtgaagactgtgttttcaggttaaatgatggtatcaatgtatatagagtaaaattatgcaaatttaaaaatgattttctggcatcttttaaatactctgaaacatatatgcaatgagaaaccttaatcatactaaagccagttatgttaagaattttccttggattttataattaagagtgcttataaatacttatgacatgagccctacggtttagtgtcttaaaagatgggacagtcatgacgggttctttttatcccgagggtccnngtaccggccaggatatccgaggc

SEQ ID NO: 586645 - DNA, 366 bp, Homo sapiens
tgatggaagcaaatataatagtacatgctatttggccacatctcaaatgggtgatagtgaacattcactgaagtgtcatacatggctcttatctgccaggtcaaatcttctttccgagaacgtctccgccaactgttgtcaagcatttctggtggttcctagatacatgaacaaaacctcactcgactggtttactgagagcagaattcaacaacacccgggtgccaggttattaaaaacactcttttacattctttacatctatggaacacaacaatgtgatcgtcgtgtctggcttggtttgaatacatcttcaccgagctaagtagctgattgaacttacctaacctgacaggaaaaaaaaaa

SEQ ID NO: 586646 - DNA, 445 bp, Homo sapiens
gatcgccttttctgttctcattgcgctagctgtcccagtggagaaggaacaagcgcctcactgcatctgatgctagaacgggctggcaaactgtgtcctgggcagtatccccaaagtcgttactagatgtgactttgacgtgtgagcgcagaggcactagagtctcaagagctgtgtgggactgaggtgccttcagttcctgaacacggaaggaaagacacagtcatcaagcctctgttggttgaacctgaaggactagagaaggaaacaacattcaactccctactttgtccatcaggtggtgaggcttctgaagaattatccctgaaactgccaccaaatgtggtagaagaatctgcccgagcttctgtctcagttttgggagacatattaggctctgccatgcaaaacacacaaaatcttctccagatgccctatggctgtg

SEQ ID NO: 586647 - DNA, 104 bp, Homo sapiens
aatggctgtctcgcggcctgttcgcatgagcctgcgggagcgcccgatgcccgataatttgccctcccttcaaacccgtgcgacaagctctgccagcgaatctg

SEQ ID NO: 586648 - DNA, 1519 bp, Homo sapiens
ccggggcacaaggtgagccgagaaaagtttggctgtgacacagggggagcgaaaatcgcgctgggggccaatgcggtggaagccaagtggcccaaggagtgccggacgaatgttaagggcggtttttaaccgtatgcttgatgggcttcaagaagacggcgacaattggacaaaagagggaaggggaggggaagtgagtgttggcgtctaggagcacagcacgtgccggtcagataggaagacccgtcatgccggggggccctctctaaagtgctgggggcttcccgcgcccacatgaacgggggaagtttccgtgatagccaagtgtctgggaaaaagaggacgggcacacctgtctgggcgcacaggcctttggccaggtgttagagaggccgctcaggacgctgatcgggcttgctacagccaacgtttgtaagctgtggggggtgcattgcaaatctggcgggggacagaagacccaagtgaccaaccggcgcggttgtgaccacggaggccctcccacggttgctcggggggaagcaccgcccatgttggctctataggcttgggggccacggtgttgaggtagcactggaattgcggatgttaaccggaggaagcagaagcgcgtaagggttgccaccggtttgggaagttatggcgttgaagttggaacaaaggatgaaggtgaagctgttgccatggttgccgccaagaagagtggtgctaaggtaggaatgccacggtcgtatgagaacaaagggcgtggtgaaaggtggaaggtgtaaaaaggaggagtggagagtttgtgggggcaagaggaaaggaactgtgcggtggaaagttgtaagcggaggtgcaagccgagagatgggtgttggcgtagaagggagggaggtgtgtgtgtggcccgcagcaagggttgtgcacgagacgccaagtcaagagaaagaggttggtgggagaggtagagaggcgggcagaaggggagaggcgcggagagggagagggagagagaggcgtcgggtagacgaaagagggagaggtagtagacggcgcagtgtgcgcgcagcgcagcgcagcagagcccaggagaacgtgcaggagtcggagtagagaggataggtttgggggtaggtgagtgagagtagcgtgtgtgttggagagggcagaagtgcaggaaggagaggcgggccaggaagatagtggaaggcaagtagaagggcgtagaagcaaggcaggaaggcgcagtcaggtaaggaggagcaaggagggaagagagaagcaaaggcatgttattgccagcgctaagggaagagaacgcaagttgtgaaacctaagggaaggcttgctacgtgaaagcgtaagaagttgagtgtggccagcatgcaaggaaaaggttaagaaagcaaagaataagaatactgggagctgcttagcagctgatagaaagttgcacttaagatggaggtcagatgaaatagaaaaagaagataaccacgtaggcatagcccttaag

SEQ ID NO: 586649 - DNA, 1147 bp, Homo sapiens
atggtggtcatggcgccccgaaccctcttcctgctgctctcgggggccctgaccctgaccgagacctgggcgggctcccactccatgaggtatttcagcgccgccgtgtcccggcccggccgcggggagccccgcttcatcgccatgggctacgtggacgacacgcagttcgtgcggttcgacagcgactcggcgtgtccgaggatggagccgcgggcgccgtgggtggagcaggaggggccggagtattgggaagaggagacacggaacaccaaggcccacgcacagactgacagaatgaacctgcagaccctgcgcggctactacaaccagagcgaggccagttctcacaccctccagtggatgattggctgcgacctggggtccgacggacgcctcctccgcgggtatgaacagtatgcctacgatggcaaggattacctcgccctgaacgaggacctgcgctcctggaccgcagcggacactgcggctcagatctccaagcgcaagtgtgaggcggccaatgtggctgaacaaaggagagcctacctggagggcacgtgcgtggagtggctccacagatacctggagaacgggaaggagatgctgcagcgcgcggacccccccaagacacacgtgacccaccaccctgtctttgactatgaggccaccctgaggtgctgggccctgggcttctaccctgcggagatcatactgacctggcagcgggatggggaggaccagacccaggacgtggagctcgtggagaccaggcctgcaggggatggaaccttccagaagtgggcagctgtggtggtgccttctggagaggagcagagatacacgtgccatgtgcagcatgaggggctgccggagcccctcatgctgagatggaagcagtcttccctgcccaccatccccatcatgggtatcgttgctggcctggttgtccttgcagctgtagtcactggagctgcggtcgctgctgtgctgtggagaaagaagagctcagattgaaaaggagggagctactctcaggctgcaatgtgaaacagctgccctgtgtgggactgagtggcaagtatttgttcatgccttccctttgtgacttcaagaaccctgacttctctttgtgcagagaccagcc

SEQ ID NO: 586650 - DNA, 871 bp, Homo sapiens
atggtggtcatggcgccccgaaccctcttcctgctgctctcgggggccctgaccctgaccgagacctgggcgggctcccactccatgaggtatttcagcgccgccgtgtcccggcccggccgcggggagccccgcttcatcgccatgggctacgtggacgacacgcagttcgtgcggttcgacagcgactcggcgtgtccgaggatggagccgcgggcgccgtgggtggagcaggaggggccggagtattgggaagaggagacacggaacaccaaggcccacgcacagactgacagaatgaacctgcagaccctgcgcggctactacaaccagagcgaggccaacccccccaagacacacgtgacccaccaccctgtctttgactatgaggccaccctgaggtgctgggccctgggcttctaccctgcggagatcatactgacctggcagcgggatggggaggaccagacccaggacgtggagctcgtggagaccaggcctgcaggggatggaaccttccagaagtgggcagctgtggtggtgccttctggagaggagcagagatacacgtgccatgtgcagcatgaggggctgccggagcccctcatgctgagatggaagcagtcttccctgcccaccatccccatcatgggtatcgttgctggcctggttgtccttgcagctgtagtcactggagctgcggtcgctgctgtgctgtggagaaagaagagctcagattgaaaaggagggagctactctcaggctgcaatgtgaaacagctgccctgtgtgggactgagtggcaagtatttgttcatgccttccctttgtgacttcaagaaccctgacttctctttgtgcagagaccagcc

SEQ ID NO: 586651 - DNA, 129 bp, Homo sapiens
agcctgtgcaggaggacaagcggcgggaaaaggcggagcggcgtgcagactagcaaggaagcaagtcagagacctcaggcccagatcaggagctaactgatgaagaggcagagaggctgagctagagat

SEQ ID NO: 586652 - DNA, 897 bp, Homo sapiens
gagacagagtcttgtggtgtcacccaggctggagtgcaatggcgcgatcttggctcactgcaacctccacttcccgggttcaagtgattctcctgcctcagcctcccgagtagctgggattacaggagtgtgccacgacgcctgcctaatttttttttttggagacagagtctggtgtcacccaggctgggagtacagtgggtgcaatctcggctcactggcaacttccaccttctgggttcaagcagttctccggcctcagcctcccaagtagctggcaggtgcctgtagtcccagctactcaggaggctgagacaggagaatggctgtgaacctggggaggcagaggtttctgagctaaaatcgaccacggactcctgtgcctgagcgagggagcaaggactccaatgtcaaaaaaaaagaaaaaacaaatttatgcagctgtttttttaataattaaatggtgacttattattatttttggaggaacagggtctgtgcttggtcgcccaggcagtggcatgatcatggttactgcaacctctggtctaggtcgaagcaatccttcccaccttcagcttcccaaggtagcaagccgaatcaccggggcaaatggccaaccaataattcgggtaagtacgtagtgcggacaaggaccgggtttcccccatagtatggcccaagggctggcctgaactccccgggtcaacgtgggtccacccgggttaggctcacgaaggcccgcaaattcaggtgtcgaccccgggccaagtcaggcagcgataacactcggcgggggtcacggctcgcactgagacacacgcttcgcacaacggcgccacctgtcaaacaagctagaccaacggctgggacagccaagggagcacgctatagtca

SEQ ID NO: 586653 - DNA, 155 bp, Homo sapiens
cgaatctagagtatgcccgtacagagttgaatgttttcacatgtgtaaccagcttagcagttcccagattttatatacgtttaatcccttcagggcatacactatattatctccattgggcttcatgcgctactgcaagaaacattgtgatcatg

SEQ ID NO: 586654 - DNA, 131 bp, Homo sapiens
  misc_feature (25)..(25): n is a, c, g, or t
  misc_feature (49)..(49): n is a, c, g, or t
  misc_feature (108)..(108): n is a, c, g, or t
ttccctgcacaagctctcttttgtngcctgctgcatccacgtaagatgngacttgctcctctttaccttccaccatgattttgaggcctccccagcctgtggaactgnaagttcaataaacctctttcttt

SEQ ID NO: 586655 - DNA, 415 bp, Homo sapiens
  misc_feature (415)..(415): n is a, c, g, or t
cctagactacctctatggcacagcctacgcagaggagagggcatcggtgagtctagcctggggatatgacggaacatggctctgaaacaccctaacagaaataacactagctcagtagaaatgtatgcacaacccgaagacctgactgagaggcctgacagtgaatacaggcgtgtactactaagctcaatggctggggaccaagataggaatgagtcagggcatggagaacgaacctacattgatgcactaaggatgtggacacatttcaacgaagcagacaggagtaagaggaaggaatcagcactacaggaggcattggtcacgctaacagaacgcatgatggtctgagcgtatcagtggtacacttgagcatggtacgatatttagtgctcacagacgaggtatatggagn

SEQ ID NO: 586656 - DNA, 574 bp, Homo sapiens
cagagctcccgccactcgaagctggagaaggcggacatcctggagatgaccgtgagacacctgcggagcctgcgtcgcgtgcaggtgacggccgcgctcagcgccgaccccgccgttctgggcaagtaccgcgccggcttccacgagtgtctggcggaggtgaaccgcttcctggccggctgcgagggcgtcccggccgacgtgcgctcccgcctgttgggccacctggcagcctgcctgcgccagttgggaccctcccgccgcccggcctcgctgtccccggctgccccctcacatgccccagcgcggaaggtctacgggggccgcccattgctgccatcgctcgcagggccctttccatagtgctcggtgccacatgttcatgcagagtgtctccacaccgggcctctcgccaaccgcccccaggggggggcggaaggtgcccggagtggcgccctggagtcagtggctgctttgatgttgtggccttaagaatgcattggagggggtgcccagttaaaggtccgtggcctttgcctagaatgtagcgtagaaatggtatttattattccaa

SEQ ID NO: 586657 - DNA, 286 bp, Homo sapiens
  misc_feature (96)..(96): n is a, c, g, or t
  misc_feature (214)..(214): n is a, c, g, or t
  misc_feature (225)..(225): n is a, c, g, or t
agcctgaggaggagacaggacagagcgtctggaactgcaggaggacaccgagttccccgtgttggcctccaggtcctgtgcttgcggagcgtccgngcatcgggatcgagccccgacaatgggcaactcgcaggagcgccgtcagagactatcgaccgcgagcgataaccctcggtcgagacgctgcaggcgacatcgggactgctgttggacncactgctggcngtgccgtgctcaccgggccagagtacgaggcattggatgcactgcctgatgccgagcgcag

SEQ ID NO: 586658 - DNA, 358 bp, Homo sapiens
gatcatgtcaggatctgtgatagccagcacagcctgttgcccttcataaaagccccacacttttccacactttttatgcacattccatgtcaaccatccaaaagccctaatggtaggccaaaatatttcccaaaaagccaaagtgtgtggcccttggaattccaagcttcttaaaaagtccatgtgaatgggttccatatagatagagaagccacaggttcacagccagaagaagccaggtttccatggccaagtctggtatgagagccctcactactctcctcacatctctctctcctctgagtcctcctcacagctgtgtggcgctctgcgctggtctatgcgcatagagctttcc

SEQ ID NO: 586659 - DNA, 157 bp, Homo sapiens
tctcacccatctgcaggtgtcaccacgccagagatgggagaggtatggggatcgtgtcactgctccccatgaacagcccatctgtgtagtatcacatgtgttggggaaaaaagggggtccacacataagtcataataaggagtctccctctacttta

SEQ ID NO: 586660 - DNA, 532 bp, Homo sapiens
ctgtgatcccaacacttgggaagtgaggcaggggatgctgagcccaggagtttgagactagcctgggcaatacagtgagacctcatctttaaaaataattaaaaaggtcaggtgcggtggctcacgcctgtaatcccagcattttgggaggacagtggatcacaaggttaggagtttgagaccagcttggccaatatggtgaagccctgtctctactaaaaatataaaaaattagctgggcacatgcctgttgtcccagttatttgagaggctgaggcaggagaattgcttgaacctgggaggcggaggttgcagtgagccgagatcgcgccactgtactccagcctgggcgacagagcaagaatctgtcttaaaaaaaaaaaaaatgggccaggtggtgggggcacatgcctgtagtcccagctgctcgggaggctgaggcgggaggatcgcttgagcctgggagtttgaggctgcagcaagccgtgatggcactactgcattccagcctgggtgacagagtgacggtctc

SEQ ID NO: 586661 - DNA, 752 bp, Homo sapiens
  misc_feature (750)..(750): n is a, c, g, or t
tgctctcctccctccctggcttctccccatcttgctgccctaggttctgtctgcccatcccctggatgatctcatccactcattctcaaggctttataaaccatctataggttgacagcttctcaattaacatctccagtctaggcctcgcttctgagctccagatatgtcaagaagccgtgacaccatccaaaacagatctcccctctcaacttgctcctcccaccgtcctcatctctgtaaatggcaactccacctttgcagttgctaagctcaaaaaccttgaagtcattttgatctctttttcttcacacctcatatctaatctcttattaaatctattgtctcacactgcaaatagatccagaagccaatcacttctcaccacctccaccatccaccgtccacttctgtcacctgggtatgagccactatcttctcttgccaggtggctgtagtggcctcctcactgggcttctgcttctgctctctccaactccttcatttggttttcaaccccagtagcctgaggggagcctttttaaatgtgtaggatatggtcacttccctgctcaaagccctctgacatctcctcttacaggtccctgtctcctttataataaaagccagagccaggcacagtggtatgtgcctgtaactccagctactcagaaggctgagtcaggagggactgcttgagccaggaggttcgggaccaagcctgggccacggcaagaccctgtctctttnta

SEQ ID NO: 586662 - DNA, 191 bp, Homo sapiens
catggtgaattacagggaccgccaccaaccgttagcatgccgtctgtagcatgggaggggcctggacgcatagcagggccgtctcacgggctatgtgtttcacggttgcacatttaaaacggtgggccccggcacgagtggctcactgcctgtaatccccaacactttggggacggccaagggcacaaggg

SEQ ID NO: 586663 - DNA, 192 bp, Homo sapiens
tcttgaggtcacaggacggatagtattaaatgtcttctgcgagataccatgcattatcgccgcagttagggtatcatcactcgatgaggcatccagccagaacgcctgaacgcaggcacatacttcctatgctagaccctagtaggctcccttcccctactcatcgctctaatttagcctcacaacacccta

SEQ ID NO: 586664 - DNA, 188 bp, Homo sapiens
caggtgagtagagacagtaatgggtacgacgactttaggaaactgtttgggggtggtggaatactctatatactgacaagagtttatatacttgaccaagacgtttactatactttgtcaaacacctcctcaaactagtactgttaaacgaccgtacacggcgtttccctactgtactaacactttta

SEQ ID NO: 586665 - DNA, 320 bp, Homo sapiens
  misc_feature (23)..(23): n is a, c, g, or t
caaaggggaaaggtccattaaantaactttaaaggggcttagggtgtgctgaccaggtcatggggaaatcaattagggtataaaacttccactttctaaggtaatgccccatagtgcttgctacatctcaggcattgcagtccattaagctcagttatttgtagatttcatcattaattgagcacctcctgacttttatctattattctcaaagggttattttaatgtagttagagagattttattctattctttttaagatacttaagtttctttttaagatactttaagttttgagcttactgtaattaactacaagg

SEQ ID NO: 586666 - DNA, 116 bp, Homo sapiens
agacttgctccaagactaaatctctcaaggataacctatttgccatcagttgataattagtaaaaattagaaattttagaaagtcaatgggaagccctgtcctgccagtttcttaa

SEQ ID NO: 586667 - DNA, 270 bp, Homo sapiens
cagccgcctcacgcacctgagccccgaggagaaggcgccttagggagggaaacctgaaaaaccagagtagccagccttcaggaccttcccaagaggatccggaaaggaaggcctcttgaatttagttgtagcccttggaaccaaccaagaatgggtaggaattttagggaggaggaggaaccccaaaaaactctttttttctctagaaaaaaatcagcgcttttttctgggggaggaaaaacccttcatgccccttttgtagtgttttag

SEQ ID NO: 586668 - DNA, 535 bp, Homo sapiens
  misc_feature (41)..(41): n is a, c, g, or t
  misc_feature (118)..(118): n is a, c, g, or t
  misc_feature (405)..(405): n is a, c, g, or t
  misc_feature (450)..(450): n is a, c, g, or t
  misc_feature (481)..(481): n is a, c, g, or t
ccgctcgtgccgctttcctggctcccctgggacagggaggnagggtgaagatggagggaatctggctggctgggccttgtgtactggggggtggagggcccatttgactgcaggaatngtcaagcacataagcaccttgaagtgtgttactaagatacaagaaacaggtttgcttttgcctattccagcatggtgtacctctcttaggataccttttagcacaggtagcagaataccagccagcctcctgtggctcacagcattaagatatttaatcatctgacattacatgaagtccagtgttaggcaggcaggagctgctcccgtgactcagtgacatcaggttggtccacatcctagcagttctcttggtgttcctgcgtgatcaaaggatgactgccacancccagcctgctgacctcagccctggcgtgggcataggagggtctncgtggctgagcatccagtgtccttcgtactnccactgacagcctgggcgacagagcgagactccatctcaaaaaaaaaaagaatc

SEQ ID NO: 586669 - DNA, 170 bp, Homo sapiens
  misc_feature (139)..(139): n is a, c, g, or t
cgagtgtgctgggtcgatctaagcgatccctagcggtcgcagtcgtattgaaaaaataggtaagtaaacataaggaaataaaaaacattaaaaagtactaatatatcacttttttcatggtcaactttagtctcagaanaccattaattgatatttccttggtaaaacat

SEQ ID NO: 586670 - DNA, 286 bp, Homo sapiens
tatactagcgtgggtctggtggacgcggactccacgactccaatgagtgtagcgttacgggaacaggattgttcaaagatcagcgagaataatcagaaacataacagctgcttctattaagatggtagagatatgctaaacgttaatagaaactgcacgtgccagcggggcaaaatccagtttagatagctggagaaatcccgacccacgctgcttgcggacgcccgggattgaatgagcaaaccctaggcgagcaattaaatctgagtctaagagcagtacatca

SEQ ID NO: 586671 - DNA, 138 bp, Homo sapiens
acgctgaccgcgtgttcaaataattctcctgcctcagcctcccaagtagctgggactacaggtgcgcgcaccacgccatgtaatttaggtatatttttttccttattttcgagtcggagcccgagtatacacgccctt

SEQ ID NO: 586672 - DNA, 187 bp, Homo sapiens
agagagagagagtcaaagagaaggaccaaatgattagagtcctagcgaagatcactatctctgcttagcaaaaccactcttaacaaagtccagtgaggtctcagagattttctcgaagcaaggagggaattaagcattgagagcagccaggcttcctacttcgcactgcaccacgctcatgcgcatt

SEQ ID NO: 586673 - DNA, 202 bp, Homo sapiens
tgttcagtttctgcattatcactattttccccaatagtcttctcatgtaaattacttcctttttcaattaaattctcctgtatagtttgttcatcaatcattttttgtttatgtaacacatcatcttttatatgcaatggacttttttgaagaggtttttcttcttccttacttctttcctttttttgatgacttttttcct

SEQ ID NO: 586674 - DNA, 131 bp, Homo sapiens
gactgagccctgatgattatatgtaagcttgatccgcatcgcagctgttgcttctgagggtcagaactttaatgacttgtgtgatggtccccgtgttacatgctgggacaatgctgctgctaggagacaag

SEQ ID NO: 586675 - DNA, 123 bp, Homo sapiens
atagatgcgcactggagctcatctatcgggctggagggatacagcagttcgaaagcgcgtcatttctctccttcagtagtgcagaaatgagtcgattcacagtacacacagaactgtaccagt

SEQ ID NO: 586676 - DNA, 234 bp, Homo sapiens
tagcacgctggagtaagtgggtgcatcttggctcacctaacctctgtctcccagaatcaagtgattctcctgcctcagccgcctgagtagcttggattacaggcgcatgccaccatgatgcccagctaatttttgtatttttagtacagacagggtctcaccatgttggccaggttggtctcgaactcctgacctcgtgatctgcccacctcggactccagcgtgctgatacaa

SEQ ID NO: 586677 - DNA, 396 bp, Homo sapiens
  misc_feature (328)..(328): n is a, c, g, or t
  misc_feature (336)..(336): n is a, c, g, or t
  misc_feature (355)..(355): n is a, c, g, or t
cccaggtgaggcaaaccatggttgctgggctgtagggtgagtggcttgcttggtgggacctcacaagttggtggcatgggaaggatgtgggtctttagtcccttgccctggcttagctgcaggaaaaaatggctgctttcccttccccccattgagctttgctccctttaagccgggtcttttgtccctttttattttggtctccaaaatgaatgctcatctttggagggggccaggtaaaaactagggaggggagtgttttctctctccaggtttccccttccagtgtgcaaaagttaaaagggtttggcgggggcagtgccttacncatgcttnattccccccctcccccctnccttgggaggggtgtggaataaattatttttgttaaggcca

SEQ ID NO: 586678 - DNA, 368 bp, Homo sapiens
actttcttgacgaaaaaaaagcatgtacttcctgctcacaatcttcaaatattccatctctctctcttctgaccattcacatcagactacaatttttcatcatactgccaagtcaaaccctctgggtccactgtgctctgactcctagtctctgagcatctctacactgaactatgacagccaaggagaactcatctatcctatccatttcggtccactttcggatgggccctccgaactgctgaccaatcctattaattcatcacttgcttaactttcaaacttctcccagatattattttagagtctaagctacatactactctcaaatcctcattttctcttcccagcttctttttcatttttgg

SEQ ID NO: 586679 - DNA, 250 bp, Homo sapiens
cggtctccacttggtgctcaggacttaaattattatgccaaatgagtcattaataagcattgaatgtatatagtatattatccaagatagaaataacagtatgaactgaaactgacttcatcttgccactctgtcatccacatctggagatggaccagcctccagcagtgaccccatcactatcgtggtcacagaaaaggaagtaagcagaggtcttatctggtcttatcttgcgaactggatagatatt

SEQ ID NO: 586680 - DNA, 1157 bp, Homo sapiens
ggcgcgctctgagctgaccccagtgatccctcccccgccgaccagcagcccatttggagggacggaagtaagtggaagaggagagtgaagtgggagcctggacctgactacccagacagagccggtgaatgggttttgtggtgaccgaaggagacgagacagaaggagagacgaggcaacgagagcccagaagagagccacacacgatgtaaccgccagacagagagagcagggagaagagaaagagagaacaggaagagaggagaacagacaaaagcgaacacaagcagggcacaaagagacagacaggcagagagagagcaggaggacgagcgaacacgcgagcggaagggaggagaaagatagaggaagagaacagaggagggagcaaaaagagggaagaagataagaaagaaagaaaagagaaggaaagaaaggagaaaaaaaggagcaacaaagaacagagtagaggaagaacgagaaaagaatggggaaagaagcggaaagagaggagagcaagaggaggaagagcaggagaaggcaggcgaggagagagcagcaggagacaacggaggagaagagagacgaaagagaagagaaaaggagggagggagagagggcggaacagggagagagaagaagggaggaagagaccacgccaggcgccagacgcaggagagaacgagacgaagagaaagagaaaggaaaagaagcgacacacagcaccgcgaaaacgaggacggacagaagacaacgaacaaagacagaagcgcacaaagacagacgaagcgagcgcccagcaacggcagacagagagccagacacggaagaaacaagagccgccggaagaaactcgcggagaagcgagaggacagacgagagcccagaagcaagagcagcagagccggcgccgcggggcgaagagaacgcaccaggcacgaaggaaacaccaggccgaacggagccaagcacaaaagagagaggaagaaacagcaacacgagaagagacgaaagcgcggaacgaggaccgaaggcgacaagaccgtaccgagaccgaaagaagaagcacgagaagaaagaacaggaacagatacagcagacggagagacgccgagcagacgcggccgcagccacggagacacgagacacagggaaga

SEQ ID NO: 586681 - DNA, 184 bp, Homo sapiens
ggacctaggatgagtcagtgctgtgcaagacaactggcaggagttgcataacatctatccagtgagtcctgcaagaatacaggctctactacctccagcagctccctgctgagcctggggcatgagatgggcctatggacttcttcctcttacttggtcctatttaaattctagtccacgtcac

SEQ ID NO: 586682 - DNA, 1278 bp, Homo sapiens
gcggcaggggggcaacaggcattcgcctctcctcagagcaacattctgcacattccatttcacagttctcaagccattagcatttcatagttcatttcatcaccagtctgggcatctcaattcaggcaacacatgtagtttatgtcagttcgtgcgataaactcatttcatcacgcatgatttcctccccacaaacacacacacagagcaaaactccactttcataaaagccctcatatccactggacagatccccgtacgacatcatggtctccaattgtgtacaccgcccaacagtccaatctcatgtcagcaacagcccatatagcgctggcatgtccattggggccacacagctatcatgcattaccacaccagcacagcaactgcccaaaatctagtaggtgcacacaactatcttccccagtgcacaataattggtaataaacacccccacttaaggcacactaactcgcaacaacgcaccagatggctattcactaaccagtaacctctctcgcttcattggcaaccaatcaggcggcactccaccgcgtcgcaaacacttacagcccttcacgaccatttacattgacacaagacaggaaatatcggtgactatatacacatttcaggctacttcaaaaaatactggaagacttaggaggtaagcccactagccataaaatacacaacaccaacaaataaatgcaacctaacacctactcattgaggaattacacaacaaattcagggccgacgccaaaccgccaggtagcggaaaataacacagcacgacaacctacgccaagcatcaacaaagccatccgagcaaaacgcaccagaccggcgcaccaccaaccacagacaaaaacggaccgaggacaccccagtaccagccataaacatgaccaacaactgcacaacggcaacacaccacagacgcaggcacacccgcgcaaccaaaatacaaacgaccccacacaccatccgtgcacccaaaactacttcacaaagaacaaaagcaaaaggacccctacacccaaggagccccaacaaacggccaaaaccggaacaaaaaagggacgcaaacacacgacctaaccgacggcacaacaggcacccaacaccggaagcacccaacaaacagacaaaaaggaccacacaccacgaccgcgacaaacaacaacaggacacaaggagacaaacaacggaaacaacaacggccccacaacagccgcaccacgcaaaacaacacgccaaccccctcacccaaag

SEQ ID NO: 586683 - DNA, 354 bp, Homo sapiens
  misc_feature (320)..(320): n is a, c, g, or t
  misc_feature (327)..(327): n is a, c, g, or t
tgccatttggtctggttcttcagaagcagagaaggcaacaaggactgaagtggcagtgagttcttaagcaaatgctcccaggagaagcctggaaaggaggaggggaaggacaaaaagagagaggagccaaggaggctaggatttcaggcaaagtctcagcctcagcctgaccttacaggggtcttgagagctagactgcttagcatggtagccactagccagatgtggctacttaaagtaattaaatttaagtgaaattaacaattcagatcctcaccctccttagccatatttccaagggtccaattagccacctgtcntaggttngacttaccattttcgaaccggcacaga

SEQ ID NO: 586684 - DNA, 275 bp, Homo sapiens
atctctagagatccccggcgccacagcttctcttatcaaacttattactatacatcgtactacacgacatcgttctacgtttggttgctcacttccacttattcctatctatagtgagctgttttttccatctataggtaggcttcattcactgtatttcccctaatcctcaggtctacacctctaggaccaatacctacgcacttaatccatttcactatctagtattcatcgtgtttatatcttatccttcttcccacaagatcgttttctcg

SEQ ID NO: 586685 - DNA, 439 bp, Homo sapiens
  misc_feature (1)..(1): n is a, c, g, or t
  misc_feature (55)..(55): n is a, c, g, or t
ngtttaaaataggcaaataagttggctgagggcttgtttgtttgtttttctgtcnatttgattgtttctaatgtactgatgtatttctaaggaactgtaattgttacccagggttctcctttgcacgttgtttttccatcctgcagtcaagtgcactctctgcctctgtcacctacctcttgaatttgacttcagaatcgctgcctagctctaatcaatgaaagactatctccttctcattaaaatgagcaacaagaatagttgactattcttgtttatatcatactagaaaaaatttaaatacttggaagtcagagattagactttgtaatttatactagagagtaaattattcagttactactaaaataatataatgtttatccaaatatatgttcagatatatatgatgggcaaataaaagattgttttaaaaata

SEQ ID NO: 586686 - DNA, 144 bp, Homo sapiens
tacctgtatattagaagagatagggttgcagggttgccaggctgtctcagactcctaggctcaagtgatctgcccacctcggcttccaaagtactgggattacaggcatgagccactgtgcccgggctagtcctgattatgttg

SEQ ID NO: 586687 - DNA, 1495 bp, Homo sapiens
gcctgttcctgagacctgcggactcccgtagggtccccgtggccccgagttgtagtctgtggacacccctggcctgctgggtgatctgtcgtggtctccactgcgccctgggtctgcttgactgctggatcctgtgcctctgtgctgcctatctcatgtggctgcccatgcaattgcctgcatgtgcatgtgattgaacattcttggcaccctgtgctgtgatgtggatctgctgtccttgtgctgtgagctgccccaagttgccgtgatgtgaatggatgtgccagcatattgcactgtgtgcagcaagatgaccttaccacaccccctgctgtacacactgctgcgctgccatgttgatgcaaccgtgacaaggtgcacctgatgaggaatttaaatgactctccaatgtgtcaatttgttgtgttgtggtgtgaccttgatctggtagtggggagagactttgacactacatataagtatgtgttacttgcaaagagacaaccattatgcataagtgagattagcaatgtgcccaacccaatttgtgatgttgggagctttctggagtgattgtgaaaacagaagtatttggagggttggcttgtggtgacatttccccttacatgtatttgcaaggcatttattgtgagaataacgctgctttgtgtgcatgcggagatgtgattcaaagtagcagtttgcaatacaagcctacatataagagtgatgctacaatgcgcatacactcaatatgtctatcaaacgctgaaattgagtgtgtgcatactcttgtgaacgatacgcaaggcaggtgtgcttgtgccggatgcccctagaaggggagagatgaccctatccaggtgtgccttctctaaccattgtaggttaccaaggaagggatactgaggtacccccatgactcaggtatgccgctgagtggtgtgagaggacgcgctacccagggttgcccaaggagaatgaacgggctgaggtacctgggaggagtctcaatcatctcactggggtgaggaatgttccgagctagttcttatcttccgtgtgtgcgagattgacctatgtgactggccccaagttgactgtgcttgaagctgtgagcagatgcgggggactgcacgcaatgtgtggattatttgccgcactatacgaggtaagtaccaaggaacctatttacagtaagattgagatgagaaagaaggagtgaattggtaggcccttagaggcgtagggaaattttatagaagtaggccaggagtagtaggggtttgtacagcagaatattagaaagagaggacctagagtatgagctaggaatacgagacagagagcgtagtttgatagagtacacgaagagggaacgagaaagagtagtatgagcaaagagaagaaagagtaacagactagagaaggaggcgagtgagggtatatagcgtaagcagagtcgagaacagctacttatgcaagatgggggttg

SEQ ID NO: 586688 - DNA, 362 bp, Homo sapiens
ctgcagtatatgagttccaaggcattattttctgatgatatctatcatggtttttactaattagaaatggaactgtaaacactttgtactcactatataggccactgcataatcaccaggttggcgcacgtgtgagggtcagtgtaagaacccccaagaactggttatgtgccgaagatccatattcaggaacatatgatatactgggaagatgtcactcaatccagtttgccagaatgcttgactacacttttccatggtacacattagaagctccttataagacatgatcactccacttatctccatgaaccagtcactcatggtctgctacgacctaatgtaatgacggatagtctttt

SEQ ID NO: 586689 - DNA, 211 bp, Homo sapiens
gcggtggctcagcctgtatcctaatgcttatgggaaggccgagacgggaggatagcctgaggccaggagttggagaccagcctgggcaacatagcaagaccccatctctacaaaaagtgataatttttaaaaaatgggctggctgggcccctggcgcatcgtggctcacgcgctattatcccagcactttgggagacctgagcaagccagg

SEQ ID NO: 586690 - DNA, 215 bp, Homo sapiens
taggcgactctagcggaccccggtccccgacgtgagcgcagcggctcaggtccaaaccccccgcgtgcacccacttaccgagcccatggcggcactaattttgactgtggggcaccacaaactggcagattgccatcgtctaacgggccacagcctcccgctgttcacccacctcctattgccaagcaccgagatagcagtcgcaatcatggaca

SEQ ID NO: 586691 - DNA, 145 bp, Homo sapiens
  misc_feature (101)..(101): n is a, c, g, or t
  misc_feature (103)..(103): n is a, c, g, or t
atcgtgcagaagatcaccttatcgtgcagaagatcacctccacgctcaaagttcaggtctcggcggttgttgtagctgttccagtacaattcaatgttatncnggttgggtgcatgtgtaatgatatttctgtacttgagcgtga

SEQ ID NO: 586692 - DNA, 180 bp, Homo sapiens
ccactcgttctttgttgcctgggctgggtggggctaaccgtgctgcataagtgtcataaaaacgtttttgcccacagataaattgttccgtgtaggcgttccccagagtacgttgccgtgatagccgcgtcaaatgcgtctagaagggctgtatagcggtgaagcggctgtgagcttatc

SEQ ID NO: 586693 - DNA, 116 bp, Homo sapiens
acaatcagctcggccccgttttacttacaagttgtggtcatcgcaggctgtgttcgctactgtgatgtgtaggaggaatagctcaggtggaataggatgggagctagctctcacgt

SEQ ID NO: 586694 - DNA, 348 bp, Homo sapiens
agtgtcttcaagacaaactaacgcagaccatctgctcttgggtggggaaagagattcccatatttggagttattctccccaaagcaccaggcacctgcttctcttgtgaaaatctatgagctaacacaatgatttttacttaacatagtataaaaccaacgtctcctacaaggagaggtgaaaagctgaacacaaacatgccgactaacagggagctatggaagccttccggcggggaaacaggaggtccgcacttgtgctctccatattaaatgcttagcgacaaggcctaacagaggagaacaaatgctcccagagatgtctgcctgatggcaatggagaaaaact

SEQ ID NO: 586695 - DNA, 395 bp, Homo sapiens
tattaattgcagacagctacctaacaaacccacaggtcctaaactaccatacctggctttaaaatttttcggccggaacgaactcgtgagcagaacccaacctccgagcagtacatgctaagacttcaccagtcaaagcgaactactatactcaattgatccattaacttgaccaacggaacaagttaccctagggattacagcgcaatcctattctagagtccatatcaacaatagggtttacgacctcgatgttggatcaggacatcccgatggtgcagccgctattaaaggttcgtttgttcaacgattaaagtcctacgtgatctgagttcagaccggagtaatccaggtcggtttctatctacttcaaattcctccctgtacgaagggga

SEQ ID NO: 586696 - DNA, 347 bp, Homo sapiens
aaaaaaggttttttttggggggaaaaaaaccccccccccccttttcccccccgggggggggggttggggcccaaaggggggtttttccccgggggaaaggggggattttttttttttttttttaaaaaaaaaaatggggggggggttttttttttctttttttttgggggggggccttccccccgggggggaaaaaggggggggtttttccaagggggttttttttaaaattggggggggggggggccccctttgggccccttttttttaaaccaagggggcccccccctttttgggggggggggggttttgggggggtttttttttaaaatttttttttcctttta

SEQ ID NO: 586697 - DNA, 231 bp, Homo sapiens
gttctagagtatcccagttcgccgaaagtccccatagtctgatttacccattggtgggagggcgagctcatagagggcgacagggggaggctgtctggtcagcagctgtgtatttccaaagaacaaggactacccaaaactacaagccttggaaggaccaaaggaaaagagaaaaaaccaggctctaaccaggccatgcgctagaaatgattgagtataaaaaagaaaatt

SEQ ID NO: 586698 - DNA, 111 bp, Homo sapiens
ttaactatcttacagcttgagtgcagagatgaagagtcaaatctgaccaagatgttgatgttggataagagaattctctgctccccacctctaagttgcccgccaatcgaa

SEQ ID NO: 586699 - DNA, 546 bp, Homo sapiens
  misc_feature (546)..(546): n is a, c, g, or t
cctggatgccctagatcaggtgccaggccatttggttcctggtgggtatgggctgtcttcctggccgtccctgcgatggcggggttaggtggttctggtgtctctctttttataagagcaccagacccattggattaggacccccattttaacctcatttaacctttattatctcctccaggccctgtctccaaatacagacacactggggggttaggggttcaacacaggactttgaggaaacacaaatgtttatttagtgcataacaaaaaaggctattaggaatgtttgctttatgcgctactggcagatactacaagatctcctaagcatcccagactactgagaaacaagaaattgtttgaccctgatatccatatcagtgataagaaatcaaggttcacttttggatttgagtctaggactgattctcatcttcttaataataataatgcaattttcacatggaacttactaagtgcttttcatactgggatctcagaagtatgttaaataattttggaatttatctctcttcctgtctn

SEQ ID NO: 586700 - DNA, 632 bp, Homo sapiens
atttacaaaatcttgacatcattaccttttgatgttgagttactgtgctgagaattcagttgatttatttttgagttattaattgagctgtagaattgttacctatctttgtgtaatatcctattctgaaagtcaagtctctggctttaggatgcctttataagaattattttgtaaaaaataataataataataatgacttttaatgaaatagagtagtgttactccaagagggccagtaaccagaaagtcacctctcaacaacacttcctacttagaagtgcatggtatttctcaagacaagtttgcatgcagccaggtgactcttcattggtacagcagtcatgtggcagataattataatgtaagaaaatagagtgatttgttccaggtcttatagctgaagggtagtagaaacaagcttcaagcctgtgtgtttacaaattcctacactgtaaatatgaattataagctaacatgaagtttgcacattccttcttcaagtttccatgtatttatatataagatattactattattataatctatctgtctacccagaataatataactgttaataattgctaaaaatttttaattaaaataattactaaactcttaaaaaaaaaaaa

SEQ ID NO: 586701 - DNA, 394 bp, Homo sapiens
caggcaggcctcgtcggttagagcacagtgaatggactcttcccggactcctatcattggctcctgtggtcactcaggagccggcactgttaatagatcttacaagccaccgttgtcgaaggacccggagtggcgttggatggaagcgagtcctgcgttccctctgtcattcacggacccgagtgccccttctagcagccatctactttctaatgattcatgtcctgctcattctgggttttacgggccatctatagacttagttgttactctttggaccactcccctcaaaaattggaattctctcacctctaacatcagaaaatccattcccgtggaacagtcttcccatttacaggttctcttctccaactcttcacggaaagtgcctgcg

SEQ ID NO: 586702 - DNA, 291 bp, Homo sapiens
ctcttctccttcccatttctctaactaaggggtatgttccctctgtccctttccctacctttatatgtggggtcctttttcatacaggaaaaacaaaacaaagaaataatggtctttttttttttttttttttttgtttttttttggggggggtttttaagttgaaggggagaagggtttacatgacgacccaagtgtaaagcggggccccaagggggttcactttaacaagcgggggggggtttaaaaccgcgggtgaacgaggggaaaccgagcggggaacattcacac

SEQ ID NO: 586703 - DNA, 139 bp, Homo sapiens
ccatcttagccaggcgggtcttgaactcctgacctcatgatctacccacctcggcctcccaaagtgctggaattacgggtgtgagccatcgcgccctgccggagatacatttttgaattcccctgggtgtatacctagg

SEQ ID NO: 586704 - DNA, 188 bp, Homo sapiens
acatgctaacgtgcagacgttgatgtctggtggagatgcaaatgtgttttgtctgagagaaaagctccaagagtcactcagaagcagaagatggcttccctccgtgggaattccctcgtgaatccagtttgttttcagtcagctgaaacgtctctatcatggtagactttttttttaaaccgctgtta

SEQ ID NO: 586705 - DNA, 1060 bp, Homo sapiens
  misc_feature (385)..(385): n is a, c, g, or t
  misc_feature (583)..(583): n is a, c, g, or t
  misc_feature (591)..(591): n is a, c, g, or t
gcccgccaacatgggccgcgttcgcagccaaataccgtgaagaaggcggcccgggtcatctatagaagagacgtactacacgcgcctggagcaagctggatcttccagcacgaacaaagcgcgtgtgtcgagggagattcgccattattccccacgcaacaaagctccgtgaagcaatgcatagcaaggttactgtcatcgtcactcgtgactgaaggcgatacttcaggacgaaggcccaggctatagacggtattcttcctatcaatgctgctatggacggaggacgcagagaaatgcgaggacgatcaacttactgattcgctggaaggtctcagaccttgtgattcagcgatgattgagttggactagtagactccctgancacctacaggatatatggctgagacgtgctttataggaacgttctcgtagctagagtcttgtcactagatccgtctccaagggttcacatcaagcgccttgactatcgtgtgcgcgtgagtttgagagttgtacaaaaagacaggcgctctgtgtgtgaccgatgttgtcgatactttttttctggacttagctgtcntggtcatntctatgtctctccaccattcaacatccgtggggataccaatacttaaaaaaacatggaaaattccacaaggacattagacacttcagagatggcctgttctatttaatgtatcagtgagttgtgtccagtgatagataccatgaagggtcgcatcccctgatgtaacacatgtggtggccccacatggtgggcctcaattaaaggcgtgttgtgatgtgtccctgtgacaactcccaaaggcctgtgtgtctgttgtgtggcccccaacacagagcgtggggtgttacaggatctccagtggccccgggggaatcatctcccgcgctattatattgcgcgggggaaggtttcccggcacatgttttcaacactttgtactccgaaaatataaaaaggcgccccaagggggtgttatagacgccctgttggcacttttttaatgtgaggagcacctcgggcgcgcaaaat

SEQ ID NO: 586706 - DNA, 124 bp, Homo sapiens
  misc_feature (121)..(121): n is a, c, g, or t
ggaattcgggtggtagacttgtgagagggatgggctagttggcaggatacacgtttctgctatctatctgacacttataggagttctgtttttccttgtactgctaaccaattccccaggngag

SEQ ID NO: 586707 - DNA, 268 bp, Homo sapiens
ctggactgaatcccttaatgatctcatctgctctcatggcttttcatgtcatctacatgcagatgatgactcataaaattatgtcaaccttgacctcatgcctaaactccagactcacatgtctaactgcctgctcagcatctctacttggaaacctactaggaatctcaaaatttaacaggttcaaaatcagctcctaatcttgcccctaaaaccctgcttctaccaaagtattcccatcacaattagtggtaactccatgtctcca

SEQ ID NO: 586708 - DNA, 510 bp, Homo sapiens
ctgtgaacgagacgactccaaaaaaaaaagtggccaatgagaggggattttcccctcactggtattttctagaagaaattaccggcggagattagaaatctaatacacagtgtcgtaatcatcttatgttctcctcttgggggtagactaaaagagcctcattatatttgaagaaacccagattgcatggtcctgggcttggcagtttttaacacagtgcagttgggaacatgtcccagttctgggggatcacatttatggaaactcttaaaggactttaatgcccctccctaatcctttttctactgtaaaacctcattaatatatcctccaaggtataatttatcagtcaataaggataggggtcattcgagatttaaacctttgagataagtgggatatcgggaataaggtaatgattggtaatataaggtcttaaacttttaaataagcttaactcatggtttaagcctagccatcagctatatttgagtacatattccccacagt

SEQ ID NO: 586709 - DNA, 1086 bp, Homo sapiens
gtacagcaacgagaacctggacctggcgcgggcacatggcagtgctggcatggaagaccactacggtcgatggaggacgtacaagaaacgcatcctggatggttcattgccgattagtccagctccgtggtgtccacccaggggcaagatcctctgcgttctatgggccccctggctgtggcgtaataccagcattgctcgctccatcgccgcgtgccctgaaccgagagtacttcctgcttcagcgtcgggggcatgagctgacgtgtgctgagatcaagggccacatggcggagcctacgtgggcgccatgcccgggaagatcatccagtgtttgaagaagaccaagacggagaaccgccctgatcctcatcgacggaggtggacaaggatctggcctgaggctaccaggggtgacccggtcgatcggcgactgctggagctgcgtgtgacccagagcagaatgccaacttcctggaccacgtaccgtggacgtgcccgtggacttgtccaaggttgctgtacagtctgcacggtgcaagcgtcacggacacgtatccccgtagccgactgcggagaccgtatggacgatgatctaacgtgtcgggctacgtggcccaggagaagctggccatttgctgagctgctacctgtctgtcccaggctcgcgccctgtgtggctttggatgagagcaaggccgagctgtcatcgcacgttgctgacgctgctcatcacgccgtactgccgcgagagcgggtgttccggaactggggaagcacgtgggcacggtgttccgctcctccgcctgccctgactggtcagcggtcaaggcgcattccgtgcgctggtgcgccccgggagcctgtcgggaccttccggggcgacaccctgcttctaccctgcccctcctctttttcgtgtcaccgcccgtcgggttccctaggcgtgcgcacgtatcgccctggtggcgcccccccgtgtgccgggcacccccgacgggccccgcgcatagttgctcgtactgttgtcctccgtgctcgcagcccatcggtatgctctgcttgtcgcgctctcatcctctcgcg

SEQ ID NO: 586710 - DNA, 1047 bp, Homo sapiens
taaaaaaaaaagatgaaaaatgaaaaaaaaaatggttaggaggctgaaaaaaaaaccccactgttttttgggggcattggggcaacacaggccccgtggacctgtccttgccttggccccctaaggccatatttaccccccgagaaaggcgggccatggggtacactggaagctgggggccagcagtttgcacaggaggcctgtctgagccccaacccgccagaacctgtgtttgttgcagcagcttccgtgttcacgtgaaggcgtggcgtgaggtgtgtctccggggtgtggggccccaaaagttagcccccttgtgggctctcgacgtgccttgtggcggcgcacgagctgtgccacacactttgtggcaacgtagtgggtccccccgagctctctctctgtgaggctgtgacccactcttgtgtgtcgcgtgggcccgagttttacccacgggcgagagggtgggccccaaagccggtgtgtcgcaacaccctctctctctgtgggctgtgtgccagggttttgggggcccaagccagagggaaacctctgtggggcctccgtgagcgtgagaagcggggcgacggttcttctcccccacagtgtgtgtgtgcgccctattgtgtgcggcggggacacccacccccctgtggtggttttttgtgagacaccccggtgataagagtagcgcccccagagagcctctctctgttgcgacttgtgggcccccgcgtgtgagagaggtgtgtcactcttctctgtggtggggagccccacaaaaataaggccccccccgcggcgcactattctatagacccgccctgttggccctcgtagaaaatgactgtggacgtctattccaaacaccacccctgttggtgttaataagctcaggtgactgagatgaggactattggcaaacattgataacttgtaggccgctccccacaaagagaaagaggctcgttgaccgacagtaatagaaaggcaacaagggggctattatgaaagagcgcaggttggtatatatacttatacaccaag

SEQ ID NO: 586711 - DNA, 1014 bp, Homo sapiens
tcgcgttaacccctggtgtggtcaagtcatttttactttgctctgttttcacttgcgtccaactgcagattcacttgggacttgtttttcccctctagccacgagggctctatgcgggatataagtataaaactttcaactggcggtgaatctgcttgccgattattcatgggaacgatgtcaactaccgctagcccctaagacaactcgcctgtcggggacgtaatttcccaagggttacctttgtcattatagtgaccctttatactgagaggtcacctatacacacaatataggcagagagagaaggtattaaatggtgtttcatgtaagtatctgtacaagggtagacagaattctagtctgaaaggagcgcaggcagattctggcattttgcttggggagttcaagtctttggacgaagaatacagagaccaaaagaccattttgactggtatgtgagcgatgatccctctgcccagtgtatctaacgtggagtctaaatatattcagcaatggttttaaagggcagatattaggcccgattcaaggtatggaatatagattcgaaagggttagtgataggtgagtgcctttcaggtagctttgcatcacagaccaagcccatctattgaggactgtacgtatggagcaggcccgtgagcttgtgacgtgagtttcccaacgtgccaggctcccatttgcttaggatgaatagtttattctgccctcctggtagagccagctgtgggcgactcggcactccttacacacgttccctgttaatacctcgcttggcttacttgcaaaatccagcaggcatcctcggctggatcctgcacagaagatggtatgaaaagtcatggccactgaaaagggcacggaactcaaagttgaattaattgtgctattgtccacagcgcttgtattctgtctgtcgggtacttgtccgttataagcctgccatctgctgttgaaagtgagcacgcacagtgataatccatgtttcttcag

SEQ ID NO: 586712 - DNA, 211 bp, Homo sapiens
tttaaacttggcatttgctcatgggccataaacagacctgtattttaattaattttttcaaaggaggccagcacattccatgtacaccttagcagtaggatgtattatcgcagttcttattttaagtcaggcttgggatcaccccagatgggcagatgttagtaaggtttaattgtgcccggttggaggatacgttctttgggtacttttt

SEQ ID NO: 586713 - DNA, 1267 bp, Homo sapiens
ccccctccggctgccgctcgtcggtgtggtgcgtgcgtatatacacgaggacttccggttttttaagtggacacccgtgtctccaagtattctcgcgcctttggtggaaaacgcccccacttgccatcaaccccggttgtgttgtttgtgcaacccctctccccgtatgtaggagaagaaccagctcccggggggggcccggggagtcccccagccgtcttctcccggggaatcttccttatcgccgcctttaagggccgcccgcctggctggaccggggagagatacaccccaaaattgtttctgcacccaaccagggtgatcaaccagcgctttgtggtggaccccaccttttaggcgcccctaatttttaaggggtggaaacccaccctcattaagggagaaaccacagagtgtgtgtgtaaccccaaaaatacgtccacgcgtctggtggtgaaccccggtggtccccggggaaatatttcccccccgcgggagtaaatccgtcgtgcggaacccccccacgcggccggtttccccgcgggtctcgggagaagccagaacaccgtgcccacagaaatagtggcgcaccccctccgcagaaatagtgggggaaaacagcgagtaacaagagatgtgaaatagaaacacacagggtcacatccacagcccctccgcgaccccttccacagtgttgggctctcgagaagggagagatagaaatcgttatatcttttggtgtgttctcccacacataattctctgtggcactccctcttcacatggaacacactcttgtggtgcacacacgtgcacctggagttctcttttctcgcgccacaaagagaaccccacttcttgccgcttgtggacactcgggtgggagaatagaaagtgtgaaaaaggccacggacccgcagagatgaaatccctcacccactaatggctgcatatattttggctgtcccacgagaatttggcccaagaaggtccaaaggaagctgggtattcaccccccctaacaacactcacaaactccgggccacacacaggaaggaaaataggacccagaacccctggaacctggggcccacgtccgccctcagagcccttgcccgctcgggtatgaagatcgggcggattgaggaatgtcaccccccactcccctctgacacgcacactcccaggaaggggggtccccgctggtccccgtctgtgaacaagattcctcccaaatattttttgttaaccacattgccttcaagta

SEQ ID NO: 586714 - DNA, 309 bp, Homo sapiens
aattgatgatagatttaaatcactatggtatttagaaaccactgaatacatttagaggagtgatggaatacattttaaaatgccataattgacaatataccagaaatcacattttttacaactgtttaaactcactaagaagaacagttaagatgtcaacttaaaaatgtatatatggagaattacagtttcaacaggatatgcttttaaaatttgaagaccactgctctaaagcagttgttacatgtgatgagcttcaaggagtcaatcttgctaattgtgtgacattgggcaagtgacataaaatca

SEQ ID NO: 586715 - DNA, 126 bp, Homo sapiens
tctaatctataagcaactgctgcagtctatattccactgcgatacgcagattcagttgccacagaggatttataaaggagaagagagacagcataggacagagatacatcaaacccacctctcacc

SEQ ID NO: 586716 - DNA, 168 bp, Homo sapiens
ctctataagggccatatagggttgtagaggatcagcttatatgtttgggattttttaggtagtgtgtgttgatgcttgaacgctttcttaattggtggctgcttttagtgcctactatggtgtgttaaatttttttactctctctacaaggtttttggccttatcgag

SEQ ID NO: 586717 - DNA, 81 bp, Homo sapiens
tactactgcctcgtgggtgacatcgatgacatgcgctttggagcagggaccagactgacagtaaaaccaaatatccagaac

SEQ ID NO: 586718 - DNA, 188 bp, Homo sapiens
gacaggctgctgttgtcataacttcaggaggagaagctggcaggggtgcagacagtgattgtattggatccaggcaaggcagcaaagggaacagactgcaaagatcatcatgcgatttggtgaccagcgggtgggacagtgcaggggcccgtcttcctgaggcagctcgagttgctccctggtgattc

SEQ ID NO: 586719 - DNA, 168 bp, Homo sapiens
tcgaccgaaaggtactcaacaaaaaataaaatcccacaaataaaaatccacacttagataaattactgactatttttactactcaattttatacaggattaatccaacaatcctttaaaatagcaaaatcctggccggctgtggtggctcatgcttgtaatcccagca

SEQ ID NO: 586720 - DNA, 1664 bp, Homo sapiens
aaaaaaaaaaaaaagaaatacaccatccaatcagaacaagtctgaaataaacatgttttaaaagcctgtaatgacagagaggtggcaaaaatgaagaggatgctcaaatgaaaaggaaaaagaagtttaggaagaactacctgaagccaagagacctcttactttgtccaggtgggaaactgaggcccagagagggaagaaagctggtcaaaggtcacacacccattggaagctgagtgagtgacactcaggaggtgaggattccatgggaagagcacctagaggtgattctcccacctgcagctcctgcatgggctctagaagctggtttaacacatgactcttctgagcctttgcctcatctgtgaaatggacacaatgacaactactacggggtggtggtgagcagaaggcaggttatcctctggcgtgtgagatactcagcccagtagagtgttagggactcataaaggcttgctattagaaattagggccccagtctcctaggacagggttttgttttgtttttgtttttgacacaaggccattgctctcctttaaaggtttgggttgtttgtggcagggatggggaaaggatctgcccttcccaggccctgccgtgcccagcacacctgccatgctgaatctcccctcaccctcgcagggaccctctgaggagggtattcccccattttgcaggggagggaattcaggctcagaagtgaacactccagaacttgcacctgcccgtgcctgccgagctgtgcctcttctgttgtgcatgcgttctccatcccaggtttccttagcctctgcatcttgaatcttcacggagtgccctcgggcttagcttctgacaggcctcatttcaggggttgtcctggcatcatgggatggcgatgccctcatttccccaagatgcagtggctcagacacattggtggatgtggccaaggtcactgtccacttggttcgatgctggctgtgcccctgctggccaagggaccttgaaccagctgcctcagttcaccaagctcccatttccttctccacaaatgggtgctggagtgatacccgcctcagggctgctgtggggttcatgtgagatcctgcctggcccagagggagcacatgggaagtggattactccatagtgttgtcggcgttatttgacaggagcgaacctcgggtcttccagcaggatctggtcatgttcccattgagcagaactagtctgaggctcagttctcccactctgtacctgggtggtcttggtcatcttaattggccctgcaggactacagtgtcttttttcataagatagtcataataaaggctcttttcttgggagatttttgtgaggaatagtaagatcaggcctgtaaaattttcatcgcagtgccctggcacatagacgacatccaataaatggaaactattatgttttgattgatgatacattcattccgatactttacaaagacgtactgaggcctgctatgtatcaggcacctttctaggcactttggatacatcagtgaacaaatgagatccaaatccctgaccttgaggaccttggccttgataaggggagacaggcagtcagtaggaaataagcatattaaatatatagtaggataggtggtaagtgccacagggttaaa

SEQ ID NO: 586721 - DNA, 111 bp, Homo sapiens
gtgactctgacggatccctcataggttcgcaggagtaggggaattttttaaaaaaaatggcaattgtccagcacatgcaaatgtttaaaaaggaaacttgaggaaccatga

SEQ ID NO: 586722 - DNA, 314 bp, Homo sapiens
cccaggttttcccctcaggggttaaaagctcaaagttcaaacaggtccaagttcaagcccaggccccccccttatagggtacaggtgggatcgcctgtaaatgaggacttttggaccattccaaaaattctggggttgagggaaattgctcctgtctacaaaatcccaaggggggacaaggcgctgtggctcacgcctgtaatcccagccctttgggaggctgaggtaggaggattgattgaggccaaaagttaaagcccagcctggtcaatatagcaagcccccgtttttaaataaaaaataataggccggca

SEQ ID NO: 586723 - DNA, 718 bp, Homo sapiens
cttcctctgccaccatggggaactgggctgtgaatgaggggctctccatttttgtcattctggtttggctggggttgaacgtcttcctctttgtctggtattaccgggtttatgatattccacctaagttcttttacacaagaaaacttcttgggtcagcactggcactggccagggcccctgcagcctgcctgaatttcaactgcatgctgattctcttgccagtctgtcgaaatctgctgtccttcctcaggggttccagtgcgctttctcctggggcaagcctgaaatcccaggggattgatgtcctgagagcatccctcagagcagccctcagccaatcatggatggcagttggtggttgaacacccaagcttcttaacccgttagtgctgctcaacaagagttcgaagacaactggacaggaatctcacctttcataaaatggtggcatggatgattgcacttcactctgcgattcacaccattgcacatctatttaatgtggaatggtgtgtgaatgcccgagtcaataattctgatccttattcagtagcactctctgaacttggagacaggcaaaatgaaagttatctcaattttgctcgaaagagaataaaggtaagcctctcattatctgacttagatattctctaggccattacaattgaggactagatttcagtgagtgaagacctctcctttgccaaaaaaaaaa

SEQ ID NO: 586724 - DNA, 165 bp, Homo sapiens
caccaccatgccaggtaataaatttttttttaagggatggggtctcctatgttccaagctgggctcaaactcctggcctaaagcaatcctccagcctcagcctccaaagttctgggatgaaagggtagccgacacaccatcccaaaggcgcaacttttttttttt

SEQ ID NO: 586725 - DNA, 438 bp, Homo sapiens
tggctctttccttgcctaacgtacacatggctcgtgatcccaagtagcatctgaagcgtttggcagctacaaagcatgggatgctgtataaatagaccgttgcgtttgctcctcggccattcaccgtaccgcacaagctgagagagcgacagcccttcatgatttacctgaggtacagacttacgtatgctctgacagaagatgaagtaaggatgatttgcatgcagcgtttcattaaaatcgatggcacggtccgaactgatataacctaccctgctgtattcatggatggcataagcattgacaagacggcagagaattgccgaatgacctatgacaccaagagtcgctttgctggacatcgtattacacctgatgagtgcacggacaggttgtgcacagtgaggatctttgtgggcccgggtccttcattcgccc

SEQ ID NO: 586726 - DNA, 163 bp, Homo sapiens
caggttaagagacccatctctttaaaaaataaaaaagtagccaggcatggtggtgtgtacctatggtcccagctacatgggaagctgaggtgggaggatgacttgagccctggagattgagtctatagtgagctggaatgcagtgacatgatcacagctcact

SEQ ID NO: 586727 - DNA, 4287 bp, Homo sapiens
cttcctctgccaccatggggaactgggctgtgaatgaggggctctccatttttgtcattctggtttggctggggttgaacgtcttcctctttgtctggtattaccgggtttatgatattccacctaagttcttttacacaagaaaacttcttgggtcagcactggcactggccagggcccctgcagcctgcctgaatttcaactgcatgctgattctcttgccagtctgtcgaaatctgctgtccttcctcaggggttccagtgcgtgctgctcaacaagagttcgaagacaactggacaggaatctcacctttcataaaatggtggcatggatgattgcacttcactctgcgattcacaccattgcacatctatttaatgtggaatggtgtgtgaatgcccgagtcaataattctgatccttattcagtagcactctctgaacttggagacaggcaaaatgaaagttatctcaattttgctcgaaagagaataaagaaccctgaaggaggcctgtacctggctgtgaccctgttggcaggcatcactggagttgtcatcacgctgtgcctcatattaattatcacttcctccaccaaaaccatccggaggtcttactttgaagtcttttggtacacacatcatctctttgtgatcttcttcattggccttgccatccatggagctgaacgaattgtacgtgggcagaccgcagagagtttggctgtgcataatataacagtttgtgaacaaaaaatctcagaatggggaaaaataaaggaatgcccaatccctcagtttgctggaaaccctcctatgacttggaaatggatagtgggtcccatgtttctgtatctctgtgagaggttggtgcggttttggcgatctcaacagaaggtggtcatcaccaaggtggtcactcaccctttcaaaaccatcgagctacagatgaagaagaaggggttcaaaatggaagtgggacaatacatttttgtcaagtgcccaaaggtgtccaagctggagtggcacccttttacactgacatccgcccctgaggaagacttctttagtatccatatccgcatcgttggggactggacagaggggctgttcaatgcttgtggctgtgataagcaggagtttcaagatgcgtggaaactacctaagatagcggttgatgggccctttggcactgccagtgaagatgtgttcagctatgaggtggtgatgttagtgggagcagggattggggtcacacccttcgcatccattctcaagtcagtctggtacaaatattgcaataacgccaccaatctgaagctcaaaaagatctacttctactggctgtgccgggacacacatgcctttgagtggtttgcagatctgctgcaactgctggagagccagatgcaggaaaggaacaatgccggcttcctcagctacaacatctacctcactggctgggatgagtctcaggccaatcactttgctgtgcaccatgatgaggagaaagatgtgatcacaggcctgaaacaaaagactttgtatggacggcccaactgggataatgaattcaagacaattgcaagtcaacaccctaataccagaataggagttttcctctgtggacctgaagccttggctgaaaccctgagtaaacaaagcatctccaactctgagtctggccctcggggagtgcatttcattttcaacaaggaaaacttctaacttgtctcttccatgaggaaataaatgtgggttgtgctgccaaatgctcaaataatgctaattgataatataaataccccctgcttaaaaatggacaaaaagaaactataatgtaatggttttcccttaaaggaatgtcaaagattgtttgatagtgataagttacatttatgtggagctctatggttttgagagcacttttacaaacattatttcatttttttcctctcagtaatgtcagtggaagttagggaaaagattcttggactcaattttagaatcaaaagggaaaggatcaaaaggttcagtaacttccctaagattatgaaactgtgaccagatctagcccatcttactccaggtttgatactctttccacaatactgagctgcctcagaatcctcaaaatcagtttttatattccccaaaagaagaaggaaaccaaggagtagctatatatttctactttgtgtcatttttgccatcattattatcatactgaaggaaattttccagatcattaggacataatacatgttgagagtgtctcaacacttattagtgacagtattgacatctgagcatactccagtttactaatacagcagggtaactgggccagatgttctttctacagaagaatattggattgattggagttaatgtaatactcatcatttaccactgtgcttggcagagagcggatactcaagtaagttttgttaaatgaatgaatgaatttagaaccacacaatgccaagatagaattaatttaaagccttaaacaaaatttatctaaagaaataacttctattactgtcatagaccaaaggaatctgattctccctagggtcaagaacaggctaaggatactaaccaataggattgcctgaagggttctgcacattcttatttgaagcatgaaaaaagagggttggaggtggagaattaacctcctgccatgactctggctcatctagtcctgctccttgtgctataaaataaatgcagactaatttcctgcccaaagtggtcttctccagctagcccttatgaatattgaacttaggaattgtgacaaatatgtatctgatatggtcatttgttttaaataacacccaccccttattttccgtaaatacacacacaaaatggatcgcatctgtgtgactaatggtttatttgtattatatcatcatcatcatcctaaaattaacaacccagaaacaaaaatctctatacagagatcaaattcacactcaatagtatgttctgaatatatgttcaagagagagtctctaaatcactgttagtgtggccaagagcagggttttctttttgttcttagaactgctcccatttctgggaactaaaaccagttttatttgccccaccccttggagccacaaatgtttagaactcttcaacttcggtaatgaggaagaaggagaaagagctgggggaagggcagaagactggtttaggaggaaaaggaaataaggagaaaagagaatgggagagtgagagaaaataaaaaaggcaaaagggagagagaggggaagggggtctcatattggtcattccctgccccagatttcttaaagtttgatatgtatagaatataattgaaggaggtatacacatattgatgttgttttgattatctatggtattgaatcttttaaaatctggtcacaaattttgatgctgagggggattattcaagggactaggatgaactaaataagaactcagttgttctttgtcatactactattcctttcgtctcccagaatcctcagggcactgagggtaggtctgacaaataaggcctgctgtgcgaatatagcctttctgaaatgtaccaggatggtttctgcttagagacacttaggtccagcctgttcacactgcacctcaggtatcaattcatctattcaacagatatttattgtgttattactatgagtcaggctctgtttattgtttcaattctttacaccaaagtatgaactggagagggtacctcagttataaggagtctgagaatattggccctttctaacctatgtgcataattaaaaccagcttcatttgttgctccgagagtgtttctccaaggttttctatcttcaaaaccaactaagttatgaaagtagagagatctgccctgtgttatccagttatgagataaaaaatgaatataagagtgcttgtcattataaaagtttccttttttattctctcaagccaccagctgccagccaccagcagccagctgccagcctagcttttttttttttttttttttttagcacttagtatttagcatttattaacaggtactctaagaatgatgaagcattgtttttaatcttaagactatgaaggtttttcttagttcttctgcttttgcaattgtgtttgtgaaatttgaatacttgcaggctttgtatgtgaataattctagcgggggacctgggagataattcctacggggaattcttaaaactgtgctcaactattaaaatgaatgagctttcaaaaaaacctcgtgccg

SEQ ID NO: 586728 - DNA, 145 bp, Homo sapiens
ctccataatgtgtgccacttctatctcgctgtagccaccaccgctgcttctgtctccaccatagccacccccacttctgtctccaccatagcctgcctcggtctccacctctgcccccacgacctctgggcacacattataggag

SEQ ID NO: 586729 - DNA, 486 bp, Homo sapiens
ctctacaggatccttattacgccccaaactcggtgctccgtctcaaccagagaagttacaggctccagtgctacagcaggcaccatcattcacaacagtcccaatacaacaagcccaaaagagcagtcctggtgtgtaccaacaagtcagagaaatgggggcagggcatatactgtacatgcacaaaccatatggagggttagaagggggagggggtgtcctcattcaacttcaccacataactctttgccctgcagggagcgaacatcaccgatcatacagaccgtgaaaacacacgggagggtaggcccctttaatgtatctccggcatcaagcatttctggaaagggattaacgagtggaggaacaattcttagacgggaagaggggaaagccgaaagaagggaagaggagaagccggaaggaggaggaatgttctaaatgttcaaagaaaagggaccgcgatttgaaaccgaactttaagct

SEQ ID NO: 586730 - DNA, 853 bp, Homo sapiens
cttcctctgccaccatggggaactgggctgtgaatgaggggctctccatttttgtcattctggtttggctggggttgaacgtcttcctctttgtctggtattaccgggtttatgatattccacctaagttcttttacacaagaaaacttcttgggtcagcactggcactggccagggcccctgcagcctgcctgaatttcaactgcatgctgattctcttgccagtctgtcgaaatctgctgtccttcctcaggggttccagtgcgtgctgctcaacaagagttcgaagacaactggacaggaatctcacctttcataaaatggtggcatggatgattgcacttcactctgcgattcacaccattgcacatctatttaatgtggaatggtgtgtgaatgcccgagtcaataattctgatccttattcagtagcactctctgaacttggagacaggcaaaatgaaagttatctcaattttgctcgaaagagaataaagaaccctgaaggaggcctgtacctggctgtgaccctgttggcaggcatcactggagttgtcatcacgctgtgcctcatattaattatcacttcctccaccaaaaccatccggaggtcttactttgaaggcctcggggcccctaatccttgggagcgcctcaagggccgcgaacagggggggccacagtccgggcgacgcgccaaaggcgggccaaaaaacggcgcgaacacccggggggcggaccccacgaggggaccccccacgtgaggaacgcgcccccctattcacaagaggcggcgccccagaagcggcccaccgccacagaacagggccagtgcaccgtacctccacacggg

SEQ ID NO: 586731 - DNA, 554 bp, Homo sapiens
aaaaacaaaccagttaagccagccatgtccctactgggctgtttgacttaaggaaaatgactgcttctctctgaacctcagtttcctcttttatcaaatagatataatgatacagtttgcagggtggtcatgaaaattaaatgagataatatgtatcaaatgtttgacacatagcaagctttcctgttaacaattactattccattctttcccccttaatccaaagtgctgctcaacaagagttcgaagacaactggacaggaatctcacctttcataaaatggtggcatggatgattgcacttcactctgcgattcacaccattgcacatctatttaatgtggaatggtgtgtgaatgcccgagtcaataattctgatccttattcagtagcactctctgaacttggagacaggcaaaatgaaagttatctcaattttgctcgaaagagaataaaggtaagcctctcattatctgacttagatattctctaggccattacaattgaggactagatttcagtgagtgaagacctctcctttgccaaaaaaaaaa

SEQ ID NO: 586732 - DNA, 337 bp, Homo sapiens
aagcacactgttgccctattgaatatgggaccaaaggaagcaaatgtgaaaagtaaatattacaaatccataactgaatatttactaaatacgtactgagagtcactgagcagcatggagggaaggagaataggtgattgagaactgtgaagtgtatacacaggatgaaaaatacttgctttcgaccctccaaggagttcactgttatttggagaacgactcttctctgaagctcatcctgaatgtgctcatgagatttcctcctgctctaacctagactgtcctcggaaacctgaatttgtagaatagcctctactccatttttgttttttctttt

SEQ ID NO: 586733 - DNA, 546 bp, Homo sapiens
atcttataacttgattgagtctttaggagcatatagctcaacatcttcatctacaaaattaggaaaccaagaccagagagttaagtcattttcccacaattacacaactagagaggatcttacccactagaattgccttgtctccttggttctggagacccagttcttgtctataagtgtcctgggcctccctttgtctccctgtggcttatcatagagtcagaggctgtcccagaaacccagcttacaataaatttgttcatacccttcattctctttgtttctcttctctgcccttttcagcgattcacaccattgcacatctatttaatgtggaatggtgtgtgaatgcccgagtcaataattctgatccttattcagtagcactctctgaacttggagacaggcaaaatgaaagttatctcaattttgctcgaaagagaataaaggtaagcctctcattatctgacttagatattctctaggccattacaattgaggactagatttcagtgagtgaagacctctcctttgccaaaaaaaaaa

SEQ ID NO: 586734 - DNA, 560 bp, Homo sapiens
  misc_feature (35)..(35): n is a, c, g, or t
  misc_feature (280)..(280): n is a, c, g, or t
  misc_feature (482)..(482): n is a, c, g, or t
  misc_feature (544)..(544): n is a, c, g, or t
  misc_feature (557)..(557): n is a, c, g, or t
tcgagatctggtggtcgttaggggtcacatttggntggtgccatgaccatgtattacagaatctcaacttcttcggagttgcctgggagtctttgagtaaacctaagctcccactgacatacacctgtaaagagaaatccccagtgttgctggaggccctttggaagattccctacttggtctggaacttgtggcccagggtggattaacagagtatttatattgtcagtcattcccaagcaagtttcctgtgcccaggtggctgcacacctgcggacangagggagggtttccttatcctgtcgattaaaaagtgggcttgcttgttatatatctgtgactagattaagaagaaactttgtcataagcgtccatagcaaagggaaagcaagactgtgattgtgatcatagattggctcttaatttctgccctaggtaagacacaaaaagggtccatagccatctctctttgctaggatggnttgagcagctactcaggtgacagcttgacttttatactgagaggaaagatgagtgaactctnttagctctttagntgg

SEQ ID NO: 586735 - DNA, 362 bp, Homo sapiens
tatccagatgctcacacaaacaggctgaaccacactccctctgagcaatatgatccctttgctatttgtggaaaagaaaaaggagcagaggggctctgccctggggcctcaaattaacgggaaattcacctacctgctttgtagacatctcatcccaaagcttgaaattgtctttttttttctttcccaaaagtaccagaataggagttttcctctgtggacctgaagccttggctgaaaccctgagtaaacaaagcatctccaactctgagtctggccctcggggagtgcatttcattttcaacaaggaaaacttctaacttgtctcttccatgaggaaataaatgtgggttgtgctgcca

SEQ ID NO: 586736 - DNA, 141 bp, Homo sapiens
ggcacgaggcggcggcgatgggcaagtcgtccggtttgtttgtggtggtggtggtggtttttgggagatgggagtctcgccctgggtggcccagtacggaatgggcaaaggcgccgatctcaactgcaccggcaacgctcg

SEQ ID NO: 586737 - DNA, 299 bp, Homo sapiens
  misc_feature (9)..(9): n is a, c, g, or t
  misc_feature (291)..(291): n is a, c, g, or t
tggaattcncatggtaatgctgatagggcctgccaaatataatctgcttcatgatccaccccattttcagatctacttctactggctgtgccgggacacacatgcctttgagtggtttgcagatctgctgcaactgctggagagccagatgcaggaaaggaacaatgccggcttcctcagctacaacatctacctcactggctgggatgagtctcaggtaaggacaagactccaaggctcaggtccttcccatagtgtacagggcttacgaacttccccttggttattggngtgtcttg

SEQ ID NO: 586738 - DNA, 4411 bp, Homo sapiens
cttcctctgccaccatggggaactgggctgtgaatgaggggctctccatttttgtcattctggtttggctggggttgaacgtcttcctctttgtctggtattaccgggtttatgatattccacctaagttcttttacacaagaaaacttcttgggtcagcactggcactggccagggcccctgcagcctgcctgaatttcaactgcatgctgattctcttgccagtctgtcgaaatctgctgtccttcctcaggggttccagtgcgctttctcctggggcaagcctgaaatcccaggggattgatgtcctgagagcatccctcagagcagccctcagccaatcatggatggcagttggtggttgaacacccaagcttcttaacccgttagtgctgctcaacaagagttcgaagacaactggacaggaatctcacctttcataaaatggtggcatggatgattgcacttcactctgcgattcacaccattgcacatctatttaatgtggaatggtgtgtgaatgcccgagtcaataattctgatccttattcagtagcactctctgaacttggagacaggcaaaatgaaagttatctcaattttgctcgaaagagaataaagaaccctgaaggaggcctgtacctggctgtgaccctgttggcaggcatcactggagttgtcatcacgctgtgcctcatattaattatcacttcctccaccaaaaccatccggaggtcttactttgaagtcttttggtacacacatcatctctttgtgatcttcttcattggccttgccatccatggagctgaacgaattgtacgtgggcagaccgcagagagtttggctgtgcataatataacagtttgtgaacaaaaaatctcagaatggggaaaaataaaggaatgcccaatccctcagtttgctggaaaccctcctatgacttggaaatggatagtgggtcccatgtttctgtatctctgtgagaggttggtgcggttttggcgatctcaacagaaggtggtcatcaccaaggtggtcactcaccctttcaaaaccatcgagctacagatgaagaagaaggggttcaaaatggaagtgggacaatacatttttgtcaagtgcccaaaggtgtccaagctggagtggcacccttttacactgacatccgcccctgaggaagacttctttagtatccatatccgcatcgttggggactggacagaggggctgttcaatgcttgtggctgtgataagcaggagtttcaagatgcgtggaaactacctaagatagcggttgatgggccctttggcactgccagtgaagatgtgttcagctatgaggtggtgatgttagtgggagcagggattggggtcacacccttcgcatccattctcaagtcagtctggtacaaatattgcaataacgccaccaatctgaagctcaaaaagatctacttctactggctgtgccgggacacacatgcctttgagtggtttgcagatctgctgcaactgctggagagccagatgcaggaaaggaacaatgccggcttcctcagctacaacatctacctcactggctgggatgagtctcaggccaatcactttgctgtgcaccatgatgaggagaaagatgtgatcacaggcctgaaacaaaagactttgtatggacggcccaactgggataatgaattcaagacaattgcaagtcaacaccctaataccagaataggagttttcctctgtggacctgaagccttggctgaaaccctgagtaaacaaagcatctccaactctgagtctggccctcggggagtgcatttcattttcaacaaggaaaacttctaacttgtctcttccatgaggaaataaatgtgggttgtgctgccaaatgctcaaataatgctaattgataatataaataccccctgcttaaaaatggacaaaaagaaactataatgtaatggttttcccttaaaggaatgtcaaagattgtttgatagtgataagttacatttatgtggagctctatggttttgagagcacttttacaaacattatttcatttttttcctctcagtaatgtcagtggaagttagggaaaagattcttggactcaattttagaatcaaaagggaaaggatcaaaaggttcagtaacttccctaagattatgaaactgtgaccagatctagcccatcttactccaggtttgatactctttccacaatactgagctgcctcagaatcctcaaaatcagtttttatattccccaaaagaagaaggaaaccaaggagtagctatatatttctactttgtgtcatttttgccatcattattatcatactgaaggaaattttccagatcattaggacataatacatgttgagagtgtctcaacacttattagtgacagtattgacatctgagcatactccagtttactaatacagcagggtaactgggccagatgttctttctacagaagaatattggattgattggagttaatgtaatactcatcatttaccactgtgcttggcagagagcggatactcaagtaagttttgttaaatgaatgaatgaatttagaaccacacaatgccaagatagaattaatttaaagccttaaacaaaatttatctaaagaaataacttctattactgtcatagaccaaaggaatctgattctccctagggtcaagaacaggctaaggatactaaccaataggattgcctgaagggttctgcacattcttatttgaagcatgaaaaaagagggttggaggtggagaattaacctcctgccatgactctggctcatctagtcctgctccttgtgctataaaataaatgcagactaatttcctgcccaaagtggtcttctccagctagcccttatgaatattgaacttaggaattgtgacaaatatgtatctgatatggtcatttgttttaaataacacccaccccttattttccgtaaatacacacacaaaatggatcgcatctgtgtgactaatggtttatttgtattatatcatcatcatcatcctaaaattaacaacccagaaacaaaaatctctatacagagatcaaattcacactcaatagtatgttctgaatatatgttcaagagagagtctctaaatcactgttagtgtggccaagagcagggttttctttttgttcttagaactgctcccatttctgggaactaaaaccagttttatttgccccaccccttggagccacaaatgtttagaactcttcaacttcggtaatgaggaagaaggagaaagagctgggggaagggcagaagactggtttaggaggaaaaggaaataaggagaaaagagaatgggagagtgagagaaaataaaaaaggcaaaagggagagagaggggaagggggtctcatattggtcattccctgccccagatttcttaaagtttgatatgtatagaatataattgaaggaggtatacacatattgatgttgttttgattatctatggtattgaatcttttaaaatctggtcacaaattttgatgctgagggggattattcaagggactaggatgaactaaataagaactcagttgttctttgtcatactactattcctttcgtctcccagaatcctcagggcactgagggtaggtctgacaaataaggcctgctgtgcgaatatagcctttctgaaatgtaccaggatggtttctgcttagagacacttaggtccagcctgttcacactgcacctcaggtatcaattcatctattcaacagatatttattgtgttattactatgagtcaggctctgtttattgtttcaattctttacaccaaagtatgaactggagagggtacctcagttataaggagtctgagaatattggccctttctaacctatgtgcataattaaaaccagcttcatttgttgctccgagagtgtttctccaaggttttctatcttcaaaaccaactaagttatgaaagtagagagatctgccctgtgttatccagttatgagataaaaaatgaatataagagtgcttgtcattataaaagtttccttttttattctctcaagccaccagctgccagccaccagcagccagctgccagcctagcttttttttttttttttttttttagcacttagtatttagcatttattaacaggtactctaagaatgatgaagcattgtttttaatcttaagactatgaaggtttttcttagttcttctgcttttgcaattgtgtttgtgaaatttgaatacttgcaggctttgtatgtgaataattctagcgggggacctgggagataattcctacggggaattcttaaaactgtgctcaactattaaaatgaatgagctttcaaaaaaacctcgtgccg

SEQ ID NO: 586739 - DNA, 844 bp, Homo sapiens
tccttcgtcgtctctcctcttaaattctttctatccatcatctgcccttttatcactttaagcctcttttttaaattttcaaacttaagagatatgcatactgaaaagtatataacatgtacgtacaatttaaacgaatacttttaacatgtgaatactacgtaactccatccaagtcaagaaatggccagcttctcggaagccccatgtgtctccttcccctacctgcaactcttccaggctcccttttccagccttcccctttttcccttttattttcatgcctgtgatttgacctgtgtgtggtgggacatgtgaaactatgaaaattaaacctgtggcccacccagagcagttggtgaccaagggtctgcctcaaaggggtttgtccacggcaggttggctcctctctgctgctgacccaagattctgaaccttccaggcacacggcagtcttctaaagaagggctccctgtgtgtgagcaaagaccacagttctccttctatttacagatggcatgagggttgcaacgagtctgcgctgtttaagaccttctggtcaggtgtattgtgtacactttgtgtataatagaaaagccccaaaaaaaaaaaaaaaacaaaacaaatgttggggccctgccctgaaatattaaaccaactcggtgggggcccgtgtaataacctgcaagggtcccaagaagcctggcagcagcgtgtttccaaaaaaccgggcggctcaaaccaggctgggcctggctcaggccactatcccctccgggagaaaaacgacagacaaggtgaacgctgtactacgacacagcgcacgacacacagcaacgaacag

SEQ ID NO: 586740 - DNA, 3698 bp, Homo sapiens
gggccttcctctctctatcaccaataattgtcttatgatttggtagttgctcaactagcatttattgaattgaaatgaatgggctctgagcaattcaagacgaattgtacgtgggcagaccgcagagagtttggctgtgcataatataacagtttgtgaacaaaaaatctcagaatggggaaaaataaaggaatgcccaatccctcagtttgctggaaaccctcctatgacttggaaatggatagtgggtcccatgtttctgtatctctgtgagaggttggtgcggttttggcgatctcaacagaaggtggtcatcaccaaggtggtcactcaccctttcaaaaccatcgagctacagatgaagaagaaggggttcaaaatggaagtgggacaatacatttttgtcaagtgcccaaaggtgtccaagctggagtggcacccttttacactgacatccgcccctgaggaagacttctttagtatccatatccgcatcgttggggactggacagaggggctgttcaatgcttgtggctgtgataagcaggagtttcaagatgcgtggaaactacctaagatagcggttgatgggccctttggcactgccagtgaagatgtgttcagctatgaggtggtgatgttagtgggagcagggattggggtcacacccttcgcatccattctcaagtcagtctggtacaaatattgcaataacgccaccaatctgaagctcaaaaagatctacttctactggctgtgccgggacacacatgcctttgagtggtttgcagatctgctgcaactgctggagagccagatgcaggaaaggaacaatgccggcttcctcagctacaacatctacctcactggctgggatgagtctcaggccaatcactttgctgtgcaccatgatgaggagaaagatgtgatcacaggcctgaaacaaaagactttgtatggacggcccaactgggataatgaattcaagacaattgcaagtcaacaccctaataccagaataggagttttcctctgtggacctgaagccttggctgaaaccctgagtaaacaaagcatctccaactctgagtctggccctcggggagtgcatttcattttcaacaaggaaaacttctaacttgtctcttccatgaggaaataaatgtgggttgtgctgccaaatgctcaaataatgctaattgataatataaataccccctgcttaaaaatggacaaaaagaaactataatgtaatggttttcccttaaaggaatgtcaaagattgtttgatagtgataagttacatttatgtggagctctatggttttgagagcacttttacaaacattatttcatttttttcctctcagtaatgtcagtggaagttagggaaaagattcttggactcaattttagaatcaaaagggaaaggatcaaaaggttcagtaacttccctaagattatgaaactgtgaccagatctagcccatcttactccaggtttgatactctttccacaatactgagctgcctcagaatcctcaaaatcagtttttatattccccaaaagaagaaggaaaccaaggagtagctatatatttctactttgtgtcatttttgccatcattattatcatactgaaggaaattttccagatcattaggacataatacatgttgagagtgtctcaacacttattagtgacagtattgacatctgagcatactccagtttactaatacagcagggtaactgggccagatgttctttctacagaagaatattggattgattggagttaatgtaatactcatcatttaccactgtgcttggcagagagcggatactcaagtaagttttgttaaatgaatgaatgaatttagaaccacacaatgccaagatagaattaatttaaagccttaaacaaaatttatctaaagaaataacttctattactgtcatagaccaaaggaatctgattctccctagggtcaagaacaggctaaggatactaaccaataggattgcctgaagggttctgcacattcttatttgaagcatgaaaaaagagggttggaggtggagaattaacctcctgccatgactctggctcatctagtcctgctccttgtgctataaaataaatgcagactaatttcctgcccaaagtggtcttctccagctagcccttatgaatattgaacttaggaattgtgacaaatatgtatctgatatggtcatttgttttaaataacacccaccccttattttccgtaaatacacacacaaaatggatcgcatctgtgtgactaatggtttatttgtattatatcatcatcatcatcctaaaattaacaacccagaaacaaaaatctctatacagagatcaaattcacactcaatagtatgttctgaatatatgttcaagagagagtctctaaatcactgttagtgtggccaagagcagggttttctttttgttcttagaactgctcccatttctgggaactaaaaccagttttatttgccccaccccttggagccacaaatgtttagaactcttcaacttcggtaatgaggaagaaggagaaagagctgggggaagggcagaagactggtttaggaggaaaaggaaataaggagaaaagagaatgggagagtgagagaaaataaaaaaggcaaaagggagagagaggggaagggggtctcatattggtcattccctgccccagatttcttaaagtttgatatgtatagaatataattgaaggaggtatacacatattgatgttgttttgattatctatggtattgaatcttttaaaatctggtcacaaattttgatgctgagggggattattcaagggactaggatgaactaaataagaactcagttgttctttgtcatactactattcctttcgtctcccagaatcctcagggcactgagggtaggtctgacaaataaggcctgctgtgcgaatatagcctttctgaaatgtaccaggatggtttctgcttagagacacttaggtccagcctgttcacactgcacctcaggtatcaattcatctattcaacagatatttattgtgttattactatgagtcaggctctgtttattgtttcaattctttacaccaaagtatgaactggagagggtacctcagttataaggagtctgagaatattggccctttctaacctatgtgcataattaaaaccagcttcatttgttgctccgagagtgtttctccaaggttttctatcttcaaaaccaactaagttatgaaagtagagagatctgccctgtgttatccagttatgagataaaaaatgaatataagagtgcttgtcattataaaagtttccttttttattctctcaagccaccagctgccagccaccagcagccagctgccagcctagcttttttttttttttttttttttagcacttagtatttagcatttattaacaggtactctaagaatgatgaagcattgtttttaatcttaagactatgaaggtttttcttagttcttctgcttttgcaattgtgtttgtgaaatttgaatacttgcaggctttgtatgtgaataattctagcgggggacctgggagataattcctacggggaattcttaaaactgtgctcaactattaaaatgaatgagctttcaaaaaaacctcgtgccg

SEQ ID NO: 586741 - DNA, 156 bp, Homo sapiens
agctcgactctgaggatcccttcgattggcgggcacttatgcacgcttactatctaacaagtttgagtgcaagattgaagagttcaatctacccagatgttgatgttggataagagaattctctgctccccacctcttagttggccgccaatcgaa

SEQ ID NO: 586742 - DNA, 3656 bp, Homo sapiens
gccatccatggagctgaacgaattgtacgtgggtctggacttacatttttcacccagacgaattgtacgtgggcagaccgcagagagtttggctgtgcataatataacagtttgtgaacaaaaaatctcagaatggggaaaaataaaggaatgcccaatccctcagtttgctggaaaccctcctatgacttggaaatggatagtgggtcccatgtttctgtatctctgtgagaggttggtgcggttttggcgatctcaacagaaggtggtcatcaccaaggtggtcactcaccctttcaaaaccatcgagctacagatgaagaagaaggggttcaaaatggaagtgggacaatacatttttgtcaagtgcccaaaggtgtccaagctggagtggcacccttttacactgacatccgcccctgaggaagacttctttagtatccatatccgcatcgttggggactggacagaggggctgttcaatgcttgtggctgtgataagcaggagtttcaagatgcgtggaaactacctaagatagcggttgatgggccctttggcactgccagtgaagatgtgttcagctatgaggtggtgatgttagtgggagcagggattggggtcacacccttcgcatccattctcaagtcagtctggtacaaatattgcaataacgccaccaatctgaagctcaaaaagatctacttctactggctgtgccgggacacacatgcctttgagtggtttgcagatctgctgcaactgctggagagccagatgcaggaaaggaacaatgccggcttcctcagctacaacatctacctcactggctgggatgagtctcaggccaatcactttgctgtgcaccatgatgaggagaaagatgtgatcacaggcctgaaacaaaagactttgtatggacggcccaactgggataatgaattcaagacaattgcaagtcaacaccctaataccagaataggagttttcctctgtggacctgaagccttggctgaaaccctgagtaaacaaagcatctccaactctgagtctggccctcggggagtgcatttcattttcaacaaggaaaacttctaacttgtctcttccatgaggaaataaatgtgggttgtgctgccaaatgctcaaataatgctaattgataatataaataccccctgcttaaaaatggacaaaaagaaactataatgtaatggttttcccttaaaggaatgtcaaagattgtttgatagtgataagttacatttatgtggagctctatggttttgagagcacttttacaaacattatttcatttttttcctctcagtaatgtcagtggaagttagggaaaagattcttggactcaattttagaatcaaaagggaaaggatcaaaaggttcagtaacttccctaagattatgaaactgtgaccagatctagcccatcttactccaggtttgatactctttccacaatactgagctgcctcagaatcctcaaaatcagtttttatattccccaaaagaagaaggaaaccaaggagtagctatatatttctactttgtgtcatttttgccatcattattatcatactgaaggaaattttccagatcattaggacataatacatgttgagagtgtctcaacacttattagtgacagtattgacatctgagcatactccagtttactaatacagcagggtaactgggccagatgttctttctacagaagaatattggattgattggagttaatgtaatactcatcatttaccactgtgcttggcagagagcggatactcaagtaagttttgttaaatgaatgaatgaatttagaaccacacaatgccaagatagaattaatttaaagccttaaacaaaatttatctaaagaaataacttctattactgtcatagaccaaaggaatctgattctccctagggtcaagaacaggctaaggatactaaccaataggattgcctgaagggttctgcacattcttatttgaagcatgaaaaaagagggttggaggtggagaattaacctcctgccatgactctggctcatctagtcctgctccttgtgctataaaataaatgcagactaatttcctgcccaaagtggtcttctccagctagcccttatgaatattgaacttaggaattgtgacaaatatgtatctgatatggtcatttgttttaaataacacccaccccttattttccgtaaatacacacacaaaatggatcgcatctgtgtgactaatggtttatttgtattatatcatcatcatcatcctaaaattaacaacccagaaacaaaaatctctatacagagatcaaattcacactcaatagtatgttctgaatatatgttcaagagagagtctctaaatcactgttagtgtggccaagagcagggttttctttttgttcttagaactgctcccatttctgggaactaaaaccagttttatttgccccaccccttggagccacaaatgtttagaactcttcaacttcggtaatgaggaagaaggagaaagagctgggggaagggcagaagactggtttaggaggaaaaggaaataaggagaaaagagaatgggagagtgagagaaaataaaaaaggcaaaagggagagagaggggaagggggtctcatattggtcattccctgccccagatttcttaaagtttgatatgtatagaatataattgaaggaggtatacacatattgatgttgttttgattatctatggtattgaatcttttaaaatctggtcacaaattttgatgctgagggggattattcaagggactaggatgaactaaataagaactcagttgttctttgtcatactactattcctttcgtctcccagaatcctcagggcactgagggtaggtctgacaaataaggcctgctgtgcgaatatagcctttctgaaatgtaccaggatggtttctgcttagagacacttaggtccagcctgttcacactgcacctcaggtatcaattcatctattcaacagatatttattgtgttattactatgagtcaggctctgtttattgtttcaattctttacaccaaagtatgaactggagagggtacctcagttataaggagtctgagaatattggccctttctaacctatgtgcataattaaaaccagcttcatttgttgctccgagagtgtttctccaaggttttctatcttcaaaaccaactaagttatgaaagtagagagatctgccctgtgttatccagttatgagataaaaaatgaatataagagtgcttgtcattataaaagtttccttttttattctctcaagccaccagctgccagccaccagcagccagctgccagcctagcttttttttttttttttttttttagcacttagtatttagcatttattaacaggtactctaagaatgatgaagcattgtttttaatcttaagactatgaaggtttttcttagttcttctgcttttgcaattgtgtttgtgaaatttgaatacttgcaggctttgtatgtgaataattctagcgggggacctgggagataattcctacggggaattcttaaaactgtgctcaactattaaaatgaatgagctttcaaaaaaacctcgtgccg

SEQ ID NO: 586743 - DNA, 128 bp, Homo sapiens
  misc_feature (86)..(86): n is a, c, g, or t
atggttgctgagatgagtgagtgatgtgctcgatggagccacagggcagtgtgtgtagtcgtaggtgggatagatgcacctgtggngcataggcagcgggccctaccatccagccctactctgcccta

SEQ ID NO: 586744 - DNA, 192 bp, Homo sapiens
tctgtcgcaagtcacctcgtcgctgttggagcgacggagtacacgtgtggtttcgcacttccctaaataattcttcggggttataggtccgtctgagcaccgaaggttggatgggctccttcttggcgctgagaacgccaaactcgatgggtttaatatcgatggaagaggtcagcgtagtggtcctcctcg

SEQ ID NO: 586745 - DNA, 564 bp, Homo sapiens
agcggctgaagcaggagaatcgcttgaacccgggaaagggagattgcagtaaaccaagatcgtaccaccacactccatgcttggatgacagagcgagactctgtctcaaaaaaaaaaaaaaatccattgtgacaatggtattgatcccacttatatgaggtacttagaatagttaaatttcacagagacagaaagtagaacagtggttatcagaggccaaggggaatggaggagctgctcacggcgaagtaatggcttcaagaagttacagagtttccagttggggaatgatacaaaaattctggaagcctggtgtgggaagtgactgattgcacaacagttgtgaatgtacttaattgccacttgaactttacacctaaaatgggttaaacagtaaaattctatgtcaaatatacttataccataataacatttttaaaaattggatggggaacatatacattttggcaagtgggaatacgttgcaacgtggtatggtaaattggtccaaaccaccttgggtacttggctcatttgggttgagggagattagagggaagaatc

SEQ ID NO: 586746 - DNA, 1159 bp, Homo sapiens
  misc_feature (897)..(897): n is a, c, g, or t
ttcccctcaccaactaaaggtcttaagggccctgtctaagaggcacgatcgccaacttccagagccgaggtataggctacttctatgtgtcccatggtatctgccacagataacgagtctcgagctctctccaggtattcagttctgaagcgtcagtgcctgaagcatgaaacagagtggcagtgtaactccaaaattacctcttcgaaatctaagcgaaggtgccctagtcgaagtaccaactatcttgcaggtcccgatggtactccattgtcttgccccatgatgcggaacacactgtactagcttctgcgctctagaagatagcccacggtgcatacgtgacttggcgtccctgccagttgtacgagtgcttcgttggcttggatgccgacaataactctagcttggatttgctgcgcgtgctagctttattcaaccgccagccgattgttcacgcgccgaagcacagactccaactctccctgcgtgcgcacggcccttggcggcgaggaagctcgcatggcgcatgtcgcccggcgaggggcttgccaccgctccactgacgacgcctccgtcgaccgccgtggtagactcactgcgccgcccgcggtcccccttgcgctctgtctccctgaccttgcgctccaccttggtgaacgcttgcgccccgcggcacgcagcggcgcccccaagctcgccgaccactggggccctcccaactatcccagcacgggtcgggacctacggcgggtatgcgcgcgcccggcactcagtgcgacctggaacatcaagttgccgcttatcctctttgccaaaggcacctccacacatgttacccccactaatggcctgtttctctaaacacggcccgcgaaaacacacttcgcctgcctngtgttaccttcaaacgttgacgcccaacaagcgttcccaactgtggcatcaacccccccgaagcaccataccccccttgggctatcattccccctcctcttaccaggctcggaggaatgcttggattacacttattgcctctaggctcgtccccttaaatggctgtctgcgctcgcatatcggcgcgtagaggcgtacccttctgggttcaaacggtcggttccccggtcttcgagggagggccagcggcggggacgacgcc

SEQ ID NO: 586747 - DNA, 153 bp, Homo sapiens
  misc_feature (63)..(63): n is a, c, g, or t
agcagcaatgtaaaaacaaacacacacagtttttttttctttgagatggagttgcactctcgntggcccaagctggagtgcagtagtatgatcatagctagctgtaacctcaaacaatttttctgcctcagcctcctgagtagctgggactac

SEQ ID NO: 586748 - DNA, 204 bp, Homo sapiens
ctgttccccctaaaaatcatcaggaattagattctcataaggaatatgcaacctggatccctcgtgtgtgcaattcacaacagggttcatgctcctgtaataatctaatgatgctgcattaactgacaggaggcagagctcatgctggattatgccatacttttattttagggattattttctatgctatatttttactttaag

SEQ ID NO: 586749 - DNA, 285 bp, Homo sapiens
  misc_feature (41)..(41): n is a, c, g, or t
ggatttttttgggggggccccccccagggcgccccccgganattttttggaggccccgttttttcccccccccctgggggggcctctcctttgggagggccaggttttccatttggcccctggggggggggtttttgtggttgaacttttttttttccgtttgcccccgcccccccgggggggcctaggccccttgggcctcccctccccccccagagtcctttttccccctgggttttttttttttaaaacagttctgggaattttcccataaactgacaatta

SEQ ID NO: 586750 - DNA, 400 bp, Homo sapiens
gtcgacttcaaattgatgttatgtccggcatcgatgcgactacctaacacattcaaagtgctgtccttgcctgcacccgaagcggtgacgttgacatcaccacctgccgccacgtactgtgacactacgttctggccggattgactgctttcagtgtggctttcgctgttgctcaagttgacgctgaccttgaacccgcccatgccgccattcatcagcgtctggccggcttcataggcctgcttgccactcatggcggcgttggcagccggagcccctgcatccgaggatcgatgttttctcgctggactgaacagcctgctgaactccacgaaccgcatcgaccaacggaatatcaatgctgccgccaaccgctgtacggttggagctcgccgtgtga

SEQ ID NO: 586751 - DNA, 785 bp, Homo sapiens
taaaaagaaacccatggtttgtgtaagtgtttaatttaccttttggtctatgggtctcttggccagccctcccttttcccaatggaaagccatgtcaaattaaattcacgggatggacggctctcatcttttaattttacaatgaagggtgtccccagggttgtaaagcaataagattggagatgaacactatggaaactctcgcttttggctaaacaaatagcaggtgcgattagtatctcaacacccacatagaaggattttagttcaaaatgatggctccttctctaccggggactctttaaaaacactcaactggtcatctaatatgagtcaatttggctctatagacccacgtttcatggtctaacaaaaatctcatgactttaaacttccaccgatgaggcgggtaggacgatacagatgagtctgaccggtgcctaacaagtcctcattttttaaccttgtcgggcgggggggcagtggggtccctgacctattggagggtatgggctcccttcacattgccaccccgtggttctccccaagagaccggggagccaaggaaaccttatatcgtgggacaggcttggggagccacaaacagaagatacaacaacaacattggggcgccgcgggccacaaaagcttcgacacacggtgggcggcggaccaaagggaggtacgactgcccagggcccaagactggccgacatgtcgccccccaagaaccgggcaccgcttgaccccaacgccgggcaaggctaacagcaggctataacggg

SEQ ID NO: 586752 - DNA, 152 bp, Homo sapiens
gtgggaacaccatgtaaataatcaagaatgatgagaggagggaaggggccagtgaaggaatgcatgagaggtaacgctcgctgagggaggaggtgagtcatgagtgaagtggcgcagcgaggacctccagcaaccatgcatgtctaggaggc

SEQ ID NO: 586753 - DNA, 766 bp, Homo sapiens
ttaatgcgccgtatattggagttgagaagtttcagatgactctcgctctgtgaaagaacaaagtccatgatgatgatgacatagacggtcagaggtacatgctatatgtagatgtagtcatatattagtgtcagaccatttcaatataggtcaaacagtattgcagtcatctatcaagagctggaaaaagtcaaatatgtattatcctgtagagctctttgagagagtacagtggagtcaacaatgtgatgtcagtcttctggtatctcaggctagatgaagatactcgtttatcacattcaacgctgtgttaaatccttgcaagtcatcatcctgcatgtggtgttattcgcacagaggtgcacatacaatgtgttatccaaggtatctacaaatacctacttagcagggactgggagatggaaggtgtgttcagtgtggtgggtgtggcactacttgagtctcgccagtacagagagtcagttatccagtatttgtcgagccaattttattatcaattgagcaggagaggagttcatgtgtgcttatctcttttatggtgttgggtttttttacataataaagaacggttatctaagtgttctctcttcacatgtgggcagcttcacatttttcggtctttttttaaaatcctttctttgtgaaaaaagtagcgccatggcatttccgatgggatagagctgctgtgttctactttctgagatgcactatgaacaatgatcttgtaacccatctctgttattac

SEQ ID NO: 586754 - DNA, 197 bp, Homo sapiens
agcttacggcaggctattggttgaatagagtaggctgatggtttcgataataactagtattggggataacggggtgtaggtgttgcccttgtggttaggaaagttgggcttaagggccattttttaatccttaatgagctgaaatgccttataaattcacttgcggcccccggttccataaaatggtgggggcaatt

SEQ ID NO: 586755 - DNA, 160 bp, Homo sapiens
attacaagcgtgagccaaccacgtgtgcccagtccctgagttcaatttgccgtgtaacgttcgaatatgctgcttgttacttattaccctttaagtgcttgcttacttatcatctgataattacgtttcattctactctgtgatttctttaacaaaatca

SEQ ID NO: 586756 - DNA, 192 bp, Homo sapiens
gccatataaacgataataggagtgcagcacgttgctcacgtgccgacggaacttgtacagggaggcatgcaccgcagtggtgaatacacgtcgaccaggctgcatgtaaacgatatttggaggtgagcacggatctcacgtagcgacggtacttgtatagggaggcatgcaccgcagtggtgaatacacgtg

SEQ ID NO: 586757 - DNA, 719 bp, Homo sapiens
gggagagcctggccctgtcctttgctacccagggctgccccaggcccatgaagccaataggagagcgtgtggcactggcccacaaactgtccctgtcctgtcttcctcccgagccaagtggcctcgtgctagctccaccttgaaggagccccccaatcctccccctacatcccagagatgcccaccaattgtgtctccacaatgtgctcttgcccaaccggggttccgcactgttccgacccctgcacaccactcatgtcaaccactgggtgcatcaatgttcaatccccatctatttatttaaggcctttctttgcttgtagggcatttggtatgtagagcagttgaaaaccagaacctcagaacttaaccatcttgtcctgatgtcaaaagtgcttttcatgaccaccccggtatctatgtactatgtacagtcaagggatgagatcttaagtttaccaattaaaaactcagtactcaatatttactattctactcgagccttcaggggaagcccaaatcatgtgtgcatgtgtggtgtgtgccgtgtggtgccagctttggaacctccttccaacagccggatcttctcattgacacaagagctttggataagtacattcctggtgggtcgctcagagccttcatagactctcattcattggaagaatagaggcagacagggggcatgctgagtcccagtactggaagtgaggcga

SEQ ID NO: 586758 - DNA, 106 bp, Homo sapiens
agcaggtgggcgcccctagacgtcttctactctactatctccatcagttcggtcattttacttttgagctcccccacagtgatagagcatgtgaagtttgtctttc

SEQ ID NO: 586759 - DNA, 283 bp, Homo sapiens
ctgatatccgtgaggagggaaagaaagaaaagaaagagaacacaaatcaaatgggatcgtggcaaacttttgccaaggtttgagttgaaggtgggtagtggagcatggaaagaaaaacccacaggcagcactatgacagagtagtcctgcacaacgatgggtgcccttggcagatcatgtttgcttcctgctagtttgctagtctcgccaccatcttcccattcacaggatcagcaaaagtgattcagacatgggatccaccatttccctccccgggatacag

SEQ ID NO: 586760 - DNA, 1028 bp, Homo sapiens
ttctgttgtctttctgtctctctttcgcgtgctactttctcggtgtcgctgcttccgtgtgcttgtttttctgtgtaatgtggtcgcgtcttgatctgtctcctccttgtgtcgtatcctttcgtatgttccatggttctttccaatgtttcggtttgatacccagtgtcggtccgttcgttgggtggtaccaagtacgctctttactatcaccttatgcctatgcttgctgtctacctttgtctagcttcttgtatctcatgctctttgtgtgtccctgcgggctcaattgtagtcttaggatgattggctctcatcatgtgcactgtctctgtttctctctcagtccatcccctgattgtgctgccctctctgcctcttgggacatcgccgacttcatctaatgatggcttggatggctgcagatagtggactcccaggtgtgccgccttacgacacaagcccctcatctatgactacgagggtgacaggctcggtggtcggggacgctgagctccatcctgtccagccagggcgatgaggtatccaggacttacgactacctcagagactgtggtgccccgcttcgcctcggctggcagacatgtatgggcacccgtgcgggttggagtacggggccagatgggaccaccaggccagggagggtctttcacactggggcactgctacccagacacagaggccggacagcctgaccctggggcgcaactggacatgccactccccggcctcgtggcagtgatggccccatgcagaggcagcactgaggtcacacgggcccgaccccacctgggcactggggcagcctccgttcctgtaggcgagggccacaagtctgggggcagaacactgagtgtggatggggcggcacaggaagaggccaccattcctgcacggggtgggaagagtttctctcaatcggcccaatgcaggtcacactccactagtcccacacgttgcctcactagccagtgacctatcattacacggggcacacttcttgtagt

SEQ ID NO: 586761 - DNA, 240 bp, Homo sapiens
ccctggccaggctctctaagctaatggtcgggagcctctctcctctgcccgggcttcctccatggagccacctacagccatttcccaagtgaggggcacggtccggcctcggcgggggttctacgaagggccttcctaaaatccagaaatatacattctctcccagcaccacatcacacttatcccaaaacggaccacatagtgggaagtaaagcactcctcagcaaaggtaaaagtaca

SEQ ID NO: 586762 - DNA, 798 bp, Homo sapiens
aaccatttgctgccgatagtgccattgatagggaagaacttcagaaatctgtggtactcttgggctgtcttggtcttccctgaacgtgtctccactctgtgaagccagcatctaggggctaaagatgcaaaggaaagcagcatgcttggtctgtacaaatgtgcaggaaataccccaaagcttttcctactgtacagatctctcgagtctgcttaaagtgattctttcttctgtgatatttcttatattctatatgtataggtgtaatagcctttggttaactaatttctttttcctttaagtaattaagcacgatcatgtcccttttaaagccttacctgagagggaacaatgccttaaaataaaacaacgcataatgagatgaaagtatgcccagaataatttcctctacttattctgtacttgtgccctcatgagttccaatgttgtgtgaacgacaggcagatgctgcaccagttgaatggcagcatgatatacagacgtgatgtctgtaggtcacattaaatactgctttgagcaggtgggtgacacaaccacaagtgttggtcttccacaggggaagtttaacacacaagatatttttaacccacttggcagaacaacaaggttaagctcatctgttgatgtcccaagaaacttgacacgcggttgtattggaaagtaccggttccaaaacacgcacagagagtactacagcctttttggagcagtaacaggtctatggggggcgccctaatccgctggccactctggtttcacacgccgcctttgccggcg

SEQ ID NO: 586763 - DNA, 576 bp, Homo sapiens
cctccccctcccccccaccagagctggggtcgctttccgcccacaaccaccggtggcgttctccgcgcccccttcccgccccagcgggcgcatcctgtggctggcgtttatagttccctccccccggttttactttaaaccccaacccactggcgctgggggctggtcgtggccattcggggccccatctcgggtcccgggggtcccaggggcccacgtgaaggtgcttttttggggcccacctccccttttgggtttaaaaaaaatttggggggggggggggcccccccacgggggtcccggtcccccccgcccggggtggtgttttgggccctctgtcaaaaccccgggggggggggaagtggccccccctaaaccccgaggaaacgggggtttccctgggtttcggaaaaaccctctaagggggggggcccccccacccccccttttttaagggggggggggggggggggggaaacaaagcatccccccccctgggcaaaaaattttttttggtttttaacccccccgcccccctttccccttgggaaaaaggggggtttttgaccccgggga

SEQ ID NO: 586764 - DNA, 464 bp, Homo sapiens
  misc_feature (132)..(132): n is a, c, g, or t
gctatgttcatgaaagtttgaagacattacatagtgtatgtaaaactaattagtgaagagtaagaaaaaagactagccaacaggaatagtagagtgatgcattacgttaaatttcaaaagctcataataaanggaactttcaagagatcggttgaaacccaggtggtaaccctggtaaattgagctcctggtgactggataaagacccccaaaaaggcgagtagagggagatatagtgtttactgtgctggtggttgatggtgtgctcgctatcttaatatatagcgtaggtgacacactagaaattctctatttggtccacataatctgcaagtagtttccgtatatttatcgtgtactaagattgactatcaaattgagtctgcgaagaggaaactttttgactgtactgtatttaggagcctttgtacagcttggtcaaatttccatgatatgaagtattt

SEQ ID NO: 586765 - DNA, 349 bp, Homo sapiens
  misc_feature (300)..(300): n is a, c, g, or t
  misc_feature (313)..(313): n is a, c, g, or t
  misc_feature (348)..(348): n is a, c, g, or t
aggagcatttcatcttttattccatagcaatagtttcagggggtctccctgcgctccataaaacaaaacagatctttaaaaaaactattagaatgtagagatcaaaactttgaaaaagtaagctatagttagcccacccataaccccagttgcctccttcagtcactaccactgtcgttagtgtcttatttacccttctagaatgttcttgtttctccttctagaatgacgtgcccaagccaaacagatcttgttctaactgagccctgctgtacagctgctctgcccttcttccacctnaacaccacaggtnttcatcagttgtttaaaatcacgtgccaacacatna

SEQ ID NO: 586766 - DNA, 713 bp, Homo sapiens
gcttgcagagccggcgccggacgagacgcacgcagctgacttggtcttctccgcacgatctgttagcagaggtcgtccagagaccttcttctgctcgctgtgcaaatatgggcaactcttagaggaaaagaactcattgtcaccagttgcgtggaagtaaagtagcgcaatcagttccaagcaataggatcacctgtacgttcgggatgtcaggcacaagtatggttgatggcgatgtgcatagtcagacattctggagaaagtctgctagtgctagcatgagcctatgctcattagtggcgataggttgccccggcacaaggatcacagcctctcacatacggcagtaaaatgtggatggggattcgtgctaggctagttgggaaagctttgattgctcattccagtacccaaccctggaaaaatgaggtggggcaagctatcaatagggattcatgcctggttggacccggacaaggattgattaaagatttcggttaatgttggagataaagcatggactaggggatgtttacgggtcaaggggcagaggaaaagggggcgagagaagatactgagtatccaaagttcttctgggattggcaaaagatgaatagattgtttgaatggggtgctttccagataattttccaatttagtttgcccttcaagaattccagtggaaaaggtttcaaaggtgcctggaatttggg

SEQ ID NO: 586767 - DNA, 775 bp, Homo sapiens
gctgttaccagagtatctgggattacaggcacccaccatcatgcccagatcatttctgtatgtttagtagagacgggcatatcaccaagttgcccaggtgcttcctggtggtccttgggtcggacgggtactatcagaaatggaggagcacaaagattcagctgaagccctcactgcctgggactgggacccttgactcgtcattgtatgcacacctgaaactgcttatgtcgctgaggtgccaacctgctgatggttggaagctaattgagttctgatattgtgtgatacccttaagcattgggtttactttttattttaattaattaagttaattaatttttgagacagagtttcactcttgtgcccaggctgaagtgcaatggcacgatctcggctcaccgcaacctccgcctcctggttcaagcagttcttctgcctcagcctcttgagtagctgggattacaggcatgcaccacacacctggtaatttatatttgtagtagagacagtttctccatgtaatttcaggctggtctcaaactcctgactcaggtgatccaccgacctcggctcccaaagtgctaggattacaggcgtgagccaccaatgcctggcatatttagaatcatgatttatactattagagaatagggtctacactctgttggacgcaggctggagttgcagtgataacgaatcaagtcagtgaaaactcatggtcccaaggtcacgtgattctccagtacaaggctcctgagtacagtggacgtaa

SEQ ID NO: 586768 - DNA, 210 bp, Homo sapiens
acaaaacgcagatataaaaaagttacaaagatttttagattttcattcacaaaaaaagtcattcacattttacactatacacgttatgatataatacaggaaagtattatgtgcattgtaagagaaggaaaatagaactactagatcacacgtgttgttctgtgctctaaaatacctaaaggtggattcatttaatgcaacaccagggac

SEQ ID NO: 586769 - DNA, 955 bp, Homo sapiens
aatatggtcgatctaaaatttacttcggtgcttacaatatgaggtggaggttgcagtgagctgagatcacgccattgtactccagtcgctggtcgacagagcacagagctccatttcgaaaagaatacaaaaagactacctcatcctttttaagtgtgtgagacttcggccgcagagggatcctatacactcgatgaggaggatccctagataggtactgttgtggcatccctgacagagaggagatagtgcctattactaatacttctgttaactctcgaacattgatttaacgactcggctctgttttcttgcttcaagaacttgctggagtaggcccaaccaacatgctttcggggaggagagcttcaattcatgcgtgcccacggcataatagtaattaacgttaaagagccggagccaagcgatcgacggcgcaaaacgcgtggtgcacacgttaccaagtatccactaacgcggaccaaatggctctcacaaaaatgaggagcataggagggtacctgtgggacactagaaagtgacaccgagaaaaccataggtatgccgggtgaataaccctaccagggcctaaagggaaccataaaggtgcgaagaatctaaccaaaaaaaatgtgatatacaaaatgtgttgcaaaactacacaaaaggtcaaggatagagtagagaacgcactaaatgccacctgatgtaggcgtccggcagaaagaggaaccactccggacgggggacatgatcacgaagcagggggacaactgcgacacttagtccttcgtcgccaaaagaacgggaggccgggtccttgatacgacgaaaattcacgtatcaaatgcatatcaacggccactgggacatatcccaagcgagccaactgataaagaggttaacaactcacaaacgtaaagccgggcgacaagcgcaacgtgaaaaagaggaa

SEQ ID NO: 586770 - DNA, 802 bp, Homo sapiens
atgggtccagtagcccctttctttggccaatttctcacttttggaatgggagtgtttacccaattcctgtacccccactgtatgtggaagtaactaactgtttttttaattttgtaagctcacaggtgggagagacttgccttgtctcaaggtggaaattctggatttgggactttagaattagtgctggaatgagttaagactttgagggactgttgggaagatataactgtattttgcagtatgagaaggacatgagatttgggagacaccagaggtggaataatatgatttggatctgcatccccaccaaaatctcatgttcaattgtaatcctaaattttggaggttgagcctggtggaagaggattggataatgggggtggtttctcatggtttaacaccatcccactgggtgctgttctcatgacagtgagtgagttattgtgagatctgattgtttacaagtgtgtgcacctcctcccaactttcctcctggctccagccatgtaagaaggcttgactccaccttcacctttgttcatgattgtacagtgtctggagggtctcccccagcatgcttcctgtacagacctgcaaaactggtgagcaattaaaactctttctcatatatattacccaggatacgggtataactctaagcagtgcagacatacgataatacaggttacattcggaagagattagcaacataaatatatgatcacactggcgtcccataattagcaatcgatcacgccataagagtaccaaacaattgggaagacacacaattcaatga

SEQ ID NO: 586771 - DNA, 871 bp, Homo sapiens
tggcccgacaaccaaactcaagccccccgggttttttttcttgctataaataatttccccttttgagttccccattttctttgtgtttctacttgaagaatacagaagaccccagcatatggggcggtggccgaataaccccgcgtgttgggtatccctaattcccacgtgagaataatacgccgagaatcttgttaaagagccgcctgacacctagcggcctacacagcagcgacaacccatctatcacagaggtattataatgtgccgacgacgctttttggaaaactattctcctctgagagggctgcccgggacacacgtcggggtggcgctcgccactttaacgttccccctccaggccccagaggggttgggacacttcggctgtgttctcctggctcccccctctcgcctgtggttttgggacgcccaggatcttggtcctcgatggaccgcagggatgtaccctccttggggagagcgttctcctcggagttggcaacactggttggcgttttaaaaccacgaagaactctctggagagcaagaatgctcatctcgccacggcaagacacgctccccacacggggcccccgagagccctgtgtgtggggcgacagctgctgccctgtgtgcgtgggtgtgtcccccccatttacccctgtgtctcgacaagggacatgttgcgctctggcacctgccagcgagaggggtcttgccccccccggggggtctaccccgcatggggggcccggcatccacgaagaacctgtcctgttgcgatcatgttacggtcaaaatggactcgccaaccgccttccctttcggttccactgttgtgagtaagaattactctcgccgggccatt

SEQ ID NO: 586772 - DNA, 181 bp, Homo sapiens
agcaggctctgggcccagattaagatgtctgttaacttcaaataactctttagacgtatgtcttgtctgtagccatacatggtgtatagcaccagaaaaattgagggattattcttccagctacttgaacactgtcgtcagtttcaaatgcctgctgctcaaatcatttaagaaggagttc

SEQ ID NO: 586773 - DNA, 331 bp, Homo sapiens
tccccttggggggaaaaaccccctttttgggggggttttttttataccccgggggggaaaaatttttggggggggaaaccccgggggaaaaaaccgggggaaaaagggttttccccccttttggggaaaaattttttttttccccctgggggggaaaaaaaaatgggggggaaaaaacccccccgtgtttgggggaaaaaaaaaaaacccttctccctttttttttggaaaaaggggggggggaaaccccccggggggaaagggacaaataaaaatttttgggggcccccccctaaaatttcgaaatgggggcaaaaggttttctcggaaa

SEQ ID NO: 586774 - DNA, 448 bp, Homo sapiens
tccccttgttttgggaattgggggggggggcttttttgggcccccggcccccctttgtttggggtaatttttttcaggggttttttttttaattgaaaggtttggggtttgttttttcccccctttttttggggcactgggggtacccccgtttttttttttttcccttggggggggccttggggccttttttccgcctttttttggtggtttgccccgggggaggggccaaaagggggggcagccctttttttgggccttggcccccaaaccccttttggggcttggggttggttcccttttttttgggcccccccccccccttccgggggcgcccggggttttttttggctttccctttcccaaatgttccccttttggtttttaagtttttttttccccaaccttttttttttcctttccaaaaatttattgcccccccggggga

SEQ ID NO: 586775 - DNA, 981 bp, Homo sapiens
  misc_feature (356)..(356): n is a, c, g, or t
gacctccggcctagccatgtgatttcagcttccactccataaacgctcctcattactatggcctactaatccaaccagcacgtaatccatataccaactgatggcgcgattgtagatcgatcgagaaatgcaccataccaaggccaccacactaccatctgtccaaaaaggccttcgatacgcggataatcctatttattagcctcaggaaaatattattatatcattcggcaaggtagttttgtctgaggcccttgttacccacctctcagccctaggcggccctaacacccgcgcgaatttgacgggtaggcgctacttggaccccaccatatagtgtcttgtcaaggcgccgncctttaggattccgcgcctaagaacatgcgctgcgctatcttcccccttagaaattcaacgagtaccctggttaatttgagccatcccggcccacattcccaggggagagcttacgttcgataggtccagatctccagtaggagaggcccattcttagcgacaaattaatggttctttaacgaggcttaaggcactaaagtagggcgaacctcgacaaagcagccccgagggggtctaaccctgtctcaatttgtcaaacgtcgcacgtttatattttagccaaactctccttcataagcgtgggggtgtccatccgtaggatacattagtcgcggtgcacttatccagaaggccctctccagtagggtttaacgtagtcaggagtgttaatactccccttgtacagcccaaatgtttccccgcgaccgggcaaaatcgttaagcgagaagttgcgaaccgcaaattgtgttggataaggttacgtcctccacggagagggctatgtgcctaatgggggcacacatttagcagaaagcgttcacagttgtagagtttggggcattttcaaaagcacatggtgtacaccgtgccaaaggttactgtcatgggccgttgtccaaact

SEQ ID NO: 586776 - DNA, 855 bp, Homo sapiens
  misc_feature (53)..(53): n is a, c, g, or t
  misc_feature (223)..(223): n is a, c, g, or t
  misc_feature (275)..(276): n is a, c, g, or t
  misc_feature (283)..(283): n is a, c, g, or t
  misc_feature (325)..(325): n is a, c, g, or t
  misc_feature (328)..(328): n is a, c, g, or t
  misc_feature (330)..(330): n is a, c, g, or t
  misc_feature (339)..(341): n is a, c, g, or t
  misc_feature (343)..(343): n is a, c, g, or t
  misc_feature (363)..(363): n is a, c, g, or t
  misc_feature (368)..(368): n is a, c, g, or t
  misc_feature (371)..(372): n is a, c, g, or t
  misc_feature (380)..(380): n is a, c, g, or t
  misc_feature (390)..(390): n is a, c, g, or t
  misc_feature (442)..(442): n is a, c, g, or t
  misc_feature (445)..(445): n is a, c, g, or t
  misc_feature (455)..(455): n is a, c, g, or t
  misc_feature (471)..(471): n is a, c, g, or t
  misc_feature (476)..(476): n is a, c, g, or t
  misc_feature (483)..(483): n is a, c, g, or t
  misc_feature (519)..(519): n is a, c, g, or t
  misc_feature (521)..(521): n is a, c, g, or t
  misc_feature (527)..(527): n is a, c, g, or t
  misc_feature (538)..(538): n is a, c, g, or t
  misc_feature (586)..(586): n is a, c, g, or t
  misc_feature (749)..(749): n is a, c, g, or t
  misc_feature (817)..(817): n is a, c, g, or t
catgtctcagctcagcgcgcttatctggtgtcacctggcgctacctgcccccngacgtgagagagcgaagttcttgggccgcgctccctccctacctgggtgccctccccctccgggagcctgggtccccggggcggtcgcggcggctgcatcctcaggccaggccgcggggggagggggcggcacgggcctccgaaagcggggccatggagcccagagagtnggggaaggtaggactggaaggcccgggggccgcccgctccctcccgaggatnnccgagcngggctcgggcgaggcggggcggctcgggcggaggccccgcanatnanctatgtttnnngngaaggatttgccggcccgcnctctnttnncgcacttnggcgcccgancccgggaggtggcggagaggagcggacgcttccgttcggtgttcgcgcattntcnccgagctgcngagcgttcgctgggtngatgntgggttnggtgatccccgagtggagcgatgcgaaggtgctttntntttttnccaccaccttnggcgttttgaagaggccctgctaaggcttggagtttggatcggacgcnagttggagctgcagggtgggacgcttgatggcttgatcctgcctagatcctctcttaccaagaaagggctgaaaagagagggcatctggcatgctttttgccacttctgtttctaggttatgtacttcatggaatatctgggcattgcttagaaacctgtgtnataaattggctttgggcaagaggctttgagttggaagaaaaggtggaaagaaagtgcttgggggcggnttcagggatttgacgggattccagcgcttcaggcgtgt

SEQ ID NO: 586777 - DNA, 277 bp, Homo sapiens
  misc_feature (65)..(65): n is a, c, g, or t
  misc_feature (91)..(91): n is a, c, g, or t
  misc_feature (143)..(143): n is a, c, g, or t
  misc_feature (152)..(152): n is a, c, g, or t
aataggtggtgttatgtgtaaagagttttactttatatctactcatgtattgatgcaagttaganatacagttgcttcaagacatgacacnacgcttggcagtgtttcttccccagcttgaggtacctctaagaaatcaattnaactacgtnttaaatttattttgtacgacacttttctggtttataaatccaattacttctgcagacagatcttaacagcttccaggattcttctgatactactttttgctttcttgccataacaccacacaatt

SEQ ID NO: 586778 - DNA, 128 bp, Homo sapiens
agactctagagtatccccagacacacgctcaagatggaggcagcaaacacaaattctgatggagaggaaaggggcacgttgagtatactggctaacggaactgagaagccttgagtgtgatggtgggc

SEQ ID NO: 586779 - DNA, 191 bp, Homo sapiens
  misc_feature (78)..(78): n is a, c, g, or t
  misc_feature (83)..(83): n is a, c, g, or t
  misc_feature (87)..(87): n is a, c, g, or t
  misc_feature (152)..(152): n is a, c, g, or t
ctagtacacacatacctgagactgggtaatttataaaggaaaaaggtttaatggacttacagttccacatgtgatttngagtngggncacagccaaaccatatcacacactctgagttttgttttttccccctcattatacttgatagggantaacgtttcacaatatatgtgaaaactattttttttttt

SEQ ID NO: 586780 - DNA, 1294 bp, Homo sapiens
gatcctgaatctcgccgcaccgccggaagtcgtgttgacggatttaccatgaccctggatggacgccagtacaacccggtcaaagcagcagcatagtgctgttacgccaccagctgttacagcgtgttggtcctgcgactggcctctggtgctgctatactccgattatgggataggagaagtgcccgtggagcccctgtgatgtccccttaccctccagcgatcagggccacgcttcccccgtgggccgtggtactccaaatgcatgaccgagtgcgtgagcatactagccgtggcgctgtctggtaggacaccgtattagacctgcgctgcatcaaacagcgcccacgaagggctgctttgcctccagttgtcagctgatgcattccatgtgtccccatggatgcagggctttggtgagttggcggacgtaagcacagacaaatgcatcttgttggaacgacgcaaatgtttgactccctctgcaaggcctgcttcgcaaaccctttatagcaggaaacccgtggattgtgaaaacaatcttgacggtgaaactatcccttggggtcggagcaattcaaatggcccatcgcattggaccttcttgttgacttggttcaagttcgccgcgcattggcttggaaccccaccttagttgggggcccccggccttgggccatcctggaagccccgcattacgccctgttgacggttctcccctggggtgggctccgaagccgaacgggacggaacccttacctccggttggggtggtgcgaatttgtctgcccattccaaaactcccggacatttcaactgggcccttttgctagtcaaagtgtgaacacctttcgggaccggggcaaacctcttgggccttctatggtaaagccacagagaaattcccccagggtccttcggcttttgacacaaagtgggaaccccttccacgaaccaattaccccgggggacgggacaacttgccaagtgcgaatgggaaccaaagaacgcttccaagacgattcaccatcaccaacgacttttccccggcccatgccggaaaaattagtacgggacggagaaaacccatggcctttccggtgcgcgtccccacatattgcaaagtgcgcccagaagtcactccccgagaccaaggtcccgtcgtagttgttacctttgggggcctcgaacctgtggaaatacaagagtggcaccgtggtcttcaagaaacgcacacaataagacactacaacgcacctgtcaatgtgcaccctagggggaccccataggagac

SEQ ID NO: 586781 - DNA, 244 bp, Homo sapiens
aataatatgaatctgacgctggggacatttgcaacccgcagagtcaccgccacctggtgtctcttcagtgtctatggagaccagtaaatgactgtttgctccactgttctgaaaacaaatgagtgcagaaacaatcttcttttgcttcctgcctggtgagagacatgattgccaagagctcaggccaggagccgagggtttgcttttcatcctaatcttcaaggtggtcatcttcaaaggatgt

SEQ ID NO: 586782 - DNA, 581 bp, Homo sapiens
gtaacattgcagatagcggtgtgatggcaggcctgtctggcccagctgctgtgggcccactgctctgtactcgggtgtgcttcactgcaggccttccccgctagcttggggcggcagagctgatcagtggaactaagccgtcaggattatcaaaaactgagcagcacccttggtggacctgatcatcacggactcccccaactgaaaggtccttctctggcctcaattcccgtctcaaggccacgctcttccaccatacagtggagtcttccgccccagcgcgtcgaccttaccagcggcctccccaccagatgccctgcgctggatacctaagccttgggagcggacagggccgccacctcgagaagggccctcccgacggcagaggagcctggtgtcccgagggtacaaggagcctggttgccccaccccgctgagggagttcctcttgccccctaccccccgggcctgtatatggaatataatattcgggggaaaggggtgggcgggaggggttgtgcggctgggctcacttcccctcttccccttccctggtccctgtcctgcggttgtttgttaca

SEQ ID NO: 586783 - DNA, 122 bp, Homo sapiens
gtcgtattatccaacactgaaatctcaatagcatctagtgtatgtttgttgctctcatgaccacatagagtctgcacatttccttatcctgtgctctgacaacccatgtttctattgagcct

SEQ ID NO: 586784 - DNA, 209 bp, Homo sapiens
attcgcggccgcgtcgacttctattcaacatagtactggtgaaagtgggcgtgcttgtcttgttccagttctcagggggaatgctttcaacttttccctgttcagtataatgttggctatgggtttatcatagatggctctctttacttttaaggtacgttccttgtgtgccagttatgctgagggtttatttcttctaaggatgcttg

SEQ ID NO: 586785 - DNA, 155 bp, Homo sapiens
ggccgggcacagtcactcatccctataatctcagcactctggggggcctaggcaggtggatcatttgagcccaggagtttgacaacaacctgggcaatatagtgaggcccccatctctacagaaaatacagaacattagccagcatacatcgtgg

SEQ ID NO: 586786 - DNA, 367 bp, Homo sapiens
attatggtggattagctttttagatgtgctgctggatcaacttgctggcattttgtggagtgtttttttaatctatgtctatgaggttgtttcttttattgttgtgtctctgcctggttttggtatcagggtgatattagccttgtagaatgagttagcgtggagtttcttttcctcagttttttagagtaggttaagtgtgaatagtaccagttctttatacacatggtggaattctggtgagaatctatcaggtcccaggcttcagtggctgaccaggcttcagtgcctgaccaggcttcaagtgctgaccaggcttcagtggctgaccaggcttcagtggctgaccaggcttcagtgcctgacc

SEQ ID NO: 586787 - DNA, 464 bp, Homo sapiens
tccaaatgccctgggctgtgcaggtgtacatccctcgtgtggactcactgacgccagctctggtgtgcatcttgtaatatggctcatggcagtggtactggatcccagcttggtaggtgttcactcccttggtggtggtgtaatggaagtccccgttgggcaggcttcggggctgcccgcagtctttgatcttgcacctgggcatggagcgatgccacgtgccgtcatcctggcagacagccgtgaaggagggcagcgccttgttcccctccacgagctggtagccttccttgcagctgacaatgaagtagtcacggaactggtactgaggctgcaggtcctggatgatggtgaactcatcgagcgtcttgggctgggggcacttgatgatctcggtggtgtagtgcagcttccagccccggctgtcccccgactcgtccgtgaaaaacagcagatccacctcg

SEQ ID NO: 586788 - DNA, 133 bp, Homo sapiens
ccctaattttggaaaaattttttttttttgttccaaaaaccttaaaaacggtttaaaagcccgttaaattttttctttgccttttagggtcaaaataaaacttgatttaaaaaaaagggcccaacccttccca

SEQ ID NO: 586789 - DNA, 1417 bp, Homo sapiens
tgggttcttaaaaaatctgaaacttgtgaggccaaacaaagcaaggccggggctgtggggggatgtggggtgtggggtccaggggggcccggttctgtgccaactctcagctctcctctctgtgcgtgcaaaagcggggtgtgctgtgttgggggccattcttcctgtggcaatgtggcaagtgtggagtctctgtgggacgcaaagagaggggagagaggggctgtggggtggggtctcccccaagcgcgctcgaggtgtggtgtgggtggccgccccttcttggcgtggccccctctcgcagtgtgggcccgagggcgagttccctgtggaccaagggacaccagtgtggggctattgtgcgcctgtgagaattgtggggagagggccttgtgaaggcgagacccctcaagaacacaaaggagaaagagagacctgtgggtgtgtgtggagagagggaatctcccaggggggacactgtggaagtgggagacccggggtgtgagtgtgccgtgtgtggaagaatctcccatgtgtgggccccctctcctgtggggtgtataaacaaaagacaaacaacacaacatctctatatagcatattttttatagcccaaaaccccagagaaaggcgggctgtggcccccccaaattgctctctccccccaaaaaacgcggggtggcttctctggtgagaggtgggcctcccaccaaatgaatcccccctttgtgtagagcgcagagagggggaggagaaacaaaagaaaaaatttcgggccttgtggaggacatttcacgagggggggaggaggcccactcaggagaaagggcggcccaatagtggagccctttataaccccctgttggagaaccatcacacatgttgtctgttgagcaaggaggcaaaggccccctagtggcatttctttggggatataaaacgcgcccatattccggacaagactggtcttggccaccaaaaggagaaagcgagaatatcctctctaaaaaaggaaaccactttgggtggctttggcgaggcaacacacgcaccccaggggcagaatttgcgggggggacattttgggagcgagaaaaagaacgcccgggggggacaattatagaactccacacagggactaagagagtgaacacctctagatatgacagaagcgccagagacaaaaccgcgggcagatgaagcgagagagggccccatggagacaaggaggcgacaaacccccccagtgggccagatgctctggaccaaccacaccaaaaaagcggggaggacaacaacgcggccggcgacaaacacgggggaaaacccacacaagagagagacagtctgccccgacgagaagtcataaacgcacgggcgggcccaacacggggggaacaccaataacaattcgaac

SEQ ID NO: 586790 - DNA, 1585 bp, Homo sapiens
  misc_feature (1340)..(1340): n is a, c, g, or t
tttatgccttcttttcgtagtttaggtggcctcgtttttgttatcgcggtgtctcatattcttttcactaatactctacgcggcgcgcctaccggggggtactcgtatactcgtcctcttccttcgatctggggggtttttgtcggcggtgcgtctgttgttcttgtggcgtgttttcctcaccacgagggttgtcgtcgcggtcgctctttcagagtgggtgttggtcaccccccactataccggcgccttttttttggattgtgcctagttcaacctgtgtcccacttttttgtgggtctcacctggggggtccacagtgggcgcaccgaggatggttggtcttctcgtgatgaggagcaccactttgttgtggtgatcccctttggggtcttttctctttgctagcggcctcttttttttgtttgtttttccccagaaagatgggtgataggggtgttttatcagagattgagggtcctctcccctctgtgttggtgatacttttgaagtagaaagatggattcctcgtagggatggggtgctccatctccttctctcccagttgtttttcttctgtaaagaaaagggtaaacaccttcgcgagtatagattatatgagattaataaatttttccccccacagattcgtcgcacaactgggggggagatagagaagtcttctcctctcttccccccccccactcggagaggttatgtcccctcttatatttttgtgtgggtgtgatacatcatttgccctgctctcccgccggagaccctctcctccactactacgggctgtgtcctctcgtgtagagagatatttctccctcttctctctgcggctcctcccccacacggtgtctcccagcgggggatatagatattagtggtgagagatactctctccactcctcgcgtggtttcactactcccacagggcggtgtgtgtgacactcacaggggccacaggttctacccccacatactccacatgtccctgtgtctgttttgtctaccacacacacccagcgtctgtgagatactcaagaagagatgtgggttgtgtgggagagcccgcgagagggggctgtggcacatatgtctcgcgagattcttccccttctctgagctcaccgcgtgtgagccacacagtctccttgatcacacactctcctctatatatgtggggcgagtctcaaaacagccgcgggcgctatatccctgtgttctccgagacactttctcctgtgagagagagggagagataaatagcgcgggagagataacccttatgagactttcgtgtgtggttgtcctcgcccacatgtgagatntcacgcgcacagagatgtgacacctcgagaaggagatatcccacaaactttatacgcaggtatagcccacatgagacttttgtgtcacatgaccacactttgtttttatacttatatatcctgtaaaattaactccatttataaagaagattccattttaagaggaaattacactgggcaccacaaaaatattgtaattaagaagaaagtagccctcttatttaaaatttaaattgtttcccaat

SEQ ID NO: 586791 - DNA, 375 bp, Homo sapiens
  misc_feature (27)..(27): n is a, c, g, or t
  misc_feature (29)..(29): n is a, c, g, or t
  misc_feature (32)..(32): n is a, c, g, or t
  misc_feature (38)..(38): n is a, c, g, or t
tcggatcggcgagcgagcggcggttgngncanggcgantgttgtagtcatgtcagataaggatcctccagagtctccagtggtaaccggagtagcttcgacccttaaagatgagaactgtgagccagtggagaagccagaggataaatctcagcctgtagtgtccacccggaaaagaccagagaccaaaccttccagtgaccttgaggcttctgctcttcctgctcaggagactgcttctaaagatgtacctcagactgggtggggttattggggcagttggggcaaagtctctgctctcctcagcctcaagctacggtagctacagttaggacaaggtatttcaaatgtcattgagaaggcagaaacttctctt

SEQ ID NO: 586792 - DNA, 521 bp, Homo sapiens
gttatacaagaggggcttatgcttagcttgatgaccaggatgttatttttaactgattgctgaagtgtttcattctggctggtccttcacttgtggtggatttagaagtgaatgtgtttggaatatgggctccagaggatatgaaacacaattcctggtaacacatttggaggaggcgtgggagctctaaatactgtgagactctaagatctcacatatgagaatcacacgcgggtatactctgccgagagggagagagttgagggtctcatctaggggtgcaccgcatgtgtagtatctgacacattctctcttggagctgctgactgtgcacactcatgtgccaagtttcagaaatagtgctcttctgggtttgtgcttaatagaggtgtgggagcagaggaatggtgacaactctgagtgtttagctactgagatggagctcctctatcattttatagaggacagtgctctcatagagcacacagttctcattttatttagggtatggagattcgcgg

SEQ ID NO: 586793 - DNA, 276 bp, Homo sapiens
atctcagctcaccccagcatcctctttcattccaacagcctcagctcactccaccatcctcagctcaccccaccatcctcagtcgtcaccccagcatcctcagctcagtccaacatcctcagctgacgccacctgtcctcagcgtcaccccagcatcctcagcgtcattccagcagcctcgagctcaggccaccatcctcagctctaccccaccgtcctcagctcaccccagcatcctcagctcactccaacagcctcagctgaggaccatcgttg

SEQ ID NO: 586794 - DNA, 242 bp, Homo sapiens
aggatcccacgctcacctcgaaatcatcagacgcaggccgagaaccgcaccctgtccgaactggccgcccatgatcccctcaccgggttgggcaaccggcgcagcctgcaggcgctgtcgcaggcgctggcatcgcgcccggcaccaaggaggccatatgcggtgctcatgatcgacatcgaccacttcaaggccatcaacgaccagcacggccatgcgcggggcggtgcggtgctggcggg

SEQ ID NO: 586795 - DNA, 388 bp, Homo sapiens
aaacaggaatataatatatatatatatatacacacaaaacagagctggaatgaagaaatgctgaaagccagcaacgaagacatcaattgtattattaattagaattattcccaatatatcagtcaatgaattaaacaagaaataaatataaatattggaaaggggaggaacaaattatccttatgaaatgattaaacatctgaaaattccatagatgcagctgaacatcagttattttctgaaaaaatatgtcgtgagggtatttcgtcattgaatccaacatatagtgtctttacaccaactgttatttgtttttgccaggcgtaagaaggggggatccttctaaaatccaactggaatgcataccattcttagcactagcccgtct

SEQ ID NO: 586796 - DNA, 115 bp, Homo sapiens
tataaccggcgtgcccgcgtctcctaacgctccttcacacgcatggcaggagaggccaaggcaggtgaagcaccaactgagaaccctgctccagcgcagtcagtcagagcagtgc

SEQ ID NO: 586797 - DNA, 189 bp, Homo sapiens
tgcttgcttttggtttttatctgcatggaatacttttttcaacccctttattttcagtctgcatgtgtctttacaggtgaaatgagtttcttataagcagcatatagtggggtcatgtttttacactcatgtatccagtctatatattttaaatgcaaagtttaatctgtttatgttaaaggttattat

SEQ ID NO: 586798 - DNA, 129 bp, Homo sapiens
gctagctgctgccaggctcagaatgagcccgcaccctaggccagatggatgacccctaagagcttcctggaatttggatgcagggttattctgtgtgtgcggcctctcagagcatgttagtttgacgcg

SEQ ID NO: 586799 - DNA, 197 bp, Homo sapiens
tccaaagtgctgggatatcggcatgagacctttcttaaaatgtatcttccagtaacaggtgctatgtgatttagctagcacagcatcagtggggctgcgacatttcctgctctgtacacatcacgctgttcatgttgcccatggatctttctggtagccaagcttgctgtgtgcaggggcatcctctagcagtcgac

SEQ ID NO: 586800 - DNA, 188 bp, Homo sapiens
gttcttacacgggttggaagtacagtacttccggtacgtcagagagttcagggctccgatgcacttccttgtcaaacggacctctgtaaagatgaccatggaatggttactcccataggtcatagaggcactaatggaagtagacggggggcctctaacacggacggtgggatgcggcatcggcaggt

SEQ ID NO: 586801 - DNA, 300 bp, Homo sapiens
tcagaagaggtcgctctagtgtcatcgctgtggacgagaggtctgttagacccatgagacaatgaaatctgcatgcaactcccgtcagcagatccggaagctcatcaaagatgggctggtcatccgcaagcctgtgacggtccattccccgggctcgaatgcccggaagaaacaccttgggccgccggaaggcaggcacatgggctaggtagcggaaggtacagcatgccgaatgcagagaagtcacatggttaggagaatgaggattttgcgccggctgcgagagagggattttggggt

SEQ ID NO: 586802 - DNA, 181 bp, Homo sapiens
aatcgagctcggcaccgctctcgtgagatgagaagaaactaatgaatcgcccaggctcctgctggcatgcgtggtcctcacacctgtacaggggaaaatgagcatcaaagtaccttcaacacacacacacacatacacacacacacacacacatacaaattaaaatctgtatgaatgtgcc

SEQ ID NO: 586803 - DNA, 89 bp, Homo sapiens
gcggccgcctactactactactgctcgaattcaagcttctaacgatgtacggggacatgttgtaatcgtgcaaataaacgctcactcct

SEQ ID NO: 586804 - DNA, 106 bp, Homo sapiens
catgatcatcagctcgtaccgtattgggcattgtttcagctcagtcagcgatttctgtagacatcatcaaaagcaggcacttggggattctgggctttgagtacaa

SEQ ID NO: 586805 - DNA, 329 bp, Homo sapiens
  misc_feature (199)..(199): n is a, c, g, or t
  misc_feature (225)..(225): n is a, c, g, or t
  misc_feature (233)..(233): n is a, c, g, or t
  misc_feature (273)..(273): n is a, c, g, or t
cactctgttgcccaggctggactacagtggcacaatctcagctcactgcggccttgaactcctgggcttaagtgatcctcccacctcagtctccctagtaggtggaactacaggcatgtaccaccacacctgggctattttttttttttagagacagggtcttgctatgttgcccaggctggtctttaattcctggggntcgagagacaacttcatccccatctntcagagtnttggggattacagccatggagccaccatgcccggccaaanttcagccttgaatattagtgatttttgccatattagttttaccatctgtaacaatt

SEQ ID NO: 586806 - DNA, 222 bp, Homo sapiens
gagggacagcacctgcacctttccttttatttacttacttttgagacgggatctgagtctgtcacccgggctggagtgcaggggcacgagcatggctcacggcagatttactctcctgagctcaagcagtccgtgcctcagaccgcttagtagctgggactacaggtgtgcaccaccatgccaggtttggtttgtttgtttgtttgtttgcttgttccgctg

SEQ ID NO: 586807 - DNA, 364 bp, Homo sapiens
gtctgatgacattcacatgcatacaggaaaaccctgcacaagaaataccagacagactataggcaacatcactttatatacgaaaagccaatatcagtagtatcaccacagaaaggtgatagcaactgtagcaattagagtcacaagtacagtcctaattctacaaaccaaaggagaaaatcatcaacagcaccttacaatagttcaagaacaatcattccatgtaatacttttgatcagatgctggcttgttttgtgtaagttgaacaaaatgaaaggcatcagttaccatcactatcacagtttaaaagaacccaaaagtcgcacacatcaaacgaaacaaacaaattcaaagatgctgcct

SEQ ID NO: 586808 - DNA, 750 bp, Homo sapiens
ctgttcggcgtggggccacagatgcggtggcccagtagtcggccccccgttgtgaagatcgcgtcgcgctgatgttccccccccgctcgagcttagttcctatgtcaacagagggcgagcgaacatccccccggggcggcttctcacgccgctctcacacaatgggttcccccgggtggggctagaccctctcttcggtgaccgcccagtgagagtctgtccgccccctgggctctcttggcccgagtggggcaagtttggtggcgcccggcgagactgcccgcgggggttgtccatatgaggacgcttactcatccacgcgccgcctagccgtttctctgtcaactacatgattgtctcctccgagcgttgcatataggcgcggatacctcacgattgtgatcctcccgtgcgacccacaatcgctcgcgcttcgccctgagcgatgcccgcccctcgttgaaccacacagagtggcgccctggctgcgcctcccccctgctgctgcgattgcctcccctgcgatcaggcgtcgtacaatgtgctggccacacgttggtgacatgattaggcgggtgtatcctgcagtcccccgcggtgctctttcagggcccccggcacggaccccccgatggttcttccctggtcctgccccctgtagccccgccgcccctgttcctgtgcgggaacaaggggggcccccgggccggcgggggcaatcaaaaagaaccatacacccacatagacgca

SEQ ID NO: 586809 - DNA, 301 bp, Homo sapiens
tgtgcgaccgcgataatataagaactacagctcatcaggaggagatcgcagcagcgcaagagacacataacaccatgctcgtgagaaagctcaaggatctcaagatcacaggagagtgtcctttctccttactggcaccaggtcaagttcctaacgagtcttcagaggaggcagcaggaagctcagagagctgcaaagcaaccgtgcccatctgtcaagacattcctgagaagaacatacattataagtcttcctcaaagaaaaaccagtcggagccgagtctatcttcaacacttgggca

SEQ ID NO: 586810 - DNA, 185 bp, Homo sapiens
ccttcgtatatgtacttaatcccaggctatttccaacacattaaaacttctagtccctaagaaaaagatacaaaccctccagcctctctctaatgcatggaccaggaccagccaaccatttagagaaacaaaaaaactccagtaattcttaccttttccaaaatttggtgggtacctattacggg

SEQ ID NO: 586811 - DNA, 129 bp, Homo sapiens
gagtcagactagaggatcccttctgctgtcgctagagaaggagatgtgccagaagatggaagacgacgggtccactgtgcttgggctggtggagatcctctgcagagaaggaccctgtgtcggtgtcct

SEQ ID NO: 586812 - DNA, 105 bp, Homo sapiens
ggggactgcggggccagcctcaggtagcagcagcagcagcagcagcagcagcagcagcagcagcagcagcagcagtatttttattacttctagaaggctgccgca

SEQ ID NO: 586813 - DNA, 103 bp, Homo sapiens
agcaaacagaaaattgtggaggttttgttggtgtgcaacttaggaacatggctcaagaaactaatcacagccaagtgcctatgctttgttccactggctgtgg

SEQ ID NO: 586814 - DNA, 1234 bp, Homo sapiens
ccacgcgtcggtcggagctctatggacggtggcagcgggtaccgacgtggtggctgtagcatcgactcctctgagctgagtttgaggccgtccccgactccttcctccgccttcggtccgcgctttgctgcttccggtagccccatgtcctactcatcgcatctgacgtttattgtacaggacgagcgagtatccgtgctggttaatgccctgtcacccaagttagggtactgctacgtatacgaggacaatgaagtatcaagttccctggagggagaatctatcatcatacgtcacctgcactataaacgaattcatcatcagtcattcagcaccttactttacccttggtgcggccagacatcacatcaaacaggactagacgcgaatacgacaccactctacttgcctacaattgccaccgatgccctgaacccttcgtatgcctgctcccaacgtagccacccactggtatccacacgcctcatacttgctctgccataatcaagctgcacactaatcacattgtgctctcaatcgctatagatgatataacgtagacaggtatatataagtgttgccatcccatatagtgactcatccttggtatctacaatgggtaacaaaatcacgctagtaggagacccatcaatatcgcatgtccagccaactcacatcattaaaaataaggaacatcactttaatccgccctaaaaagctgttcacctagggaggggtaaacaatacgaagtcgataaaacctgccaccaaacaaatatggtcaccacattggcctcaaggcatgcaacccacaccccagatatgattgtaccatcatgatatcgtagcattaaatctcatactctcaactcatgtctctcccataatgaggccctccattgctcaatgtccatacttacacgcaaaccattagagagcacctacactataatctgtctgtctccacttgcatagtcagactgggagaattgcaatgtgcaattcgtgatccagccacttcaaaactcggaccagcatgctcctttgcacaacaaccatcagagcactacagcattatgaggtcaaatcggcacaacactatcatagtccttggcccatttatcttaaagcagcgacactctaacacgctcaactcccacgtgcccacccgcgcaatcgtctatgtggcaaagtcacgtaccccttcatccacacccaagcgctctaactaaca

SEQ ID NO: 586815 - DNA, 868 bp, Homo sapiens
  misc_feature (37)..(37): n is a, c, g, or t
  misc_feature (50)..(51): n is a, c, g, or t
  misc_feature (62)..(62): n is a, c, g, or t
  misc_feature (72)..(72): n is a, c, g, or t
gagagtggaggagagggacgacgcccttacgaggagnaagaaaaaaaaanntttatgagagnacgcccggcnccctttataggtagaacctggctaacagatttcctcagcaggcctgggaagaagctcgacagtgtttgtggaaaaaagagaaaaaataaatggttttggttgattctgtatttgagtacccttgttaatattttaaattgtccaaacaaacattctaattgttccttaagaactcattttcccatgtttatactcttgccacactgtttttttggcatgtactgtacactatttataatgactgtagatactcgaatgttctacttgctaattttgcaaggtgagtttatttcatttatgcagagtatcttggaatttggtaatttccatcgtatgaaaaaatatactctgcatttgtgatatgggggaaaggagacataagattacgcaggctgtttggttcttggaaaaaggaacttattctgctttcattggtgactttacatggtaaggaaacgcaacttggaggaaaaaggcgactgccagctgtggaagttggtaaatcgagacctgagttagggtcgacgaatgagtgtgaagagggatacgggggggtgcgggagggtagcgtggggcagaccccgcatatatgcacgtcgcggtagcggcgggtgccttgggttatcagcagaggggtttagtactgcggggtccaatcgttgtcgcgccaacagcttaccttcctgacatgtcttttccctagtcgtgtgaaatgattttttcggggggtggccgttgacgtctgtcgactgggtctgggtcgtgtgaagaagtggcgcgggcggccggcgcgagg

SEQ ID NO: 586816 - DNA, 931 bp, Homo sapiens
agaagctgccatgagatctggaggtgtacagtgtcatttggcaagacagtcaagcagctttgtagaattggcataatacgatactggctgcagaagctagcatggctaacatctaacgaatatatagacgtatgataacataggatcgtagtaagaatactgagtggatagtcagcaaatctagagtcactatggaatagagtgtgtgaatcttgaagaaatcatttgaagaggaaatacgaaaaaagatgtcactagatgatcgttggtaggtgatttcatagaaagataagatgctggaatgtgtagagcggaaggtaatagcagttccgtgactaaacatggaaaatattgaaatgggtgaaatggtaaatggataaagagaactggcacttgtggaggtcagaaaattcagaaagcatgtccttctcgatggttgtatgtattaatgatgtgcctgttaatattttgaggtgtatttattaaacatactggctacggttgagtaaagtaatacaggttgtgctatgtaatttgagtaatgaacgtgagcgaatagttcgaatgacattgcatctagaggtgagcttattgatctgatttgagtgaatggtcacaagtaaaactattgaagaggtaagtacagagagtgactgacagaacaggtgaagacgctttgttacaagaactgtgttaaaggtgtcgtggtggcaacaatgtcgtattttgaccttggctataattcgtaacctactcagaacaaggttactccatacgtgttcagagacaatattgatgtaatagactcaggaatcactcctcatgtaataatacccaatttattgaatgtcaaagcttattagaagtcgaagacctttattgccccggaaatcaaccctgactcactactgacgcacgggaacaggaagct

SEQ ID NO: 586817 - DNA, 762 bp, Homo sapiens
tgatgccgctgctcgtgttcgtcctcggcggcccgggccggctaggggagccagtgcgcccgcatttgtcgagaaatatggctacgcacacactttctgcaggagagctgcttcgtgatgaaaggaaggaacccagattcacagtatggtgaacttattgaaaagtacattatagaaggaaagattgtaccagttgagatatccatcagtttaattaggagagggaaatggatcgacacaatggcatgccaatgcatcagaagaataaatgcgttgattgatgggtttccaagaaatcaaggacaacccttcaaggatggaaccaagacatggatgggaaggcagatgtctctttcgacctgcttttttgactgtaagtattgagatttgtattgaacagagtgtcttgagaggggaaagagtagtggtaggagtgatgacaatgagagagagcttggagaaagagaattcagacctaccttcagtcaatagagccatttattgacttgtatgaagaaatggggacagtcgccgaatatagatgctgctaaatcttgttgatgaagtttgtgatgaagttgtgccagatttggcggacagggcaagggcctaatttcgtaatcgctggaaaggcatccttgaaatcttgcttgaatattggctttgatagctgctatcatgagccctttttaagggccacgtctgatacttccataagtacgtctcaatagtggctgggaaagtacgtggataaacagagta

SEQ ID NO: 586818 - DNA, 947 bp, Homo sapiens
gcacaacagcaccatcatcaccatatcattgcacaacacattattctccaaataacattctccatcatacaaatccaggtctataacggtcagcacactcaccatctaccagcatcacaggctgcggcggcatcacacatggcatgaaacactcacagcattccaacggccacacaacacagcaacacaccagcgcgctagcgtagcatcccctgcccagcaggcgcaaccatcacgccaagcaagttagtcacagcatggtcgcactcataggtcgcccagcatccatctcagcggctatccaacaatccattcacataagcatatccatcagcccaatcctatgcttaagaacaccacaattggtatctcaccccctcgttcatggcctattctctccactcgctggtacaacactgaacaatgcactgcactacagcaggaacactatctgcatggtgcggggcatcgcgtggtacaccgcacatctagcgcacagctaccagtcacaatggtcacaaccctcttccagaccacaagtttcaccattgggagacccttgcctaaaaacgccttcacactacaccactggcctcaggccttcttggactatcggcctacactggcttgcgcaaggaactctaccgggttgctgtagggtcatccaacgccactcacttacctctggtacacatcaccagcacgtacacacagcattagaccaacaatttacttccacttgatatctcagggaccctggacaacctacatgccaacgttactttacaagaaagcatttcacaggcctggccgttctcccttggcctaaatggacaagttctatgggatggatcacggcaggcgaacccacatttggtcacgggctctttctacacctcccccggtggccttttggcaaaagagcatcattcgccagaattctcatc

SEQ ID NO: 586819 - DNA, 154 bp, Homo sapiens
aagttctcgagccttacttcaggagggcattgaagattcttattgtaggccaggaatttggaaggcttccattagctatgaattccaaccctgttacttccacttggcaattagagccaggaccctatctctgggtatatacatacatcttttg

SEQ ID NO: 586820 - DNA, 362 bp, Homo sapiens
actgaggcaggaggattgcttgaggccaggagttcgagaccagcctgggcaacatagagagatgctgtatctccaaaaaataaaacaattagcctggtggcgcactactgtagtccccgccactcaggaggctgaagtaggaggaattgcttgagcccaggagttcgaggctgcagtgagctatgatagtgccactgaactcccatcagagtgagagagcaagactgtctcttaaaggtaaatgatagatttaaaaatataagtctttgactcttagtatcccatggaagcacattcacagtggtttgtagatggtgataataatttttttttcttggcatctctaagtatattacctacct

SEQ ID NO: 586821 - DNA, 176 bp, Homo sapiens
gacagagatcaagatattgctaaagaaaaaaaaaaaaaggtaatataaagttagtcccaaattataatggtaaccaaaaaatggaagtttagatccaagggtgggtttaaatttaggttaaatttctcacggtcagtgtctctgtttctctctctgtgtctctctgtctcccccgg

SEQ ID NO: 586822 - DNA, 152 bp, Homo sapiens
tgctttttaaatttgcgggtgtcaatccatgaaattaggattggttcccaaatgacatccgcaagtgattgattctaagatttaatagttggcaaagtcattttacctgtgtctcaaacaagtaaaccccactcccttgggttaccatctga

SEQ ID NO: 586823 - DNA, 188 bp, Homo sapiens
cacatctttgcacggtacattggaaataatatcacttctttgtagcatcaaaaatgaaaccttttctgtacccattctgcttttctttagggccttttacccccatttgaggaatttgcagtttggtttgtgtgtgtgtatcaattcattaggaaactgaaatggagaggttatatccttgggaagtg

SEQ ID NO: 586824 - DNA, 454 bp, Homo sapiens
  misc_feature (9)..(9): n is a, c, g, or t
  misc_feature (17)..(17): n is a, c, g, or t
  misc_feature (83)..(83): n is a, c, g, or t
  misc_feature (361)..(361): n is a, c, g, or t
  misc_feature (404)..(404): n is a, c, g, or t
  misc_feature (416)..(416): n is a, c, g, or t
  misc_feature (432)..(432): n is a, c, g, or t
agttgttgncccctttngtcattaaggattactatcatagtaagagtatcatcgtgccgcgtaatcccgttattcgtccctangggggtccaagaatgacagttgaaaaatggtgttcaaatagttcggccagagcctttgtcttcgccaccccggccactgcagcctcagcaacaatagtggtgccgtgtcgttttcgtacattcgccaaacattcagtctattgtccgggttaaatccccatttcacgtgttccatttggcacaggttccaatggagcagtgccagcctcaccaatcgtcataacaattatcagtgtaggtattcccgtcttcattccaatggcaatgggccgttcctncataatagccgcagcccatagttcgtgtttttgcaatgacagncccatgctgttnccgcgttacaatgttntttccggcacgcagtatttcgg

SEQ ID NO: 586825 - DNA, 202 bp, Homo sapiens
tagaggatccccctccataatgtgtgcccaaagaatcaaaattataaacaaactaaaggaaaaaaatgtaaatagaagaaaaaaataatgtgtgcatgtttcaattctgctaaaatgtatggccaaaatggtgaagatggctattttccaacatctccacaaatccctttaaggataaagatttttctcatacagcaatacc

SEQ ID NO: 586826 - DNA, 762 bp, Homo sapiens
  misc_feature (520)..(520): n is a, c, g, or t
ctcaagaacagaagggcggcaacaaatctcacggctttgctcttgtgcaagtttaaacacccaaaagagcaaactgatctcgtaagggagctagatgcaagcccactgtccgttgtccgggtcgaagttgaaatttccaatggtgagaaacgtcaaagtttcgaggcccacctcttccgtggattcgccgcccacgagacgattatagacgtggtgatgattatagacgccgcagcagcccacctgcaagacaccggtctcccaggaggagctttagccgtagtcggagcaggtccctttccagagagaggagaagagacaggtctttgtctccagatagaaactataaaccttcaaggtctttctcaggatcacgcagtcgttcgcgatccaatggtcggaagtgaagtcttcaagcccagcattgtcagaaaaagtgtgtctgtgcctgctctaacagactaggatgatgggaaacaacaatggaggtgttttttttttttgttgttttttttttttnttttggccccccaaaagtctttttaaaatgtttttcccccccatagtgttctaagtatctttttttacttaagatatctgtgcttaatgggtagtaatggtttcatcctgcctcaatgcttggaatgtaattttatgctctttgggcagagaagtgttctgaatggtttgatataggtgatcatttgaagacgattttgtatgctttttttgtttgtacttccattaaaatgttccttacga

SEQ ID NO: 586827 - DNA, 849 bp, Homo sapiens
  misc_feature (51)..(51): n is a, c, g, or t
  misc_feature (100)..(100): n is a, c, g, or t
  misc_feature (138)..(138): n is a, c, g, or t
  misc_feature (233)..(233): n is a, c, g, or t
ttgatgtacattcttgagggacgctaaaggcaaagtaaggtctgtcttcangctgtaaggggatggtaaagaaacaatccttaaggtcaataacaatttngtgatagtttagggggatggctacaggagagggaagancaggctgaagggctcccatggggaccattactttattaacggctcttagatcctgtaaagacgccagttacctgattttttcttaatgatgaatntaggagtattccatggagaatttgtgggctcaatatgtcctgctgcgagctgttcctgtactaacgcaatggcagcgagggttttctcatatgtaagtggccactgatcaacccacacagggtctgtaattttccaggaaattttgtcagcgtggggtacaggaatgtcaatggccgctacggtaaattttggtggaatcctaggcctgttttgtcttttttgggggtaatagtaatgggctgggtgattccttgattattttttcccaacccttggacggggagataccctggcttagcatttgggtcatgacagtatcgttgggactgcacatgacaagtttcatttgagagaggatgtcccttccccagagattgactggcagattggggagagacataaggggtaatgtgaccattattgccttcagagtcctcccacttaagcatttgagcactttgttgggggttggtggcctggccaataccgcgcaggtgagtagcaacggttgttaacggccagttcctcggccggtgagtgtaagatataacggtggcatcggcccctgtatcaagaatgcagaaaagagcttaccatttaattaagttcagggta

SEQ ID NO: 586828 - DNA, 225 bp, Homo sapiens
  misc_feature (225)..(225): n is a, c, g, or t
tcgtgtccccccgagctagcccgacggacaggtagtagggctaagggtcacgacgttgtgacggcgtctgtggcccccagacgacgcctctggtcgtacgagtgtaggctctggctctgtcgggcgtacgtcgggggggtctcctctacgtgtcgctctgcgggtctgcgcttttggctgtgcgccgttgttttcccgtgtcgtgtgtgggcaccctctggcgan

SEQ ID NO: 586829 - DNA, 1120 bp, Homo sapiens
gccaggcaccatgtccccgcgggccccccagccacagcctcctccggctccccactgcatgcagattgctgcatactggatggatgcaggccgatggggagggggcatgggccgcgccagcccggaccgggggacccccgtggaagatgtggtcatcgaagaggtaccacatccaccaggagcctgatccccggtgcagtgcagatggcgggattcttgtgcgctaccactacacacggcacttttgaagatggcaagaagttcgattcaagctatgatcgcaacaccttggtggccatcgtggtgggtgtggggcgcctcatcactggcatggaccgaggcctcatgggcatgtgtgtcaacgagacggcgacgcctacattgtgcctccaccaactgggcatatgggagacatcgagcactggccggggctcattccaccggatgccaccctctacttcgatgtggattcatgctggatgtgtggaacaaggaagacaccgtgcaggtgagcacatagctgccgacccgaccccggtggaccccgacatggtacaaggaccggcgaacataagaacagcgtagcagctacaaatgcgcagcctgactggcacgggcacctccattcggagcaccagcgtacagacaaggggcgggcactatacttgaaaacatatgtcgagcatctgtattgggctgattcaaggggaatggaaccaggggatgatgggacattgtgtacctggcgagagacggaacgattattaatccttcaaatactgggacatatggcgactcaagggtaatgggacaggagaatcccgccacaacagggcctaggacgagcgcatacgcagatcatcaatagatgacggtgaacaacacgaagaacgagacacagcaaaagcacagagcagacccccgggagtgagcgaacagcgggcgccgggaaaaaaagggaaacacaaaaagcgcgtgtactgacgcacaaatagacaaagaacgcagagcaagacaacagtgggcggcaaaacgggatgaaggaaaggaccagcacgagcgaaagccgcccagtgaacagagcagcagccccacactcacagtagagcagacagcggcg

SEQ ID NO: 586830 - DNA, 1059 bp, Homo sapiens
acgaagaataaagagaacaaaaaagaagaaaccagactagcagttagtgtatcattcttactctatcatgttcttgcttgtgttatggtgcatagtttattcgttttcactacatgtgctttcccgcatcagtcctatgtggttcgccccctgtgtgtgtctctctcttttctggcgtcgtgtttgtttttgtttatcggagtgtgtttcttcaggggtgtgtccacatatattgtgcccccgtgttggcgcttatttttcacaccacgtgtgtttggaatccccgcggtgttgttttttacacactgtgtgggatgctgttcccagcccccttgggtgccatatttggtggcgttattaccccctgtttccactcctttggtcttttgtacttggggtctatttctctggtggagatacttgttgcggggcacaattttcctcgaaaggtggggtttgtttctcccgcctttctttgtggtggacattttgtgcggtccacgcggcctcttcgtgggttgatcttctccctctgttctcttacgcttttttgggcgtctcatgatcctgtttgctgcgaaccactctgtgcgaccaatatgagagtgtgtatgtggctctcgacctccctcgtcggtttagtttgtcggcatacttttccctggggcccctctcgttgggttcccgcctctttcttttcgtggtcggccatctagtgttatagatatagcttcacccccttcgggccatctcccctgtttgtgtgcagagaggttatactaccctcttgtcaatattcttttgggcgcgaaacgttttctgctctcccacttattgtgtcatattttctcccgtgggaaaagtgtccaaagaactggggcaccttggggatatgagggcaacacagattctacaaaaattgtgtgagtgttcgcttaggccctcttttgtttttcttccccgccatatctctgttatctgttgtcacgaactttggcgaggtatttagtacaatctgttggagaagggaggaggccgccccgaacatgatacaaaaat

SEQ ID NO: 586831 - DNA, 673 bp, Homo sapiens
  misc_feature (505)..(505): n is a, c, g, or t
  misc_feature (578)..(578): n is a, c, g, or t
agcagtgtctcacacctctaatcccagcactttgggaggccgaggtggacagataacctgaggtcaggagttcaagaccagcatggccaacatggtgaaaccccgtctctactaaaaatataaaaattagctacgcatgggccgggtgcggtggctcatgcctgtaatcccagcactttgggaggctgaggcgggcagatcatgaggtcaggagatcgagaccatcctggttaacatggtgaaaccccatctctactaaaaatataaaaaattagccaggcatggtggtgggcgcctgtagtcccagctactcgggaggctgaggtaggagaatggcatgaacccgggaggtagagcttgcagtgagctgagatagcaccactgcactccagcctgggtgacagagcgaaactccgtctcaaaaaaaaattaacttggcgtggtggtgggcgcctgtaatcccagctactcaggaggctgaggcaggagaatcactagaagctgngaggcagaggttgcagtgagctgagaatgtgccagtgccctcctgggcaacaggagtgaaactctgtctcacnggacataatataaattagtggtctttataatgttgctgaatgaattttgttcagacaccaattttttaatggattacgaacgcgttaataatatt

SEQ ID NO: 586832 - DNA, 100 bp, Homo sapiens
gtatttgttcttccaccattcctatctgtctacttcagatctgaaatgctggctccctcctgtgtactcctcctctaagcatgtgctcttcaccggccat

SEQ ID NO: 586833 - DNA, 384 bp, Homo sapiens
tgatccccggagtgatgcactgtatctctctgaactggttgttatcgtgtctttgctgaatggtggtgcgggatagcattgtctccaccgacacgcacctgtttctagttatcgctgggtcatgttcaccgttagcaaagatcacagactaaggagcattcagtcggatatttgctttgctggcacatatttaaacacacgacaattcattatctttggacacatataaatattttgttccctgtcctttattgcaatataatcatgaccggccatggttaactacatcagatacacgttacagtcgtgactgggacatgccgtccgtaatacaagtgttcttgggttaaaggcaggcggctttttaattaaatcttaaagcac

SEQ ID NO: 586834 - DNA, 1039 bp, Homo sapiens
  misc_feature (87)..(87): n is a, c, g, or t
  misc_feature (435)..(435): n is a, c, g, or t
agaccgccttttctcgaggttcggccccccgcggtgcagcgcaccaaagaaggttgttcaacgacgcccactacggcgtgtactcanggtccccacaaagttgggcgcccgggtggtgcccagagaacagaacccggggcccgctttttcaatcggaagaacacacattctcaaaggagcgtgtggtttttgggcaacagggtgtacgaccacccgcagcaacgacacaaactacccgagggggggcacaaaggtgatgtctcaagagtagccgcctatttttctcctggccgccgtgtgtgttggtagtgccgcccccgcccgttggccctttgggtggtgaacgccggtgggtcccaccaaggggcgcttttttttttgaggggtcgcccccgccgcccggtgcttctttttggggagacccactccttggtnggtgaatccaccacacacaccccacccgccagacaaaagtgggcgccccggcgccctttctcttcgacacctgctctcctcggcgacgaccacggtgggacgggacaaactttcgctcttagattttccacaccacaccaagcgagggtgtttattcacacgaacaccactgaggtgcccccacacacgaacgaactctgcggggttgggcggccaccgcgagacgcttgatcggacacaacaaatatgttctccttgttttttcacggggagtcattacacaaggacgtcatactccacagaagatggtagagcaacactggggacaaaggcagcaccctcctccattgtccgtcgcccaaccactctacacccctctcagcctgtgtagacccaaaccacacaagccccaccactttcccctttttaacacaggggtccccttagaaccagccaagctcttgttaacaacagaaggatcttttggggggggcccttgccctaaacccccccccccggggggcacaaacccccccccaaaaaaaaaacatccaaaaaggcccaattttgggaagggggaaaccaaaaaaatttccccttttta

SEQ ID NO: 586835 - DNA, 127 bp, Homo sapiens
ggctcgaccgatttcactggttgatatattgctgcactgagtgtgtgcatttttattcaaggtcatcgtgaagctgagaagtttcgttgataaccttgaataaaaattgcacacactcagtgcagca

SEQ ID NO: 586836 - DNA, 121 bp, Homo sapiens
cacgactgggtagactggaaagtgaggaacaagttttcaagccaggtcttggtgcattcagcttttcagtttttagctttttttgcagcacaggatctccctctatgcccgggctggcagg

SEQ ID NO: 586837 - DNA, 134 bp, Homo sapiens
  misc_feature (12)..(12): n is a, c, g, or t
  misc_feature (15)..(15): n is a, c, g, or t
  misc_feature (17)..(17): n is a, c, g, or t
  misc_feature (45)..(45): n is a, c, g, or t
  misc_feature (47)..(47): n is a, c, g, or t
aagcgggagcgngangngagaagctggcggcgccgtcgggcccgngnccgggccatggagctgtggccgtgtctggccgcggcgctgctgttgctgctgctgctggtgcagctgagccgcgcggccgagttcta

SEQ ID NO: 586838 - DNA, 1208 bp, Homo sapiens
  misc_feature (433)..(433): n is a, c, g, or t
  misc_feature (471)..(471): n is a, c, g, or t
tccgtatctgcttcgtggcttccacctcatttttttcggcttgcccattctgtttcagccagtcgaccaagaatcatgaaagtcgccagtgtggcttgcatccgccactgtcgccgtggtccccatgctgcgcgctttaatggcctggctaatgacaggcgacgcggtgcggcgcgaggtggtgcgcttgtctgtctgagcacgagcgtggtccatctcgcgctgctgccgggggcgtccggttgcgctgcctgctcgtgctccatgactgtactgatggcatgcaggttatgctgtgcttggtcttactgacttttgacacagtggctagattacgtcgacagcgcattcaaagttgatcttgagtttgcctctatctcgtgtcctctctaataaactcatgcaaaacggattgaagtcgatcaggctgggnacgcaatttcttccctagctagctgttctatcatcacntaactattcagtggaatcctttcaggttcgggaagcgttgaccaccctgccgtgaaaattcccaggataccctttttgaggaaaaccccccaccgcggtgtgggccccgtggacgggcgctcatagacccggtctacctgagtggcttcctgtgtccaggcaaaccactatcgaatggtcgtggaggaactcaaggggacctcttggtaatgaggcctccgaagcagctcggatcattgactagttcgcttgtcaggtgtaccgaggcggacatattcgtagggtgtgattccgacttgtgaaacggctgtgcctttcccgccaccaaattgggtaaacccagggcaggggaaacaccgccacaaagcgccaatttccaagcgggcgtggtccaataggaaaggtgtacacttgttcacccgttttgcctttctgtgttgcgaggtttcattcccctcccacggaaagcgagcgggcccttctgccccctgcgaagtctttagacggctgggaactgaatcaaaatcgaaccctggaatcctgtgcgttggcgctcaatcatggggaagtccctcttttatagcctttggctattttcccacggccgtggggaggcgctttgcacagcggtcgttaggaggtgaccactttgtgggccgacggtactagatgttgctgggccttcccattcgttccttgggacgcaccccgtaacttaagttcacaccccattgtag

SEQ ID NO: 586839 - DNA, 635 bp, Homo sapiens
ctggccacagtatgaggtgttttctaaggcttgacattaggtatttcctagtgcaaaatttactgatcccgcgtaggctccaacctagagccaggattccttaatggaacacaaactgatttactttgaatatactcaagcttcacagcaaacacttcctgtttctattactgtccaagtcttcttaccatgcctgaggcagacaatttaaggcttgattcctcaccctttcccttcatctgctgaaatcccatttagttttagtgcaccaggcatgcactggtatttcatcctatgcattccttccacagcctgacctataaagggctgacactgagtcctggcttgttcagatcagagagaattaacacttttatttctttgatttcaaaagcttctgaggtaacttttgagctcgtaaatgtcaataatttgttgtcaagacaattatattcttaacccagctgctacatatagggaacatagagactgacagaaagtcagtgaatttagaattaaaacagttaagtttatctgattgaactatgcttctcaaaatgttaaatggatgatacaaattaatacaaccaattccattttatttgggtttgggttttggtttttgaatgggttta

SEQ ID NO: 586840 - DNA, 106 bp, Homo sapiens
cgaagccagtcatgcctaggcgaaaggcaccgacaccaggcatcgccacagtgatgctggtagaagccacaccaggcccatccagccacctggccactgctaggcc

SEQ ID NO: 586841 - DNA, 169 bp, Homo sapiens
gggccccggccatttgccccttccccccccgggggttttccccccgggggggcctgcccccccccggaaaggggggcccggggtcccccccccctgggtttcccgggggggttgggtttggggtttttttcccttttggaaaaaaaagtttgttggggcggggggggca

SEQ ID NO: 586842 - DNA, 1504 bp, Homo sapiens
  misc_feature (300)..(300): n is a, c, g, or t
gaacttctaatccatttgcccatcgtgaccgagttaacgctggaactcctcagagcggacttagaaccatgggcagagggctcctaaaagggagagagagatctcaagctaagagggagacacatgagcccaagagagggaagtacaaccgaatggcacaggatccccgggaaggagacaatcgaatgggtgtcggaggagcaatgaaacatgggaggatccctcatggttcaggagccagaaatttccaccttctaggaggtggtgctgcataggcttatgaagctaatcctggcgttncaacagcaaccatgaggggttccaagatgggaagtgacatgcgtacttgagcgctttggcagggaggtcggggcctgtgggtggacagggtcctagaggaatggggcctggaactccagcaggatatggtagagggagagaagagtacgaaggccccacaccaaaaaccccgagttttagaagtgatatttaggctttcattcccgtgttgttttgtttttttggtttagagtaccaatcgttttaaaattctgtgcattttagtaagcaagctatctttttatggatgttagcagtttattgacctaataatttgtaaatggtctgtttgggcacggtaaaattaatgtaattgcagtgtttggaaccacggagaatttttttttcctttttatttctttatgtttttcttttttacgtataatgtccctcaagtttatggcagtgtaccttggccactgaatttccaaagtgtacccaatttttttttttactgtgcttcaaataaatagaaaaatagttataatatggatcttcaacttggccattcaggcttctatgcatattaggctacgtattccactttgaaagcttgagagtgtctaggcctttgaatggcatatgccatttctgggaaatggcatctggaggctaagtatggctttctacaaataattggcccccttggttttaaaaaagaagaaatgcatattggacagtagttggatcgattggttgggcatataggaagcacgctggtgctaagtatttttaacagggttatgtaagcaaagctgaactgtaaatcttcaggaatatgtcttacgattcgtgcaatgggtgtaacaacaactgggctagggggctgacagcttgggttggatacacactggatctttagttgggccctatgatctatcctttacttgaacagctttcgaaaacgtggaaaggtcactttggctggcattcccctcatttctgtgttttttaacagaccaacaatttctcaagacccttataaatgcgttgtattgaacccttttacattctgacttcacgattgtgaaccctgaagtctttccatgtatctccagtgcatctataatcgatggggctgcgtctaacaaacacaagcttgaagtaagaacgttcgtacctgggcgggcgcgtggttcagccctgtatcccggcattgggagct

SEQ ID NO: 586843 - DNA, 267 bp, Homo sapiens
  misc_feature (51)..(51): n is a, c, g, or t
  misc_feature (61)..(61): n is a, c, g, or t
  misc_feature (65)..(67): n is a, c, g, or t
  misc_feature (83)..(83): n is a, c, g, or t
  misc_feature (87)..(87): n is a, c, g, or t
  misc_feature (145)..(145): n is a, c, g, or t
attcgcggccgcgtcgaccacacatcgcaaataagttcctgagaatgcttntgtctagttnttannngaagatatttcctttntcancataggcctgaaagcgctccaaatgtccacttccagatactacaaaaggagtgattcnaacctgctctatgatagggaatgttcaactctgtgtcctgaatacaaacatcacaaagatgtttctcagaacgctgcagtctgcaatttgtagtcgacgcggccgcgaatttagtagtagta

SEQ ID NO: 586844 - DNA, 738 bp, Homo sapiens
  misc_feature (51)..(51): n is a, c, g, or t
  misc_feature (61)..(61): n is a, c, g, or t
  misc_feature (65)..(67): n is a, c, g, or t
  misc_feature (83)..(83): n is a, c, g, or t
  misc_feature (87)..(87): n is a, c, g, or t
  misc_feature (145)..(145): n is a, c, g, or t
attcgcggccgcgtcgaccacacatcgcaaataagttcctgagaatgcttntgtctagttnttannngaagatatttcctttntcancataggcctgaaagcgctccaaatgtccacttccagatactacaaaaggagtgattcnaacctgctctatgatagggaatgttcaactctgtgtcctgaatacaaacatcacaaagatgtttctcagaacgctgcagtctgcaatttgtatgaattcccgcttccaacgaaatcctcaaaactagccaaatatccacttgcagattccacaaaaagagcgtttcaaaacttctctatgaaaagaaaggttctactcctttagttgaggacacacatcacgagtaagtttctgagaatgcttctgtctagtttttatgggaagatatttcctttttcaccttaggccggaaagtgctccaaatgtccacttacacacactacaaaaagagtgtttcaaacctgctctgtgaaagggaatgttcaattctgtgacttgaatgcaatcatcacaaagaactttctgagaatgctgctgtctgctttttatatgtaatcccgtttccaacgaaatcctcaaatctagccaaatagccacttgcagattccacaaaaagagtgtttcaaaactgttctgtctaaagaaatgttcaactgtgttagttgaggacacacatcagaaacgtcgacgcggccgcgaatttagtagtagta

SEQ ID NO: 586845 - DNA, 238 bp, Homo sapiens
gttctgtttcagatcagtcaccactgggaacccagtggacctctgtgggactgaactcctaaacgcagggtgcgggagctgagcgggagaggtgacctccaactgtgtacctgaagttcgtcttccgcttggctcaggacaaagcggtgtaacgagtcacggtctctgcctccattgtgctcactgactttcttccctcctcggaagaagccataacgtgagaacgacccaagttacg

SEQ ID NO: 586846 - DNA, 1089 bp, Homo sapiens
tatccgcgacgtaccggacacacctgtcccagcctatcacccgtacaagctgcccagtccgactgcaccctaccgacaggaccccgcatctccactcgcaagccccacgcgcgctcgctctcacctatgctgccgtcctagtccaacgcacactcctcccactctcttcctcctcaaccctccctgcgcggcctcctctcgcccggctcccacgcgagctcgacctggacccctcgctcccccccctgtcctcgcgcccccctcgtccctgcccccctccctcctcctcccccccgcccgctccccccgcccaccccaccgcccctctctcctccccctccctacctcgctcccaccgccccctcccctgtccccctccccctctcccccctcgctccctcctcgctccaacacgcccgcccccccccctcccctcttctcgccctctgccccccctccctcctcctgctctccctgtacggaccacaccacacacctacccgccccgtccaccccacgctcctcttccacaccaccaaccgcccccatctaccttcccatcccccctcctcccctcccccctcttctccctccctctgcccacgcccaccccgcccccccccccctccccccccccctcccctcgccctctcccacccctcccctcccccccctcctccttccccccccaccccctcctcccctccccgcgccccccaggccgcacaccgcctccccctcccctctccccctccgactcgcgccccatgccgcgtccccaacgccccccccgcacctctcctcctcacccctcctcgccccacaccctgccccctcacccactgacgccacagcagctccccccctccctgctcccgtcaacggccaccacgtcacatcgcacgcgcgcgctcctctcccaccccccgcacgctgattccctggcgtgactggagtgaggccagcgcctgctggacaagaaggagaccatccgtaccagctcccagcccgccgccccagtgcctgacgtgcatgtccccgacggcgcgcaccctctcaccgccgcccggcgcgcgcgccactcccgcc

SEQ ID NO: 586847 - DNA, 354 bp, Homo sapiens
tgaattcactgcccagtacttgtctcatttcccaagcctttatccaattctcagccactgagtagggtaccacctgggtcatagtgtgctagatagtttcagccagaagcctggaaccaaggtctgtgctggccctcttggcttctcagggggcttccctggtcatcctccagcagcacctgtcttagcgctgggtggccagcgtcctgggctgtgtagacagggacatctttgtcccagagtgcagcctgccccttgataatgtcagctgccttctctgcgctcatgatgtgtgggggcgttcaccaccccgaggacccgtgtctgcggatccaccgcgacagtgggatcgca

SEQ ID NO: 586848 - DNA, 285 bp, Homo sapiens
cgctattcatcggcacctgctggtccactggagctcgtgtgcccccggagacgtggtgagcctggtccccctgtgacctgctggcttatgactggatcccctggtgctgatggataacctggtgctctcgtcgagtctggtgatgcgggtgctaactggcgatggtggtccccttggaccctgtcggacccgctggtacccctggaccccattgataatgtcggtgctcctagagccaaaggtgctcgcggcagcgcaagaccccctggtgccgataaatagcga

SEQ ID NO: 586849 - DNA, 299 bp, Homo sapiens
gaccactgagtcgcaacatgtggcgtgggtcccgcagcatcacttaggaaattgtgagaaagacagactttcagacccacaggatcagaagttgcatattaacaagactcatctttacatgactccaggtgattcatgcacaaattaaagagacatttttgtaaagctcccagatgattcagaagatgttggtccatgtaccgcactttgagtagcatttaacaggagtctaaatgttgtaaatttggaattcatcttccccctcagtagtggcaacaaaaggttcgttgtcatcctta

SEQ ID NO: 586850 - DNA, 877 bp, Homo sapiens
cgcgagatttgaaggagcggcggaggccagagggaggagaggaccggaagtccttcatctcaagcatccaagtgctgaaagacggcgtgagttttctctaccggaagcccttttccagtaggcctgagaacacggtcccagcctagcatggaagtcccacctccttgtagctcctgccacccttcccgaaggttttgctgtcacctgtgtgaggctccgttcccctttccgctgttttatccccgtaccagaaaaggatacatttaggtgcctcccacccagctccactaaagcgggacgcgcggcctcctcagcctctttcctcccggctgccgattgcaccctgcgagcccttccctgcttcctgtggttgtggcccgcttgtgctgtggggagctgtgccccgaccgggggctcattcgagcgacctcggaaccacaatgccagcatggactttgcagaccttccagctctgttggggctaccttgagccaggagggctccagggtttcccttgtggaggctcagcccagacaatgcttgggcccatttgccccgacatcccagccctggacaagggttcagcctttatagcgctgttcagagagattcgacttgcaactttgacttcgaggtccttatgtgcccagaggggcggcatattggtgccgctgttcggtaaacaatggggaattccactgcagttctgaacgatggtgtggcactcattgacggaatccaggcagcagatcttggatccccgtctgtattcattggggagacaaacgtcgaagtacctggcgtgcctctctgtctacagaaagggcccagggcatggcccgacaactccctggcattgcttacccttaagaatcgc

SEQ ID NO: 586851 - DNA, 539 bp, Homo sapiens
  misc_feature (193)..(193): n is a, c, g, or t
agcacacagggccttgtgtccctctggcttcgggggacttggtcgactccatctctggatctcattccacttctggacccgagagctaggcacagatctatactacaggctgtcctgcctgtctcggggcacgatgtcctacgtacaaagtcacggggtgtccaccccgtcatttcacaccatgacagccgtngaggctaatttgcagggtgactctatgaacactgtgtagtcctttcgggttgttcatatggcccactcccataggacacatatttaattcatcagaacatgaaacacttggcaggcacagtggctcacccctgtggctccacacttttggaggccgagatgagagcgtcacttgaggccaggagttcgagaccagcctaagcaatatggcaagatcctatctttattttaaaacgaatgaacaaataaaaaacaggaggctgggccgtggtggcccatgcctgtgatcccaacactttgggaggccaagggcgggtggatcgccttgaggtcaggagttcgagacc

SEQ ID NO: 586852 - DNA, 999 bp, Homo sapiens
gaaactcgcccaacaatcgagcgatcatgaagaacgctagctaagaacggcatacaatacagcgcgcccttcggagcaagcactggcgctgtgaaggaacacacacggctgggagacaaaaacaacggtgtgtgcaccaccgcacagggtgcctccaaagggcccagggtcgcctcgtacgaccagggagcagctgccctacacacaggggggcccgaccgccccccagagtggtgcgcgttcctccgaccaagcaacacccggggacacttgcatcgccagcgagcgtggcgtttcaataacggctccaaagaagcgacgccgcccggtgaaacattacagggagacactccctcaagtgggaaaacgagggagactcttcacacagcaggagacaccaaccagccaacggctccaggcgtctgaagaccgttccccctcgggccgggcttaacagcgttgagagcccgccgtccggatggggccccagtaaggccgcaagtgcggcacgccacgcccaggccgtgtgggaacaacaagaagccccctggcgatctgctcctgtgtcccaagacgcactcgacaagtgtgtcgcgcaggctctcacatcagacaccaaaaactgtgcgcagggcggaggaggcacccccccgccccccccggggccccaggaagcgcccgggtcgcccccacctgacaaccgcggcggccgccccccggctgcgacacgttcgtcgcacctccacgagaagagacgcgggcggagacaggcccccaacgtgcgtcgtccacaccatagcaagctgcgcgtgaggatcgacaaggtgggggaatctccccgcccgagaacaatagaaacatcatgcagaaaaaaagaatagcttcaccgaaaaaagtgagcaaggagagcagggtcgtcgggggcataagtgcaaagatccccgagacccggcagggaggagggcccaacacgcgcctctccccttaaacaaaaaacat

SEQ ID NO: 586853 - DNA, 697 bp, Homo sapiens
  misc_feature (333)..(333): n is a, c, g, or t
ggtggccgatctagacctagtggatccttttggctgcaggaattcggcacgaggttttttaaaaaatacatgaaatagagaaatgataatatctctagttagttagaaaaatatcatcttaataagaagctaaattgttatgccaactctccatcaaagccacttcttctaaaagtaacatgaatacttatttaataaaaagtatacctttagggtacattggtttttaatttacattatttgaaagctctacatggttctcaaggataactagtcagtgggtaaatctaaatgtttacttaaacagaatatgtagagtgactcaagtattgnactagtttgtcaacattttcttttcaggctgtgatgggatctgagtgtttatcactagtaatctaatttttcttcaaaatttaaatctgtatgttttagggtccccttctatactgctttattagagactagtcgtttgttggtaggctggttcaggttcttgactttgctgcacaaaagtacttgagaacaaagtcaaagttatagtagggaaagaaagttattgtgaagcaaaaggtctccgaatggcagaaccgccactcggaagagaccacccccagtccctcaagggaattccccttacgcgccctgcacatccaccttatcactcgtcacgccatctccaccggttacctgcgcttcc

SEQ ID NO: 586854 - DNA, 672 bp, Homo sapiens
  misc_feature (547)..(547): n is a, c, g, or t
agtatagttggtagtgtaaaggaagtagaactcatacctactgttgtaatggctatcagaaggaagacatttactatttattacggcgaattcaagatattgtctgattcccgaatgaataaagcatttgttagctggcaaagttgaagtgtcacagagaattaagacagcagacagagcaggtcattatagtaccaccatctttatcctatggctgatgatcttgttctcaagaccgtgtctgggtttatatagatgaggacgtttgtgaatgatgcaagttaatctcaagaaagttatacatgaccatgaaaataatctatctgccatatgcctgtgtaaagctggatagatgtctcgagagcatagttctctagatgacactgttgtgaagagcagttacaggaagctacccaggcattgagacaacttgaggacatcaggaataatgcaatattcagagatgagacaagtacttttctaacaggttgccgcaaaacgaatgagaatcccaagagtattttgagtcaaaagcgtctctgcaagnatgacagcaacgagcatttcaagcgtgccgtaaggtgatcgacggtttattgagaaagcattctgcaggtcggtaatgctggtggactacctattgtcaggaactcattcgtcacacttatgaac

SEQ ID NO: 586855 - DNA, 360 bp, Homo sapiens
gggcacgacccaaaccagctttgggagggttttttgtcctatttttgactttacttggggggtgcccatgttcattatattttcaaaggagaaaaaaacccttgtaaaaaaagcaaaaatgccaccagaaaaccatttttattccgagcattccagtaattttttggggtaggtatttagctgtactataagaagttggtttgtatgaaatggttaaaaaggccaaagataaaaggttttttttttttcctttttggtcaaaaaagttgctgtttattttttttggcctgtttaaggtatgtgtgaaacaatgttgtccaccaataaacaggaattttattttgttgagttgttttacca

SEQ ID NO: 586856 - DNA, 308 bp, Homo sapiens
taacaagacctatacttccaggatcatatctatagctcatttctaggaaaatttcccgacatgagtagagtgctgcaaataatggtttctacagatagtatatgcacagcctcatgttagcctcaacacaaaaaccatacagtggatacacaaaaaagtaaccagccagaagctaaatcatatcactagagaaaatcaccttcactaaaaggaagacaggcatgggggaactcacgacggcaggcagaccaaaaaataaccaggaaaacaacaacttgtacaggagtaagtccttacttatcaataat

SEQ ID NO: 586857 - DNA, 239 bp, Homo sapiens
agcgatgcgatgtgatctagaggatccgatccaggcgttgagctctctttctatcattttcttctctcagatgtctccgtgctacctttcctgcaatatcacctgtgtcactgcgtctaccagcatccgtacctgttcccccatcttcccaatgcccacgggacccacatccctgagtatcccaaagccctcacagactcaatatgctgccaactcagcctgttgttcttgccactcta

SEQ ID NO: 586858 - DNA, 244 bp, Homo sapiens
  misc_feature (28)..(28): n is a, c, g, or t
agcaggagatttttttaataataaacancaatggagaggtggaaatagagatggaaaaacaggatcaaaggagcaacatatccagtgacttaaaaaaataatcacacgtggcaagaagttttctaaagtaaactgtatgtggggagaagcatacagaaaaaaacgaaatacatacacccccaggtttgaaagaaaataattttgagttgtatcaatctatcgatatcaaagaatgaatgaccgc

SEQ ID NO: 586859 - DNA, 260 bp, Homo sapiens
ggtcggtccctagactggagcttaactcgggaggcggaggctgcagtgagcagagattgcatcactgcactccagcctgggtgacagagtgagactttgtctccaaaaaaaaaaaaaaaaaagtcgggcttgggggcagggtttattgaacttagaccctagtgatttttctgtaatttaaaataattcataatattttctcggggtctacttttggggattccaatggaaagcccaggacttggagactctggtcccaa

SEQ ID NO: 586860 - DNA, 537 bp, Homo sapiens
  misc_feature (509)..(509): n is a, c, g, or t
taacccatgtatattgcacttcattagttcctcaccactgggccaagatcatgctccaccaaccctctctgccccctcactttctttccttaagtgaaacccctaaaagccctctttgtgcccaaagcttacctgctcttccttccctatattcttggccagacacaaaaatctgatgctctggcaaatgtagaaatagggagaaggcagaggaatcatttctcctctcttaggtaagcactgaggttaatgtcattccactgtgtgaggaattaaaaaatgaggcatagagaggtgccgtgatttgcctggacacatgaagctgtcatggcagaagtggaacaaaggctcaggtgtcccgaatgacagaccagctcctatgccttcagaatgtgccatggagggagacacttgtggaccctactcatgctgagcactcaggggtacccaggtgctgagagtggggacataacaagctgagttgactcaatccagtcctcctacaccanataaggatggaaaccctcacataataga

SEQ ID NO: 586861 - DNA, 330 bp, Homo sapiens
  misc_feature (10)..(10): n is a, c, g, or t
  misc_feature (13)..(13): n is a, c, g, or t
  misc_feature (15)..(15): n is a, c, g, or t
  misc_feature (29)..(29): n is a, c, g, or t
  misc_feature (318)..(318): n is a, c, g, or t
gtaacttctnccncntgccatggcacagntaaactgatgtggcacactgatgggcgtgtcttatggaaagctgcttctgccccgccctgttttagctagtcctcagtttggtccggtgtctgagtcccgcttcctgagtcccacctcctgccttactttgctcctttgtaattaatagatcttgtttggtgatctttgaggctatgcaaaaatctgttttctcatacccctttcacctgacagttttggcatccattggcctttcttgccagaattaatgctattatggttgctaaatggagatttttttttaatccnaccattgcttct

SEQ ID NO: 586862 - DNA, 700 bp, Homo sapiens
ggcagtggcggcgcccggagcctttgattccatttcatcagtagtgtgggctctattaggatcccccaggaccccatcgactgatgccatggtgtgtgccctgtgatgccctggcaaccctgctgatggctgtggggcctgtgcctcggcatttggcagacttccatgtggctctgtgggccctgaagagatgaccttcctgagtgtggcgacctcatcgagatccttgagggctgcatggtgccacagacctgccctggtgcagtgggcctgagcactgcatgacctcgtgtgcctgtgtgtgtgtgtgttttggtgcgggatgcaagacctccagtcagccattgcatgtggcacacctgatgatcctgatgtctgcgaacatgtagccgcatttattactccacattgcagtgacatgacaaatggtcatttcttacacgactgatgggagcttggctattaccttgacgtgacgcggcatgcccagtgacactgctgcctcggagtgcagagcaatagtcatggggcgatcctgaaatggtccatggcaacgatggtggtaccaatgcccctggtggaccctccatgtcagccacgtgacacgctgtgagaacctggaggccatggcctgcgcacggtgcacacaactgacaaagtaacactcccacccattgaccttgcagcccctgtgaagaca

SEQ ID NO: 586863 - DNA, 496 bp, Homo sapiens
ctactttaagtgtaaaaaaatctgaacaggcagctttcccagaactggtctgcatctcaggggaagaggcacggttacgtgtaatggacgggcaccatattagtgtactcctctattttctgtggtataggatgcagtgacatatattggacgagagatgagaaatggccatgcttccttattaagtgcacttcacgtgaactgactgaaaacttatactcgtgtttgttactataaggacttgaaagttatcaccataatggactcttgtcttcaaaaaatgcttggaaatactccattttcacaaagttttcaggacgactctgtttagactatttttccctgccagggctgtgtaaaatgtattccccatatggctgaaaacaagaacaaaaacaaacactggagatactgctgctcaggcccatctgacatctgcttgtatagaccgcagaaatctggctgcccacggagaacgatattggcatgggtaccg

SEQ ID NO: 586864 - DNA, 107 bp, Homo sapiens
tgacttagaggatcccaagctccaacaagatcttggcaggacagtggtgcgtgcttgcagtccagctactcaggcagctgaggcaagaggatcgcttgccctaggag

SEQ ID NO: 586865 - DNA, 1111 bp, Homo sapiens
gtgttaatactcccgggtcgtttgttgtagacccttggattctccctgtgtctccctcctcaccgttgtttttgccccgctactgtatgaaccctcggggtccttcatctgctctcctctgtttttttcttcttgttcccccggtggcgggactatacagtttttgtcatcacgaggaactcctcgattgtcactccttttgtcccctcttttttgtgccctatctatggagacaaacttgttttttccatatgtcggtcctggtttcctcttttcccgcgatttttcccgggggtgtctctatcttttttggtttccccctcgggtggcccccttgttgcgagttgtttgttttctgtgctcacctgctctttctatctttttttgtcgctcattattgtggctttcctgtgacactatctgtgtgattgtctttggtcgtggcacttttgttccctctgtccccaaattttccctatagtgcctcccccccggtggtatctctgtggacctcttttagtaagattgagtgtctcctcggctttctttttttttttcttaaggcgacactcccccctcttttttgcggcggcttgtgtttgcccacttgtggtgtgtgtcgtagtagagtggccctatattaatatttgtgttataacttctcctggaccctaaaaaaaagatcgatttcttttataaagaataaccctcttcaatccccatgtgttttataacatgggcttttgcccatatgtctacttcccccacacactcttctcttcgtgtatgtattccccctccccctcaatattatcggggttccaccacaggtggtgtgaaattactccatgctcatctacttgtgctcacacctgagatttctcaccatacacacattgatctgtttttttgtcggcgtttctcctcacaacgggggttgcaccccccaggcgccgcggttaaaaaggagagaaattccaccaaaagggccaccagggtggggtcgtggggcctagaaaaaacaaaaggagggggttaaaccacccttcccccctgggggggtgggtttttttttttttcccccccaaaaaacaaggttacccccttttta

SEQ ID NO: 586866 - DNA, 958 bp, Homo sapiens
ccttggttcgacggggctcttctcccctgggtgtgctgtctcctccccggtgcgtgtcttccgcccgcggttgtgttgccgcggcacccccttttagcggtgcggtgttttcggagcgcattataccccggggcgttttctgggccggataaaccttcactccgggtgtctgtgtgcgccgctttcgtcggagtatgcgttactgcgggtcgttgtgactaaatcgggatcctccccgtagtcccccggtgtcgcacggggttattatctccctcgcagggcgagtctcctcccgcgcgtttataatgccgccgttgcgcgacgacgtgttctccgggagcagctgctggtgggagaccccggaagggtccttttctcgtcgcggtatctcctcgctgcaccaggatgttctttgcccacaaaacaattctctcgttgcgatgactactcccccctcacacttcattcttctcccctccgcgtggtatcgacacaattgaggcctccccctatccatttgctgctcgccccacaccctttttcattaagtttagatcttctcgcctaagttcgctctcctcactccactacgcagtggtctcatacatcataagaacctctcttcttcacacatctattattgttataaacatcaacaacacctttctccctcctcttatagctatcccccgacgccactctagtactgcttttcctctcgcaatatctgctcttgtcatcttggtatcacctcccacaaaatttataggtgtttctcaactatcaaagcaaatattttgttccccccactcctgccacaaaccgagcgctccctctcttgagcacccgacaagtggatcatatccccccactactttttctgaacaccctctgttctgggtaactatctgctgaatccctctcgggttagaaaaaaaggtgcccgcgcaacaaaaca

SEQ ID NO: 586867 - DNA, 633 bp, Homo sapiens
tcacaactctgtttcaagggtttattggaaacctcctgattataagggtcctggccttaaaatgaggatccaaggggggagaaaaaagagtgtggtgctttgctcgagtttgggaaaggtctcacgagggagagtttcccccatccctatacttgaggtttgcgggaggaaatgtgagaacccccacgtggtctaacaagaaagaggccacacgagctcctactagagggactcgtggcattgtgagtgacaactaggttattccagtcaccgtggggcgcatttcccattgtgtattttccacatgtggacaagaaccatctcgcggccaggcaaatttgggagaaactctcgccatatccccgtgaagccacagagttatattcctatagtgttccgtgaacacccatatgtgttgtgcctccgccaggggcacgtgtggttgtgttcaaagtaattaggagagttgtgtgtcgcccccaagacaaccaacagtgggcggtcgcagggtctcttgctctccccaacaaactcattatatacccacaagttctttccacttcgaagtgagcgaggggccacgtgcccaagtgtgcctcttcaagccccaaagttccctatggttcaaagggg

SEQ ID NO: 586868 - DNA, 205 bp, Homo sapiens
ctgactagagttcccaagcttttaccgcttccccaaactctttactgtgtttatttcaaactttattaaaagatattttctatatttctcttattatcagttctgttattaggttgtctgtcttatatagagtttgctttttctcaaatatttaacatgtctgttcattttattttagaatttatttctgttatgattgcggtaa

SEQ ID NO: 586869 - DNA, 1337 bp, Homo sapiens
tgggtgtgttagttttgtttttttttggtttagtgggctcaccgtctggctgtttgctcggatgttcgggttgttgggtgtgtgtgttgtcttctgtcttcttcgtctgtttgtgtttttgttttttgttttgttgttgttttgttttggtgtttgttggtgcttgctgtttgttgtctttcgtgttttttgtttgtttttcgctcttctctggtcctgctgtgtcttgtcgatctagcgtgttcttcctgtttcttgagtgcggctatgcgtttcatgtttctgtcggggtagtctctgttgttttgtcgtctcgggttgtgtcgggttgtgcgtcggggtagggtgtgtcggtgagctcgttctacttcgagttcgggttcgtgtgggttgtgttagtgtctggtcttggtcgttggcgtgtagtgtgttatgagaagaagaagagcggcgcgcggacggcgccggttattattaaaaagaccgcgccgcgccgtcttttgttttttttttgtcttccctcttttgttgctgtcggtggggggggacagtctcccccccccccttgtgtgttgtggctcccctctcatttgtgtattacccccggggggggggtgttggttactctccgtccggcgcgggggtggtttttattgactgtgggttcaccgcgtggggtgcgtgggggtgatatatacatttgttttttctcccactcgcgcggactcctctgtgtttgtcccccactctgtgctcgcgctctttttttgtgtgtggtcccgcccatttgtgtgcacctctgttgttgtcgctcactcacatcacgcgcgcggtgtgtgtgggccgctcgcgcgcgcggatttattcccgcgcgagatgatatttttgtcacacacaccgcgctcgcgctgtggcgtatataacacacaccctctctgtgtgctctacctctgttaaacaccacaatataacacacaccctctctctatatatataaagaaagaccacacctctcttatatgccccccggtgggggtgtttactcccctccgccctctctcttgtttttacccggtagcacgcccctctctcttcctggtgggttgctttcttttttgttttcctccccccgcgcgcgcgaaaaaaggcgcggggagagaacccacccccccgcggttaaaaaatttttttttaatactccccccataatatatatatttaacacacacccccggcgggtgggaagaaaaaaaacacccacccccctctttttttatagtatatatacacacccccccatctttttctcccccctttttctctcccccccccccaca

SEQ ID NO: 586870 - DNA, 1029 bp, Homo sapiens
  misc_feature (15)..(15): n is a, c, g, or t
  misc_feature (121)..(121): n is a, c, g, or t
  misc_feature (341)..(341): n is a, c, g, or t
  misc_feature (367)..(367): n is a, c, g, or t
  misc_feature (371)..(371): n is a, c, g, or t
  misc_feature (374)..(374): n is a, c, g, or t
  misc_feature (376)..(376): n is a, c, g, or t
  misc_feature (383)..(383): n is a, c, g, or t
  misc_feature (459)..(459): n is a, c, g, or t
  misc_feature (477)..(477): n is a, c, g, or t
  misc_feature (493)..(493): n is a, c, g, or t
  misc_feature (505)..(505): n is a, c, g, or t
  misc_feature (509)..(509): n is a, c, g, or t
  misc_feature (516)..(516): n is a, c, g, or t
  misc_feature (529)..(529): n is a, c, g, or t
  misc_feature (531)..(531): n is a, c, g, or t
  misc_feature (537)..(537): n is a, c, g, or t
  misc_feature (551)..(551): n is a, c, g, or t
  misc_feature (569)..(569): n is a, c, g, or t
  misc_feature (571)..(571): n is a, c, g, or t
  misc_feature (968)..(968): n is a, c, g, or t
  misc_feature (976)..(977): n is a, c, g, or t
  misc_feature (989)..(989): n is a, c, g, or t
ccaacctgcaggccnccattgctgatgctgagcagcgtggggagatgcccctcaaggatgccaagaacaagctggaagggctggaggatgccctgcagaaggccaagcaggacctggcccngctgctgaaggagtaccaggagctgatgaatgtcaagctggccctggacgtggagatcgccacctaccgcaagctgctggagggtgaggagtgcaggctgaatggcgaaggcgttggacaagtcaacatctctgtggtgcagtccaccgtctccagtggctatggcggtgccagtggtgtcggcagtggcttaggcctgggtggaggaagcagcaacacntatggcagtggtcttggcgttggagntggnttnanttttttnagtggcagagccattgggggtggcctcagccctgttggaggcggcagttccaccatcaagtacaccaccacctccncccccagcaggaagagcnaaaacactaaagagcntcagctagctcncggncccacantcctcaggccccncnctggcngcagagccctcccntcaggttgcctgtcctcncntggcctccagtctcccctgactgtcccagggtagacgctgggagatgaactgcttagctgccctcacttgcttctctctctctctagtaccatctgagcacccattgctcaccatcagatcaacctctgattttacatcatgatgtaatcaccactggagcttcactgttactaaattattaatttcttgcctccagtgttctatctctgaggctgagcattataagaaaatgacctctgctccttttcattgcagaaaattgccaggggcttatttcagaacaacttccacttactttccactggctctcaaactctctaacttataagtgttgtgaacccccacccaggcagtatccagtgaaagcacaagtgactagtcctatgatgtacaaancctgtatnntctgtgatgatntctgtgctcttcactctttgaattgctaataaggagatta

SEQ ID NO: 586871 - DNA, 1505 bp, Homo sapiens
  misc_feature (1015)..(1015): n is a, c, g, or t
atcgtcatgtatatggaggacagtggtcccggagtaatgacaccccccctggcagacagcatgctagtcgctgtagctgacaacggataagatagtgcgaacgggcggagagtccgctagtcatccactctactgagggtagcgagtatcccttccaagagatcgtagtggtagtgaccgtctagtccgcgtgaagtacgatcgtggcagcaacagagtccgatcgtacgcctaccaatgaaaaaggctggtggctcgcaatatttgcaagagccgagtgaggaccaagaaaaaagtggttcaattctatgctctctgtccacctctacatgactgaatactccgctcaatggtatctgaacattagtggccgatggaaagcaattgatgaccgtgatgtatcagagcattccttcaatgtaggtctccgcacgtgatacgagccttcctctggtaaagcgggcacaaaacatgtaaatatagggcaacacgcacctggtgtctcaaagggttaaaattcgcaagtgagaacgcgcttcgtgtggggtttacctccgccgggggctatgggggcccctcgagtgcgagggcaacatgcgtaaccacttgccctctgaaaccaccctcgggcgcaaatcccctaaagcgaccaaacctgcggggggacttgcggccccccacagtactggacggaggacgaagaacttggactgagggggccttgtgatagggtctccaggcggaggggcccttgcgtcccccaggcgggaccatttccaatacattctatgttccacaaccattcaacttgggtgtgggtcgttggcttccaccccgcgagcaaaggaacgtgcgcgccacagatcggaaccgtattcaccgcggacgcacagcacctaccgatgatcagcgacgaaaaagaccatcaaatcggtaggcagggcattgtggtgtgatggctttgaaaccccttgaataggttatccatccctcagaggcaattggtctccccaanaatcacagctcaaggttccactgcgggcgcggagacttaaggtgcacatgcggatgatgcactacacttatgggccgtgaccttcatgttaacgataaaccacatatatgccgtgtggagcacccctcatgcagttctggtgcactttggacctctaaatcaccactacgacacaacagcggcatgcggagctgacgggcagacctagagcgggccgacaccagcaggcgtgagagatacacccgaccgcagacgcacacaagagagccacaaatcgaccaggcggggggccgacgccacccaccggaagggacagaccaaacagcggctgcgagaagtccggtcccgcgcaacgggctacaacccgagcgcgaaccacaccccgcacattccgtgcggagacccacaaaggagcgggcccacccaagcacagacgacacagagtgtgcgcccccatatcacaaacgaccccaccctatgcagctgccac

SEQ ID NO: 586872 - DNA, 374 bp, Homo sapiens
ctttcagagtgattaggtcatgaaggctcctccctcataaatgggattaatgccttataaaatagccttcaccggggttcagccttttttgcccttctgcctttcaccatgtaaggacacagcaacaaggcgccaccttgaaagtagagacggggccctcaccagacaccaaagctgctggagccttgatcttgaacttccagcctccagaactgggagaaataaatttctattatttatagattactcgttctcaagtattttgatgtaacagaaaactgactaagacagccatttattgaaacacacaaactcttctctgatgaatacaaaaaggcttgtggtcagggcaataaataattctcaaatggagg

SEQ ID NO: 586873 - DNA, 589 bp, Homo sapiens
  misc_feature (528)..(528): n is a, c, g, or t
  misc_feature (536)..(537): n is a, c, g, or t
  misc_feature (549)..(549): n is a, c, g, or t
tgagcatataagcatttaaagtagcgtctgccaggcttcacgcgtccaactagtcgcatcaggccacctactccttggccttgtcaagagccctactcctccaaggtttaccgtgtccctcctccatgagctctactcaggtctcccctgactgtcccagggtagacgctgggagatgaactgcttagctgccctcacttgcttctctctctctctagtaccatctgagcacccattgctcaccatcagatcaacctctgattttacatcatgatgtaatcaccactggagcttcactgttactaaattattaatttcttgcctccagtgttctatctctgaggctgagcattataagaaaatgacctctgctccttttcattgcagaaaattgccaggggcttatttcagaacaacttccacttactttccactggctctcaaactctctaacttataagtgttgtgaacccccacccaggcagtatccagtgaaagcacaagtgactagtcctatgatgtacaaancctgtatnntctgtgatgatntctgtgctcttcactctttgaattgctaataaggagatta

SEQ ID NO: 586874 - DNA, 817 bp, Homo sapiens
tgatctatgactcggtcatgcttgaagcaccgaagtgctcctgcggtgacaagatagcaggcacccgtgagcactgctggcgcatcagagcatctggtcccggctgcaggagcgggggctccggagccagtgtgagtgtctccgaggccgtaaggcctcctcgtggaagaagctgcagggtctggtccaagcttcttgatgcgcgcacagtgcgtccgtctactggcagcaaggcacgctcagtcggcgctcaatactggacaatcggggaaagcttggcacgggctcctggcgatcagcgggatgttttgtcgactgcttgccctggtggtgtgggttgtgggttgcgaccatttggagcaccagtcgtagggatactgagctttcatttacctcccaagtgcagagctcgtctgtggggcacagtttgggcaagggtgtctagccttgaacgcattcggtcgctttcatagatcggttgggttatcctcggttggagggcttaaacacggaagatttgggttgtccggcttttggtcggctaggcttggggaaccccccaccagatggggggagcgaaatccgccaatttggcgcatggatattcaagtttttccaaaaaagcaattggcgcctaggtttggagtccgctctacgattggagatttccgttattcgaaaacttttcgagtgcttggtgggccaaaatccggccactgttggcgcgtgtgccaaggcattggccaaacaaataggcaatagagggccgaatggtgggcgtatgccaaagaattcccttcgagttgggttaagaacg

SEQ ID NO: 586875 - DNA, 377 bp, Homo sapiens
gactagtgggattaaatttttttgccaaacaagcagatccctttccagagaagagaaacaaatctgtatttaccctcattagaaattagtatcagctgggtgcgtgcggtggctcatgcctgtaatcccagtactttgggaggctgaggcgggcggatcacgaggtcaggagttcgagaccagcctggccaacatggtgaaaccccatctctactaaaaatacaaaaattagctgggcatggtggtgggtgcctgtagtcctagatacttgggaggctgaggcaggaggatcgcttaaacccaggagtcggaggttgcagtgaactgggatcgcaccactgcactccagcctgggcgacagagcaagactccgtccc

SEQ ID NO: 586876 - DNA, 344 bp, Homo sapiens
tttcccttccacttcctcccaacaccccaagcacgacgtataagaatcccgtgcgcttaggccgggcaccgtggctcacacctgtaatcctagtactttgggaggccgaggcgggcagatcctgaggtcaggagatcgagaccatcctggctaacacggcgaaaccccgtctctactaaacatacacacaattagccggacgtggtggcaggcacctgtagtcccagctactcgggaggctgaggcaggagaatggcatgggcccgggaggtggagcttgcagtgagccgagatcaagccactgcgctccagcctgggcggcagagcgaggcgccgtcacaaaa

SEQ ID NO: 586877 - DNA, 767 bp, Homo sapiens
  misc_feature (19)..(19): n is a, c, g, or t
  misc_feature (71)..(71): n is a, c, g, or t
  misc_feature (94)..(94): n is a, c, g, or t
  misc_feature (120)..(120): n is a, c, g, or t
  misc_feature (123)..(123): n is a, c, g, or t
  misc_feature (134)..(134): n is a, c, g, or t
  misc_feature (150)..(150): n is a, c, g, or t
  misc_feature (249)..(249): n is a, c, g, or t
  misc_feature (328)..(328): n is a, c, g, or t
  misc_feature (339)..(339): n is a, c, g, or t
  misc_feature (371)..(371): n is a, c, g, or t
  misc_feature (376)..(376): n is a, c, g, or t
  misc_feature (539)..(539): n is a, c, g, or t
  misc_feature (664)..(664): n is a, c, g, or t
  misc_feature (687)..(687): n is a, c, g, or t
  misc_feature (703)..(703): n is a, c, g, or t
  misc_feature (723)..(723): n is a, c, g, or t
ccctgttgtctttcttgtnttcacctacaaatggccatgactaccctcgagcaacctacaaacaaataatnaaaccggctcttcctaaacagcncctgcctggagccagtactaaaaagnctncaccctgtcanaaggttatcctgaatnatcccagcccctgggaccaaaaaaaaaagcccgcacagagaaactgcccctttccggggcttccaaggcaccagtaagtatgaaaggcccaaccttcangcatttttaacatggaaaggaataatgccaatgcaatgaagatgtaacaaaattctctataggtttgctaacccacgtnagtagcaagtnacatagtagaatgcccaatatagacttttcangtcangaggaaacggaagctggttgacaaggatctctttatcagacatagaaaaccactagtaactaatcgaaattctctttaaggaaaggctcttcagatgatctccaagtcacacccctttcttttattttcagatcatctgaatttttagtccacaaaatagatnattgattttactatgactgacttccactgttagccaactctttatatgtctagtgtctgttcctgtttaagcctatttcttactttaaaatgttaaattcaattaattttccatcaaaatttatnattacctgttcttttcttttttngagacagggttttccnctgtcacccaggctggagtncagttgtgcaacttgactcactgcaactctaccttacaggctca

SEQ ID NO: 586878 - DNA, 122 bp, Homo sapiens
  misc_feature (54)..(54): n is a, c, g, or t
aaaattgtgccattgcactccagcctgggtgacaagagggaaaccctgtctcanacaaataaataaataaaaataaataaattggtgataccttttgggtataaaggcatacaatataggga

SEQ ID NO: 586879 - DNA, 104 bp, Homo sapiens
aacccgaccccctttgcagaatggaggacgctctatccgtctcctccggggctggtcgccggttgtcttctcctctgggggctctggtcagacccgttcgggcg

SEQ ID NO: 586880 - DNA, 1015 bp, Homo sapiens
taaaacaagcaaattttattaaaggaaaattttggcagggttaaagggtttggcaggtagaaattttggtaggtagaaaaggtgttatatcttttacaccaagtctggttctgggcatgcttctaatagattgtcaagagtcacctgggatcaatgatagccagtgtgtggcccatctctctggtgaggtaatatttcccgactatggctgtgtgggcccatgttacaataatataattggccatctggtgagtgagatgggcacacccatgttttaaagcgccacaactataaggtataagtaaccttctatatttacaaagaatattctctccaaaaatgtctgtggcgcagagtgtgtggatagcgcagatagatattggaccacacaatttatcccggcgttgtggcgctttgggtcctgagagtacaatctctgtcccacagagcgtgctgtgtctatgtgtgagccccccaagagggaacttgtgatctttgccccacactttcttatctacatataaagccaagaacgtagtgttgagagcgccctagtaagatgcttgtgggtcttcacgcgcatctccacagcgtgaagcaacttgtcttgtgcgacgaggagtcgatcgtcagttatgcgacgagccgcgaccaacgctaaacgtctatctctctgttggccgcatattaaagagaagagccgtggtgagacaaccagggctcacgccacgccataacaagccccagaaggagaacggcccaagacaccgcagtagctataccaaggccacaaccatacttcttccgctgctgctactgtatgaggagatacgcgcgctattattattgatagccgctgtttctcctcataaaacacctactcagacttgtgcagggccactcccatcaagacaaacagaaatgttgtgggcgcccccgactccgcctttttatattaaagccgcccgctgattaaccacacaaagttgtagaggcgcccgccgattatccaaaa

SEQ ID NO: 586881 - DNA, 694 bp, Homo sapiens
  misc_feature (121)..(121): n is a, c, g, or t
cccgtttcgtggatcttcaatttaaatcaatccgcttatttatttcttttcggcccccaattaacaatttccttccaactagttttaatatctaaaatacccatctcctcccttcctcgtntaacatcacttcctctgccccacaaagaccttttgtccgcacctgttgcaatccactcatgtgtcacaatccaattccctctgtggtcatgtccccgtctcccagaaacgaatcgtcaaattgtgttagcggcgcacccattcattggcgcgctctagtaaataacaatggtcatatattctctctctactaatttgccccaacaccacttgctgataaagcgcacccacccgcactttttctctacaaccttgtttcgggcccccacctctcttctaaaaccagcttatcttcttctccaacttccctgtagataattcttgttctccccactccccactccatacaaataccttcatgggtatcagtatcaccttgtagacaaattgtttttccccacagtggagatcttgtttctttcagggattggcggggcgaacacgatgtctccccattttcacaattgattgggcaccggacttccttccgccaattgggacgaggtgcgccccccgtagtagagtcagacctagaaacacacaacttcagcccgacaatagtccagacaaacat

SEQ ID NO: 586882 - DNA, 280 bp, Homo sapiens
  misc_feature (21)..(21): n is a, c, g, or t
  misc_feature (35)..(35): n is a, c, g, or t
  misc_feature (92)..(92): n is a, c, g, or t
  misc_feature (152)..(153): n is a, c, g, or t
  misc_feature (217)..(217): n is a, c, g, or t
  misc_feature (249)..(249): n is a, c, g, or t
cctcagccttccttgtagctnggattacaggcgtntttcaccatgcccagctaatttttatatttatagtagagacgggctttcaccatgtnggctggggtggtcataaactcctgacctcaagtgatccgcctgccttagcccttctcccnncccgtgctgggattacaggtgtgagccatcgcacccggcctgtaacaagggacttcttatgagngtggggatgtgtggctggggagtttgcagggnttaaggaggaggatctgcttcaggactgtgg

SEQ ID NO: 586883 - DNA, 181 bp, Homo sapiens
  misc_feature (37)..(37): n is a, c, g, or t
ctagaggatccccgtaacgtggtgtaccgtccatcancatctttggccttcattataatcatagtttccttcctggtcttccactgtataatctaatcagaagaatagcctgtcagtctgttatatgcacctccagttacatcatcctccgcttcaaacttttccattcttacttagcctc

SEQ ID NO: 586884 - DNA, 857 bp, Homo sapiens
cgccaggctgagtgcagtggcgtgatctcagctcactgcaacctccacctcccgggttcacgccattctcctgcctcagcctcctgagtagctgggactacaggcacctgccacacgcctggtaactttttttatatttgagtagaaatggggtttcaccatgttagccaggatggtctcaatctcctgacctgtgtgatccgcctgccttggctcccaaagtgctgggattacaggcgtgagccaagtgcgcctggcaagaccattttagaatgtggaaatttagtgagaaaaaatgccctgtaaatatgctttagttttaatccagggtgggatgcactacctagcgaagaatgtgagaaaattatatattctcagagaaatatcgtgacatctattgtcatccatttgctatttttttcccaagagaattccataatttaaaataaaatcctagatccagttctgtgttttgtgaataaatattaatctatttaaaattttataaaatctgagcttctaggaatccagtgtgtcaacctttattagaatatataatataaatcacttataacggatgctaaagtagatcaccttttaacagatgctgaatgttggggatatgtttgtggcacgttaatggatgggaaccttatacttcaggttcagatatattgatctagatccaataaatggtaacttatggtgtccaaatcgtgaacacaaattatagcttattgattacttatgaggctggaatttaaaataaggggtgcacggggggaataatttttcggagaccgaggggggaccatttggagaagatgtgggccctcaatttaaacgtttgaagggag

SEQ ID NO: 586885 - DNA, 928 bp, Homo sapiens
ccgcggtggtcacgtgcgtggaattttctgtggtctgccgagtgactcagccccgcagtgctcgaaactgcgtggcgcatagtgtgtgcaggtgtacctgagggtgggtgcgtccctgcgccggaaatagtggggccgactgagtggtgccgcgaggcggggaggaaacagtggggtgctgctggttcctgtggctgacatcctgccccctgactgctgtgcctgtgtgagtgctgtggggctcgccccatgtgatgggcggtggcgtgggtgcacgtggcgtctccccatgtggtgtgttggtgtggctgtgttgctgccttgtgtggatgacgccctgccttccctgacgtgcctcgtcttcagcaacccagcacatgtgggcatgcaacccacagagaacttgcgtcgtagcgctggttcacctgcacgtcagaattcttgagcttgtggcgccccagatagtgtgccccgtctgaatggcccacaggattcgctctggaaaatcacccaacgtcctagtatgagatgcgtcaactgacactatttgagcaccttagccagcgggacgagttaggacactttcgagacagtgatccacgaaggtaccttgtgaacgaaaatctgccccgttagtagaactgaggcaccgcgggctgcttagttacacagattttcagcccgaattatacgacgtccaaaaaccgtcgttgtaggctaggttttcatatgcttgggtacccacatggtgggaattacaaccaccaggtagtcaatgaagttgggtacaccgattcgcaggtgagaccagatgacgccctggggataatacggacgtgcggacgtaaagtttagtgacacatcgctcgagcgtcagtaggattgtatagatgatgaaacaaggcaatacagtgcctagagtcgagcg

SEQ ID NO: 586886 - DNA, 728 bp, Homo sapiens
  misc_feature (37)..(37): n is a, c, g, or t
  misc_feature (57)..(57): n is a, c, g, or t
  misc_feature (60)..(60): n is a, c, g, or t
  misc_feature (138)..(138): n is a, c, g, or t
  misc_feature (214)..(214): n is a, c, g, or t
  misc_feature (216)..(216): n is a, c, g, or t
  misc_feature (358)..(358): n is a, c, g, or t
gacccccacatggaatccctcagccagctaagccgtngccgccacaaagcggcaaancgnccgctacgccactgtcacaccgcaaacacccccttttaccgttgtcggtatcgagtatcgcggcggtgaacgcttttngtccgtagcaccgcctggcagcacgcagttgaatcaaatttaccttatccgacctggtgacgctgtggcgggcacngnctggcgactcaacgcgctggacggaagatccgcacgctttgacgtggccggaacatctcaaaccgtaaccgtcgcgcaataggacctcctttatgcactcccctaccacttcctcgaaaacaatgaagcccaggaacatttngggtttcattgcaggcttggccaccttcgcgtttgcatacggctgtcatgcggcttcggggcaattaacgtcgatctcgaacactcagaacagtgaagttcacaactcttctcaaggagcaagtcagacagaactcgcccgcgagtggggattgaccccccaagaatggtcccgttttcaaactgtgatggagggtcctcgcggaatctattcgccaggcctggatcctctgacagcacttggcatcgaagcgaagtcggaggaggagcggcgacgctatgcagagctgccggtgcgagccgagcgacagcgtatcgataaggaactggcgtaccaaagggcctatgaccaagccttcgcacgtctttac

SEQ ID NO: 586887 - DNA, 392 bp, Homo sapiens
tcgctgatacagtagcatagaggtgttatacgtatctgatggtagttgtatcgtgggacagtggtgatatctccattatcattttttattgtgtctatttgattatttcttcttttcttctttattagtctcgctagcggtctgtgttgttgatcttttcaaaaaaccagctcctggattcattgatttttttgaagtgttttttgtgtctcttatctcctttagttctgctctgaacttattttttgacttctgctagcttttgagtttctttgctctggcttctctagtccttgttctttttttttttcttcttcttttttttttttttgggggaggctttggaactttttaacacggggggggacccccaaaatgtcgccctggcaggg

SEQ ID NO: 586888 - DNA, 815 bp, Homo sapiens
  misc_feature (3)..(3): n is a, c, g, or t
  misc_feature (35)..(35): n is a, c, g, or t
  misc_feature (57)..(57): n is a, c, g, or t
  misc_feature (118)..(118): n is a, c, g, or t
  misc_feature (148)..(148): n is a, c, g, or t
  misc_feature (150)..(150): n is a, c, g, or t
  misc_feature (155)..(155): n is a, c, g, or t
  misc_feature (198)..(198): n is a, c, g, or t
  misc_feature (221)..(221): n is a, c, g, or t
  misc_feature (261)..(261): n is a, c, g, or t
  misc_feature (280)..(280): n is a, c, g, or t
  misc_feature (300)..(300): n is a, c, g, or t
  misc_feature (345)..(345): n is a, c, g, or t
  misc_feature (375)..(375): n is a, c, g, or t
  misc_feature (393)..(393): n is a, c, g, or t
  misc_feature (411)..(411): n is a, c, g, or t
  misc_feature (413)..(413): n is a, c, g, or t
  misc_feature (445)..(445): n is a, c, g, or t
  misc_feature (464)..(464): n is a, c, g, or t
  misc_feature (470)..(470): n is a, c, g, or t
  misc_feature (472)..(472): n is a, c, g, or t
  misc_feature (474)..(474): n is a, c, g, or t
  misc_feature (525)..(525): n is a, c, g, or t
  misc_feature (551)..(551): n is a, c, g, or t
  misc_feature (639)..(639): n is a, c, g, or t
  misc_feature (644)..(644): n is a, c, g, or t
  misc_feature (748)..(748): n is a, c, g, or t
  misc_feature (800)..(800): n is a, c, g, or t
tanaagtttaaggaccttaaaggtccttacaaaancaacaaaaaaaaccgacaaaanaaaaacaaaaggggaaagaccttccagcaaaggaacacccccgtagtcaaacattacaaanaaaacagtagagaacaaaggaaaggggaantnaacanaaaagtttagtttaaaggcaaaaatgaaaaacaaccaaccaancaacctccccccccacccaaggnaagaaagggaaaaaagaaacaagaacccccagggcctttncaaaaaacagcctaaaaanaggaaggcgaagaccggggnggggggacaacccccgccaatggaatgccaaaaagcacaagggcnaggatttaaaaaaacccaaaaggggccacnaaaaacagggaaaaccgnattaatagaaaaaaaaangnaaagaaaaaaaaaggaaaagggattaaaaacngaccccgccaaaaaaaacnaaaatnangnatgtcacctcccccgtcataacagcctaaagatcgatctacagtttgcccntcgcctggcactcttaaaccactccnccaatggtcaatgttgaccttgaatcaacagccgctgaacccaggagaccccacagatgtgtagattcagcacctagagggccccccnacccnctgtgctgtgtgttcccatgactccagaaataattaatcgcaacttgcattattaagtccacaggcaagtttgaaatctaactagaaaaagtagcagcaaaggnaaaatacgcgggaatttgttagaaagcaacaagatttcttaaaatgcttccngttcaagtcagaatt

SEQ ID NO: 586889 - DNA, 118 bp, Homo sapiens
gctcgacactaaaaatacaaaaattagcttggtctgccattgcttggactcaggaggtggaggttgcagtgactgtgccactgactgaagcctgggtgacagagtgagactctatctc

SEQ ID NO: 586890 - DNA, 213 bp, Homo sapiens
gacccatctacagtatcccatgtgttgccggtgctcgctgggagatggcagtgggtggaggaggttggagatttggctgcagaggagcagctgagggctgagggtgctgatcccggacgctccaaacacgtcctgtaaacatagaacgagctcgaagggactacgtatatgaccggcctggaagagacctggagaggcgacgacaacaataca

SEQ ID NO: 586891 - DNA, 185 bp, Homo sapiens
  misc_feature (127)..(127): n is a, c, g, or t
tcaagtacatctgcctccccagttcaggatctcctgcctcagcctcccaagtatctgggcctgcaggcacgtgcaccacgcctggtaacttgttgtacttatagtagagaccgggtttcaccttgtnggccagggtggtgtagatctcctgactttgtgatccgcctgcttcggcctcccaaagt

SEQ ID NO: 586892 - DNA, 1589 bp, Homo sapiens
ataccaaagaaccccgatgaactaacttcagatatatgtatcgtgctgacggaaattcccagcttaaggtcgcacactttgcgtatcagtcatccgcatgagtgcgaatcgagccagaagcatgctgcttaacgtcagacaacatagttgcctatggctagcagcgctctagtaagcttcctgtcacagtagcttcattcgtcacgaagtataacccattgacaaactcacctaagggcacatgagaggcatggctagctgacctcaactcctcaatcgtccatggaattgatacaagctgcctcgaaaccggcaagttgaatatagtgtcagcgttcctccttagcgtgtatatacgtcgaagtatatcgctcctgtcatcacgcagtcgcacctaaagagcacgtccctaaaaagtgcgcatagtgataatgccctgcattcggcttgtgtcccatacgtaatagtccgtggatgtctcttacagaatgttgcgtactatgtgtcataatacgacctcgacaggtcatgcttcgagcccgctgacattcgaagcgagcctaaccccttgcctcgttggctaatcctcactcagggctaatggattggccagctctctttgccttggtcatgataatctgaaatcgctaccatggcttatggttgaagaaccgatagaccttcgtttacccctgttgcatggcaaccctgaacttagccgcggactcccatacccccgggtacaccccgcgaactgctcgtgccgtcgcagcaccagccctatcgcccggcactaacccaagacatagataacgcagacccacacggggcagccacgaaaattcaatcccgagtgtagttgaccacaccactcaacaccaagacacccaccacaccaaccacccccactcccaccacaccacgccccccacacctacaacaaacaccccgcctccccaccaccccgacacccacctatactcgcacacagtcatccataccacaactcccaccgacaaccacacaccatcgacgctacagctactattcccatcaccctcagcccacacatagattctgatgcactctcataccccacactcaaacgcaactagtcatatagacacacgctaatcgtcgccaccccatactcaaccacacagcatccttcaactctaacatcgtcacatctgatcgatagctcttcaattactatcctcttacaacatcgctatcaataacaacacaaccatcacacaacagcactctatcataaaatccccaccaatccaatctcacccatccccctacctctaatccactacctcgactaattaccaccaccataacaacccaccccacccacacaaccaaccaccccaaccacacaccaacatcacataaaaccacctacacaccacacacccacctaacccacttctcacaccacacacaaacaaaccaccactaccacccaccacaacaacaaccagaatcaacgctgagacacccaacgtacgcagaaatacctataagaaaacacaattctcagctaacttactaatcctacactacacgataccacatcc

SEQ ID NO: 586893 - DNA, 1199 bp, Homo sapiens
tgaatttccttgcttactgtgcatatacagactggatttttttttttgttttaacagccatgtcccccaaaggaatgtctggcatataactgacattgggtatgttgcattcatgggaatatttcttattttctacggtgtttggaaaagccgtggtaagaaaatacaggattgtgataatattgtgtgaaggctaggaaaaacccaaatgggtttcttcttgtgagaagtcagtgacataccgttcgtgggtggtggagaaaatgtgcgcatggggaaaattgtgacaagttgtgtggattctctcacgtgggtagtggtttaacaaacgtgcaataaagaggcaaatagaaattgtttttgtgtgaataagagggatcacagaaacaatttctaaaacctaacgtggtttgttaccagtgtgacaattataacactgtggtgcacataactgaggctctcccacaacagtgcgtctctagaaagtgccacacgtgcatataggcttcttctctctgtgaacacgtgcgtccagcgtctctcctgtgcgacagctaggatttttctcaagtggtctatcacagtctgtgcgtatcttggctaccacacacaccaccgagacgagacgcgcgcaagagagagagattttcccgccaaaaagagccccgaagaaataccaacaccccccagagaaggcacaaaagcgtggtgacgggtgccgcgtcgtcgtaactactccagtcgacgtgcggagctctccccaagagtcgctggggcccaaaggggggtctataacaaagagacagacacactccttagaaacacacggggggtccgcacaacctacgaggcggtctcgcagcaacgcataaccgtgcgggggggcacacgtccactgacgaaaaaagtcgcggcactctctagcccacaccatcccacctctgcggggcgcaatagtggcccccatccggggcggaccacgcgcccatcacgtgcggcgggccacaggcgccgcgtatagcctcccggaacaaaccagccgagcagcgcccccctacaagaacagccgggggggcaaacgggccccctctgtcgaccagcgacacccgaaggagtggccgccccacagaactagaagacgggggctccccttcgcgggcacgcccgtaaagacaggcaggcatcaccacgaccagcag

SEQ ID NO: 586894 - DNA, 1051 bp, Homo sapiens
  misc_feature (329)..(329): n is a, c, g, or t
  misc_feature (397)..(397): n is a, c, g, or t
gccaaaatgtatacctagtgctcttctaatctcgagaacgtgtgatgatacgcatgacaatgtcgatcttatctcttcgatgagactgcgatggattatcagtcgcaacgtgcttccatcaaagaatgttggagcagagtactgtcgtaacctctggtgatccaggtgggtgcttcattgagacaaaagaaaaggaaggcatccagaggatatgaagaaaggcgcttagatcacgccaataggtatatcttgggtacactgtcccgatactatcccgaaatcatgtgcgaggacatgatgtagtcccaagcgctcgtgtgactgtagcnagttcccggttgctagtgatcgcaaggacattgcttggtagtcgtctagactatggcactctcgatgnggttcgctctattcgatgcaggacttgcgggtcaagtgttttgctaggtagagatcgcaggcaagtcttgccgtcggagatggcataactagagttaccagtgcacctgcccaagaggaatctcggtgcattcgcatgagtctaggggtcgatggtggcctctcgatctacgaggctcactcgtaccatacgtctcctaggaagagatccattgggatactgtgaggatgcggttgttggagagcggtagaaatggacagaatgtaggtctttgggttttcctccaatgaccaacgtcgtgcttccaggcattgcaaaggcagaagtccacgatatgacgtttgtaaaaacaaacatagcgtacttattgaggtgacaactcttctccggcgagtgagtatgcgtgactgctacgtaccgtggaaacagataggggagacctgattgccaaggcacaggacatgaagttgaaagtaagagcacatcttggagagattgaccgttggttcgtaccaggagagagacacggagttggcagaattgaaacaagtatataaaacccttaacttttgttgggattaattttagaacatggaattgcgggtataaggagaaacctaagtttgagttttggaacacataaatgttgctgaa

SEQ ID NO: 586895 - DNA, 145 bp, Homo sapiens
gaccgtctctcccttacgtctacttagtgatacaagactccactcccaccgtgctgctccctggtgtcatgtgtcttactccactttttttttttatttatgggaaaaaagttttggccacaatggcccagtgtgggagtgcagg

SEQ ID NO: 586896 - DNA, 154 bp, Homo sapiens
ctggtgacagagtgagattccctctcaaagaaaacagaaactgcgaacccagtacagtggctcacttctgtaatctaagcactctgggaggctgagggaggaggatcaccagagaccaggagttcaagaaccagcatggacagcatagcaaaac

SEQ ID NO: 586897 - DNA, 935 bp, Homo sapiens
  misc_feature (3)..(3): n is a, c, g, or t
  misc_feature (72)..(72): n is a, c, g, or t
  misc_feature (75)..(75): n is a, c, g, or t
  misc_feature (104)..(104): n is a, c, g, or t
  misc_feature (115)..(115): n is a, c, g, or t
  misc_feature (132)..(132): n is a, c, g, or t
  misc_feature (346)..(346): n is a, c, g, or t
  misc_feature (403)..(403): n is a, c, g, or t
  misc_feature (411)..(411): n is a, c, g, or t
  misc_feature (425)..(425): n is a, c, g, or t
  misc_feature (523)..(523): n is a, c, g, or t
  misc_feature (555)..(556): n is a, c, g, or t
  misc_feature (567)..(567): n is a, c, g, or t
  misc_feature (618)..(618): n is a, c, g, or t
  misc_feature (649)..(649): n is a, c, g, or t
  misc_feature (687)..(687): n is a, c, g, or t
  misc_feature (689)..(689): n is a, c, g, or t
  misc_feature (694)..(694): n is a, c, g, or t
  misc_feature (697)..(697): n is a, c, g, or t
  misc_feature (700)..(700): n is a, c, g, or t
  misc_feature (777)..(777): n is a, c, g, or t
  misc_feature (798)..(798): n is a, c, g, or t
  misc_feature (809)..(809): n is a, c, g, or t
  misc_feature (830)..(830): n is a, c, g, or t
  misc_feature (849)..(849): n is a, c, g, or t
  misc_feature (858)..(858): n is a, c, g, or t
  misc_feature (928)..(928): n is a, c, g, or t
ctntatttccctcacaataccctccgacgcccgaaaatataccccccgcccccttacatcccaccccattancancctgtaagtcaactgtttaaatggatgtnattcttaaaanataatgtaacacatganctcataaagcagtagcagatacatcaatatcttccccaccccagactgacaaatactccactacagcacagacagccaaagcaacagcaacacaaagtttcaccgcacaaaggaaaaccagaaaagaatcctcccttccccattacactctactaggtcaccccttttccataaggtttgtcatgcaattacaattaacaattgatcataagantaaaatgatgtttgtcttactttctccatctagaactaagatctagaagtgttaaanctcttgtnattttctccaagangacattcttaaagccagaccaagttcccttttgcaatagtaatccaaaccaaaaagctctgagcatcaggcaactcaagcagcagaacgttaaaccangtccaacttgactactgatcacaaaaaatttnnatgatattgcnttcttgatcaaaaactaatacagaggttgctctaaggtggtgagtaaaaanacgcagaggctttcaaacaggatggttttcntcctttgtctttaaacgatctttctacagtagtggganangcagnagnagncacgccgggaaggagaaaaaagtttagaatataaagaaattttttttgggttgagtttttggagggttgaggggagntaggataggtttattaaatanattttttaganttttttgtgtaagtgtagaanattttatatatttgatagnttttaggtnaagggggagatttttagaagtgtttggagtgataggtttttgtttgtttttgggaagttttttaatagtngaggggt

SEQ ID NO: 586898 - DNA, 316 bp, Homo sapiens
ttcaggttttctcttcagtggggttgcttccttggctgtgttttgtggcgaaacccctgtggtgggaataaaaaaatttttggggcccatccttgaagggttaatcagaacctttttaactgccggtgttgccgggactgttaacaaaaaaaaaagccccccccaaacccagctattaatttccccgaattttgaacatatgataaaaaggataccccaaaactgaatgttattttaatacccatttccatagcatgaagggccactatatcataaaaaaaacatagggtcttttactgccatgaggttttactga

SEQ ID NO: 586899 - DNA, 286 bp, Homo sapiens
ccacccaccccagtcacaagatagtacgacaagtgattccacttaaatgaggtacctggagttgtcaaattcgcagggacagaaagtaaaatagtggttgccagggactgggggaagggagaaattgagagttagtgttcagtgggtacctattccagtttttcaagatgaaaatagttctgcagatagatgatgttgatgtttgcacaacagggtgaatgtacttgaggccactgaactgtacacttaaaaatggttaatctgcagggggtgggtggagagcggc

SEQ ID NO: 586900 - DNA, 371 bp, Homo sapiens
ccgtttcctgtgttcgaattaaaccaattcaaacaagaactatttaaaaaaatggcccaggcacggtggctcacacctgtaatcccagcactttggaaggccgaggcgggtggatcacttgagatcaggagttcaagatcagtctggacaacatggcaaaaccctgtctctacaaaaaattagctgggtgtggtggcacgcacctgtaatcccagctgctctggaggctgaggcatgcgacgcttgaacccaggaggcggaggctacagtgatccaagatcgcaccactgcactccagcctggaagaccaaacgagactctgtatcaaaaaataataataattaataaagttttactggaaaaaagaaaaa

SEQ ID NO: 586901 - DNA, 865 bp, Homo sapiens
ctgaagactagctctgcagcagctggtgctttgggctgtgcgctgtccctgggccagcttccctcgaccttggggaggccagtggcctgtggaggaggcccaggtactggctgggggctgttgactggctatcctctttgcttctgcaagtttctggctcactcagaatgggcaggacagacccacgtgactggactttcagagtctggaggttttccatcggtcaggggaatggcggactacgtgaacttcttgttggcgtggcccttggtctaatagaccccagagggagcacactctgtcccctgagcgtcgggtgcgtcccgggggagaggtggacagacacctcgcctccaatcgtgacatttggtaacaggagcctggacttctgtgcaagagagggagacctaagggtgaacagtggccaataagaagccctagtagaaacaaagcatccatttcctaggatggttacgaagtcataacttcctgcaaatcagcgccaggagagcgacgttataccttcactttcttgtgtcttaagaaagtagcatgccaacgtggcccacaacaaactcctgtcgtggtaagttattctgccaaccagctaacaggacggagtggaagtgagttggaataaacgggaccggagctgggcttctcgtttctccctacggaggggagagtctcagcacttggtccggagctgaggaagtggtgtctgtgtaaaccgtttttcccagccaattctatcttcgccctcctgaagcaagcaagagcgttgaggcttttctgcttggaaagacctccaaactggagtaacccttgttaaaatgtgttttaaaaaagtgtttttttgaacctg

SEQ ID NO: 586902 - DNA, 136 bp, Homo sapiens
ggatccttcacgctcatgtcacaaggacgtggttgtcgatttggtgtgttacctggctgcaacgtgccacaacgatgatggatgagcccatgttcacagcagccgaatcatgtacaagcagatcctgcaagacaga

SEQ ID NO: 586903 - DNA, 159 bp, Homo sapiens
atttacactgcctgtctgctggtccctgctggacagttgagcttgttatccctgcactaaccccattattgtgtcatgtaaggttgatggttaccagtctcctgtgttgctcagctaacacaggggtgtcccatcttttggcttccctgggccacactg

SEQ ID NO: 586904 - DNA, 209 bp, Homo sapiens
  misc_feature (16)..(16): n is a, c, g, or t
cgcatagggtttatcngtgtgaccaccatatatttacagtaggaatagacgttgacacacgagcatatttcacctccgtctaccataatcatcgctatccccacgagccatgagccacgcaacgagccacgctaagggccacgcaaagtgccccccaatgcgccactcaacgagccccgcaaggagccacaccaagagccacaccaaga

SEQ ID NO: 586905 - DNA, 255 bp, Homo sapiens
tcgtcgtgtacttgaagaaccctggcgcattacatcaggcttttcatgtatgcatgatgactcaatgttatagcatttaaatggcaaccaggggacttatcatagcccgagaaaccacacataatcttttgttgagatcagtttgctgtactgacgctgcactttgtaaacagattaggatgttctttacttgtgggtgtgattttttaaaatagttctatatatctaatataaattaggtttaacttttcaaaa

SEQ ID NO: 586906 - DNA, 134 bp, Homo sapiens
ctgctacgcgacattcaggatccacagaaagataaagagttctatcttgtacttgtccttcattaatattatctggtaaaaagacttcttccattcggaaattctctgccactggcattaccatatttttccag

SEQ ID NO: 586907 - DNA, 121 bp, Homo sapiens
tgtgaggtgatctcagaggatccgaaggattgcttagttggatcttctcattttttaggtttatgcacaaataccaccgtcctgggaaggaacttccctgaccatgatgtctaatagtgga

SEQ ID NO: 586908 - DNA, 514 bp, Homo sapiens
  misc_feature (330)..(330): n is a, c, g, or t
acgcggagtcacatggaatgcgcgagtgtgagacctgtgctgagtatcccaagccctctgctgtgtacacgaatgtccccttgctatatgaaagcaacccttcgatcacatatgagaattctttatttctttttatataaggattttacaggggaaattaacaggcaccaacatggtggggtctttggtggggagagggggagacttttggaaatcaagtgagaatccactaaagaaattaaatttggactggtgaaacatatggtttaaggacacaatggactcggtgcctctttctgtactctgaatatgcacgggtattgcggtggngaatggggagttggcggccctcacttgggccttctctgtgggtcttttccgagacacaacccaagggcccttgtgatgctgtgcaaccctggcccaatatttcccctgtgccttttccccgtgtgcacaaggtctgggctcggatacccacacccgggttctcttgtaccacgattgggggccc

SEQ ID NO: 586909 - DNA, 175 bp, Homo sapiens
atcttcaggtaaataacttctcagtgtccatctctgctgtctactactcttcaatgtttattcaggcccactaccttctctacacttcaattctgaaggatttgcccccacccaggactgccaatttagcttatactcaacatgccccgagtcacaaaaactaaaatacctctta

SEQ ID NO: 586910 - DNA, 366 bp, Homo sapiens
  misc_feature (4)..(4): n is a, c, g, or t
  misc_feature (9)..(11): n is a, c, g, or t
  misc_feature (17)..(17): n is a, c, g, or t
  misc_feature (24)..(24): n is a, c, g, or t
  misc_feature (31)..(31): n is a, c, g, or t
  misc_feature (93)..(93): n is a, c, g, or t
  misc_feature (111)..(111): n is a, c, g, or t
  misc_feature (118)..(118): n is a, c, g, or t
  misc_feature (133)..(133): n is a, c, g, or t
  misc_feature (144)..(144): n is a, c, g, or t
  misc_feature (149)..(149): n is a, c, g, or t
  misc_feature (207)..(207): n is a, c, g, or t
  misc_feature (209)..(209): n is a, c, g, or t
  misc_feature (215)..(215): n is a, c, g, or t
  misc_feature (233)..(233): n is a, c, g, or t
  misc_feature (236)..(236): n is a, c, g, or t
  misc_feature (241)..(241): n is a, c, g, or t
  misc_feature (267)..(267): n is a, c, g, or t
  misc_feature (270)..(270): n is a, c, g, or t
  misc_feature (280)..(280): n is a, c, g, or t
  misc_feature (292)..(292): n is a, c, g, or t
  misc_feature (295)..(295): n is a, c, g, or t
  misc_feature (297)..(297): n is a, c, g, or t
  misc_feature (355)..(355): n is a, c, g, or t
gaanggggnnngctggngttaaanagcttanctcataatatctgtggaagcgatttgcgcgctgaggaagtaccctttgggacttgtagctcnactccggggaaagggctnggcgggnctgaaagttgctggnagtgagggtgnggggnatggccgccgctgcgaccatggcggctgcggcccgggaactggtgttgcgggctgggngntcaganatggaggaggaagagggntcnttggngggtggtcctgggctccaggaaccantgnaacttggggngttggatatganttntnatgaattcatcctggatgaagtggatgttcacattcaggcaaatctggaggatgagtnagtaaaggaag

SEQ ID NO: 586911 - DNA, 279 bp, Homo sapiens
acgacttcacgaggctgaggcatgaggattgctttatgccaagagtcatagccaacctgggcacatagtgagttccctctcttacataaaaaagagttccctttgctttgttcctattcttccctctccacagaagtacttttgttccacttgtggctgctttagcttgccgctgcagttcattggctgcactacaattttatgcattgtttccagctttacccctatccctattaagctagtacatctctttatgtatcctaactgttaaattttttt

SEQ ID NO: 586912 - DNA, 206 bp, Homo sapiens
gagaattgagaccaaacctgtgataacctgtctcaaaaccctcctcatcatctacttccttcgccttcttgatcacttggggtgatcctgcctgctgttgagttttgggcaaacttacttttgggcaccattatttccttattgccgagactccacaaagttcctcattgtctcatcggaactggcaccttattgttgtctttggc

SEQ ID NO: 586913 - DNA, 429 bp, Homo sapiens
tcagcaaaagctcgagagacagcgccagcatggacattaggggacagcacttcagttacgcacataaccgatgtacaggctagcaagagaggccagccacgtaggatatatatctggactctcttgtattataggattttgctggtgctgaatatcctatgacattcacagctgtcaaaaacaaacactggtcatttcagatctgttttctgaaatcttttaagctcaaacatcacatgcaagcatggacttggcagctactaatttggacaccttttagatctgtataaacgtgtgtggtgttgcacgccaagcacaccaatgcagtgctgcattttggatattcagttttatctttgttcaacaccatcatgggggcattcatttataccgtctaatatatgacaactgtagtcgtattgtataaag

SEQ ID NO: 586914 - DNA, 96 bp, Homo sapiens
aaaaagggggggcccccaaaggaaaccccttttcttttttggggggggggccttgggggggcccctttaagaaaaaggccccttttttttgggcca

SEQ ID NO: 586915 - DNA, 145 bp, Homo sapiens
caagacgtaggacctcactagcaggtgtctcctctatcttaggggccatcaattacatcacaacaattatcaatattaaagcccctgccataacccaagtacctaaacgctccgtcttcgtctgatccgtcactagttacgagca

SEQ ID NO: 586916 - DNA, 1538 bp, Homo sapiens
gtggttgtttttccacggagtgttctcccgatgtgttgtgtgaggaagactgctggctgtgggagggggcaccccgcatattggtggggggggaagaaagagaggggtggtggtttggtaggggagtgtgtcttctgccggacggttgtgtctgtttcccccctccttgctgggggggtggtggtgttctgtctgctgcccggcgggggccgccgccaagagtgtggtgctcggcaggacgggatgcgcagcgttctgtgtgtgcttggtaggtgggcggcggtggtatggatgctggcccggcgtcgttcttttctgtagtggtgtggagccccctcttataggagagggggggagttgtagattgtaacagctgtggggcaggcgccaccaccagggacgaggttggcatacgagcacatcgtttgagatttatgccccctgcctagtgatgtatgaggaagagcacatgctgggttatatgcactcgcccccgtaagtatggtgttgcgtccgccgcccccgccggcggcggggcgggttcaaaattataggtaggtggaataagacaaggtggtgggtaggagccccccgcgctggtgttggtatagaacaatcttctagtagaagatatgttctcgtggtgcaccggcggggcgcgcacgcggccggtgggtgttttcatctcgcactcgtcgttgtgttgattattctgccgcgcgcccccctctcttgtggtgggagagatgttttgtgagccgcgcgggctgtgggtgatgcctctcgcgacgacgaggtgctgctcgcggcgaggtggggtcgctcgcatagtcgctcccgccgctcgtcgcggcgcccacgagagatggtgtggtagatatattcacccgtctctgtggtgtgtctgtgtttaagatatatcgcagctcaaatggtatctctcccgcgcgggcgtgtgagtgtggcgcgcggcgcgcgcgcttggatgaatctcctctccgcgctctctctgtgtggaggagcggttagagcgcgcgcgagagagagatgttgttgtgtgaacaccacgcgggggcgcgagagggtgtcaccactgggcgcgcacacagatgttggcgcaccctctctgccactctccacccctgctgggggtggcacacagcagggcgagagatatctcctctgttctcacaatataataaaacacacacacacacacacccctcaaaactttatatttttttgtgttgtggtttgtggcgcccttgtgtccgcggtgttctttttgtggcggagatatattgtgtggcgcatcttgttttgttctccccttgtgtggtgagatttcgccctttatatatattgtgtggttagtgggttctcaccctttgttaaaaaagtctccacacacatattttattttttctctggtgtgaaagagatttttttttgttattttttctctctttttaacacaccacacagacacccctctcccccatttgggcccttgtgaaaaaaaatttttttttccttta

SEQ ID NO: 586917 - DNA, 244 bp, Homo sapiens
cacaacaccgtccttcccgttgcaacttttttaaagtatttttagggggaaaatttcagaactaagttgggtaatatagggggtatatatttgtgaaaaataatttttacttttatttttccgagggtttgacccgataaccctcctttgatggaagagggaataaataattcccctatatgtgtttgaggttgtgaccgacttataaaatctttttaaaaaataaagctctaattttttttta

SEQ ID NO: 586918 - DNA, 285 bp, Homo sapiens
tttttcttctgagattgccattctctaggcctcttcgttgttcaccctttccacgctcatgcactgcttctggctgacagcacaagagagactcctagtttagaggactggtaagccagctcctcaccacttccactcgaggctcctgtcacccacaccaccagtatcagtcagctcccattctgggcgttgtccctgtctcactcggcccatactagcgtcgggtcgccgtcagccctcaggaagcgcatcagctgcaccaagagcgggagcagcgcgcacagc

SEQ ID NO: 586919 - DNA, 213 bp, Homo sapiens
gcccctgatccgagaggcggcaacaaagctagtgccagcagcagcagctcatggaacggaatgacaccccctgtgaaccaccattggacctatcttggcttctcagctggcactgcgctacacggatttaggcagcccacaactggccatgcactctatccggaagatggactgcaccacaggagtcctccagaccctcaccctcttcaaggg

SEQ ID NO: 586920 - DNA, 726 bp, Homo sapiens
cgattgcatgtgctccctctgcggtgaaccaagcagctcctcaccaacagaacaggatctgggagcgagagcctgccccactgctctcagcacagtacgagaccctgtcggatagtgatgactgaactgcacaaagtgaggggaacaggtgcagagagggatctctagtttttggtgggttctttttagtagcggttcaaaaactgcgcctcctgtgtacttattccctgtagacttttcaaggagagacagggccacaggatgatgaagaaatgtatggccagttcactttggcgcagtctcaatggcggaaaaaaacaaacaaaaaaaatgtgctttggatacacggcccattcacgtggactcattattataggtgggaggggttggagcatgttgagatttttcaaaagtggaccggttgccggtccttaccttctgttaagaaaaacccttatgtgtcttttaatccactcttttgtaatagatgaccttttgcaggtatattccccttgctgtagtatctggtgtacttatgttcaaatcaggcatcaactttgggggtgatttttaaaaatcttttcgctatctatctttttaaccctagccttctataaaagctcatacagccagttacataaatgttggctgtcacgggcattgtacttttatctgatattgtttcctctaaattcagtttccagtgatgtttaccatcttgtgacc

SEQ ID NO: 586921 - DNA, 366 bp, Homo sapiens
  misc_feature (19)..(19): n is a, c, g, or t
  misc_feature (89)..(89): n is a, c, g, or t
  misc_feature (99)..(99): n is a, c, g, or t
  misc_feature (129)..(129): n is a, c, g, or t
  misc_feature (137)..(137): n is a, c, g, or t
  misc_feature (251)..(251): n is a, c, g, or t
  misc_feature (365)..(365): n is a, c, g, or t
gttacccttgtcgtccttnaatggtaatgggcgggtcctcctttgatccgctccaatggcaacgggaaagtccaagcggaacttgcggnaagaatcgtnaaatagagctgatttctgagccctggaccncctgaagnaactttgtattggacccaggagccgggagaaggctgcagtgtactcgctgggggagacacagtccttgatgtagccttctccagggcttgcattgtcttcaccaccgcaaacantctgccatgttgtcgtacttctccctctcccgggtgttcttgtacaacttcacttcctcatacagttccggcttgttcccagggctcctattcccggcgtggctgggatcccant

SEQ ID NO: 586922 - DNA, 172 bp, Homo sapiens
ggttccgtgtacactagtcagaggccaaaagcagcactgtctaaataaatactaacaaaacttggtttttcgatactgtcttaaatgtaaatttcatatccttaaatgaattctagtcatatgctactttacagtatttatgacgggtaacaccaacagtacggggtaaccg

SEQ ID NO: 586923 - DNA, 367 bp, Homo sapiens
attatacaaatacacaaaattcacagtggtgctagactgtactaaccactattgggaaacatcccgtaaacctagcctgtagccatgccaatggaagtgactgaactggtagacatctgtttgcgcatgctttgtgtggctggtagcaatcgcccaccgttgtgcatacactattgaacatcaggggtgcaagggagggtttcctaaacattattgggggagggtaaaatttgggattttttatgtgtgtcccttaatttgatagggggtgctgggggtcatagtcctcaagtcttatgaccctaacaatcaacatgtatacaaaacccctggaagtattgtgtagggtgtgtactgtgtagagtgt

SEQ ID NO: 586924 - DNA, 123 bp, Homo sapiens
aagattcctcccaacaatgactaatcaaactaacctcaaaacaatgataaccatacacaacactaaattgacgaacctgatctcttatactagtatccttaatcatttttatttgccatgtgt

SEQ ID NO: 586925 - DNA, 181 bp, Homo sapiens
cccttctagactataaaaagcgtatcattcaggccttccagggttctttgtgcttggatttcataagtccaggccacgctgtgtggatttgtcaccatcaagtctagttctcctaacatggctgcttcaaagggtcgcttgagaatgccatttccccattacctctccaataaaggctcct

SEQ ID NO: 586926 - DNA, 487 bp, Homo sapiens
ttacaatcatcacaccactatccctgttaccctccaaaaacaacagttaaatcttgggaaatggacaggaactcccaggcagacacataggagtgagatggagcataaggggcatttttctgctctggcctccatcgctgtatggtgtgggttctcttctcctgcccagagtttgcagcactgcctctgccccctatataaccctgcgttcctcaattttagggttccacgcttttctgtgtgactcccccaaaaacaagggagtgtttagagttgtgtatatccccattaaggcctcaggcttgaacctataccctttcccggggcattgaccaggaatggagttacccattgttttaatttagacccctcccaaagttcaagatcagcgttattttgtgccatgagtgtggtggggagattttcccctaggacaaagagactttccctcccatttttgccattgtgctagttaaaaaagaaaaaa

SEQ ID NO: 586927 - DNA, 362 bp, Homo sapiens
tcgcgaacgtgttacctagcttactttctccatgtgcagatgatagctagggaaagagtaacccaaaaactttctgtatagtctgtcccttcggaggcagcatcacttattggcagtaaagactcagtataaaagcaccagcatccctacttgggtgatggggattaattttatagcattccattttcctagtgccacatgtgaaattggattttgatgatcttaatctatattctacccttataataaaagatcaaaagatatatctcctatgaacagattggagataggagatgaaaagttgggaggatgtctttattctaatgtgagggtagggaaaatgtggataacacgttcgcgag

SEQ ID NO: 586928 - DNA, 322 bp, Homo sapiens
ttgggcctccatgtagggagaatcgcaagatagtccattttttgtggatggtcccaacatcagcaaatatataaccaaatatatccatcacaagtaggaatacagggaaacataaatggccagccactaaccattcaggttaacccagtagtcccaataatagcttggtcacacaaaaacatgattatgtgggcggggcacaggggctccggtaatcttagcatggggggagcccagggcaggaggatgactggaggccaggagtacaagaccgggcggggtaaggtagcaagacccggaagggagcccatagggtaccgag

SEQ ID NO: 586929 - DNA, 134 bp, Homo sapiens
gatgactagagttaccctggctgtacatagtctagatcagtaacaggtctatggtcgatggaccttgcaactcaagtaaggagacaggccatgccattcaagtgcatgcagctcactgatttcatcctcaagtt

SEQ ID NO: 586930 - DNA, 566 bp, Homo sapiens
atgccaatccaagggtcccaaatcatcccgcacatccaacaaggggcgcttatattccgatcatataatttctcccgtgccctagccggatccgcctctaccgaagttacgaagagttaatacgggagcccgtctcttgtacgttagccgtagccgtcgacgggacctaataatcttattctcgtgatcgctcagaggaggtgtttgttatggtaaggatgagttttttggggggaaggttaaggtcgtatctttatgaggtatatatatataggatcctcgactatggaatactgttcgatcctatagcccttgttttaaggtactcttcgttgctattactctattttatagcttcctaaagggccacttgctttaatataatatcgccttagactatacgcgtgaagcgccgattttagcttggcctggcgaacgatttttgtctctgactttttcggaccgaatgttagacgatttcttaaccggtaacctagagggccgcctatccctatcggaaaatagttttgttaattttggataaaaggatggtcccgtatgcttgt

SEQ ID NO: 586931 - DNA, 244 bp, Homo sapiens
ggcaatacgtcctacccgtgatgacttccacttgtaccaacaaacacttccgcgctgttgccttggtgtaggcggctgcgactcagccagggactctttctcaggggtggcctcctgggactgaggactcagtaccctagactcggcagctgtatttttcccgtgttggcatctgaacgtgacctcgtattacattttggaggggctcaaatactcgctcgcctcatgttcctggccaagatac

SEQ ID NO: 586932 - DNA, 149 bp, Homo sapiens
gattctttgtcaccagtggttgcgttgccgtcttgccatcctcttacctcaagctttgtgtgtcataggcatattcactgagtggtttggaagtatctcactcggactttttactatattccaccacttactacccacatctctggggg

SEQ ID NO: 586933 - DNA, 1137 bp, Homo sapiens
cactggcgctcttggtgcgcggtagctgtctttttctcttctattcttcttctactttgttctctacgctctgcttctctactgtgttgctattcgtcctgtcgttctcttgtgatctcactcttgtgttattgtctccgcctttctgttctccctcttgcctcatccgtccgtccccgcttcttctctagtgtcttctcctttctcttcgtcctctcttagtgtttcccgcgtttgtcccgctggggtccctttctccgtggggctgtctggttgtgttctgtgggctcttcttgtgatacttcccttgtcaccctggtcctggttccctgtggttacgtgccggtctgttgtttttttgacaccgtttatgccttcgatcgcttgctaatcgatgtgcggtgtcctgatcttctgtagtctttccttggtgcctagctgccgtgatgtagcagctaatgaagcccagcttctgatgtaaagtcagttggttgtgcctcatggagagtgagcgtttcacacgacctgcctaatcacagacaactcacttttgaagtaactgccggatagtgcttgatatcacagtgtaatgagcctggagcttctggtgatgaaggccctttcggtgggggctggtgaaaggcagtatagacgaggtggaacattacgagtccacatgtaccctgggtgcagccccgagtgttggatttgcgacagatcaagtggaatgaaggaccgcctggagttctggtgcacggatgtgaagagcatggagatgctggtggagcaccaggcccatgacatcctcacgtagggccccctggttccccgtcgtcgtctcctttgactcacctgagagaggcgtttgcacgcccaactgaatgctggctgctcagacggtccgacattgaatttcgggtcgggggttcgggatcctgtctgaagtacagactgttcttgctctaatgacaggactgtccctgatgggagcccaggcacacagggaggaggtcttctttgatgggtctctcctgcagaggtgtgggcggtctcagggtcttatggtgatacgggagagaaggaacgtggccaacggacaggaggcccactgaagtctgtgtactccgaggtggatca

SEQ ID NO: 586934 - DNA, 273 bp, Homo sapiens
tttttccccccccccggggcgcgggaaaacctcccttttggggggttttttggggaaaaaaaaaaaaaaagccccccttttttttttttagaggctcttccccaggatttttgtgggccccccggaggggttgccaaatttgggccccacccggtttttttaccaaaatttttttttttgggggcccccaaaatttgggaaaattggggttttttttttgttttcccaaaaaaccaaaacttcccgcccttttaattaaatggggggccttta

SEQ ID NO: 586935 - DNA, 123 bp, Homo sapiens
tcatttaactttactgttaagacatcactgaaatgaacttcagtaagctttcaattttgatacacagttcattattcataacttgaggcagtaataccagggggatgaagactggcaaggaag

SEQ ID NO: 586936 - DNA, 964 bp, Homo sapiens
gctattcctcctgctttgccgcgggcgcggccgacatcatgagggaaggtcgtgcgcttgcatcgtcaggagacaggtgcggcaagcacctgggcgccgagcttccgcgaggtgatcacgcgattaccacgggatcgaccccatgggcaccgtaccacggtcggacatgcgatactgcaaggcggttgtgatagctgcactcaatcgtgatactacctgtgttcgccagtcggcgcgtgtgtacggtgctcctccgccgtccgtgctcgtggagtctggagacccggcgcgcagtggactccgtgtgctcggggcccttcgggtgagatcttccggtcggagaacttcgtccgtcgctcagaggtggtgctgggagcaactgggccacggggctctgccagaactgcgcgtcagcttggtggtactcggtgctgtgatgttgtgagacgcggtacggctgacctgctgtgactttgtcctgctgtgttgccgtctgatcctctctcctgtctggggcgactgggtctgggatgggtccctcctcatccatcccgcaggccggcgagggagctccccgcaccggcactcgtgcccgcgttagtgtgctgccttcgccctgtgtcccacccgttggtggcccctgcctacgccacctctcaggtccaccagctcgtataaccaccggacgacgagctttgggtcgtggtaacagagctctctacgacatttgcttccgaagccttaagctgacacgccccacttggtgaacctgatacacctggtggctggtcccttgagtggcgtcccacctgtcgcgccttccggccctccacggctgcctgcggaacccgctcgttcacctttgccgctcccggtggctctatggccggtgccactgcgcgggcgcagtacgggtgcggccgccccccccgtgttgtgcacttgtctgcccctgtcgctgggc

SEQ ID NO: 586937 - DNA, 131 bp, Homo sapiens
tgacttatgaggatttccctcaccaagacccttgcagaagcaggaatgcagcagaagcaggaagcactaccattgaaccataccaggttgacttatcttttgatggagtgcatgaagacaggaagcgggta

SEQ ID NO: 586938 - DNA, 1297 bp, Homo sapiens
ctggcggctgccagagctgctggagctgctcggggtccccgtgtgcgtgctggctgtgctggctgcatgatggagtgagtgcatggctggcgtgcccctgtgtgtgctccccccctgtgactggtgctgctggccctgtgccctgtctcgctgaactctgctgtgtgtgtctgctgctgtgccctgctgctagctcctgacccctgtggccccttcctgcctgctgccatggctctggcctgctatgtgcccagctctgcagaaggctgctgctgctggagctcaatggtggcttgcaggaatgagcctgtgtcgagggattcctgcgtgacactggtggacgatggcgatctatacaactgggaggtggccatctatcgggccccccaacacctactacgagggcggctacttcaatggcgcgcctcaagttccccatacgactacgccatactactccaccagcctttcgcgttccttgaccaagatgtggcaccctaacatctacgagacgggggacgtgtgtatctccatcctccaccctgccggtggacgacccccggagcggggagctgcctcagagaggtggcaacccagcagaacgtcaggaccattctccttgagttgtgatctccctcctgaacgagcccaacaccttctcgcccgcaaacgtggacgcctccgtgatgtacaggaacgtgcaacgagatgcaatggcgaacggatccgggagtacaccagacatcatgcggcacacattctcttggctgaacacggtggactgcgtgatgctactgcgttaacggtgcccaccagtcctggccgactacttgcgctactcatcattgcgccgtccgccccaacgagtgactccaggacctctttcctaagaccgactctactaacccaagcacccgtcattgcttaatttaagacatcgtcgacttacttcttcgccgagcaatcagcgacacacttggcacgagcggcgtctcctgtcagcgtgtgatatgtacaaatatcgatcattaaactcacgaagctgctggatcccggtggctctcttagaggtacaggtaaccgcaccggaaggcaattcggtgctgaccgagcactcgttgcgggacatggatggactctcatacgtacctcggatggttgacgcacactgatgacaactgagggaggtccacccacaatacaactgcgcttcaccacgtcatagcacgcactaccgctctgagtagacctctggccccgttgcttccgcagccacatccgtcgtaattatgagatg

SEQ ID NO: 586939 - DNA, 337 bp, Homo sapiens
caggttatctcgcttctcctagccaacatgagcctaccacagggacaagggtaagagcacgggctgtgcaggctctagcacacctggcacgtcctgcctcccgcagttcactggacttcatgcaccttgtgccagtttcacattccttccccatctctgcagcctccaattttctccatctgtccaaatggggcatgcaactcacctgccttttcaggcattgttttagtgccatcagcaccaaaatgtccaagcattttgcacttcagcatccaaagctgcactccacaggccactccagtgtctttgttccactccttagtcattcacctttagc

SEQ ID NO: 586940 - DNA, 241 bp, Homo sapiens
acccgaggtggtcggttacagtcagatatgccagcaggaactcggtttacatgatacttatatacagatcagaagggacccgaggtccatatataatatatattatacatatatgcagatcagaagggaccctgaggtccatatataatatatattatacatatatacagatcagaagggacccggaggtggtcagttatagtcagatatgccagcaggaactcgtgtatacatgaacacg

SEQ ID NO: 586941 - DNA, 297 bp, Homo sapiens
gcacgagtatatattcacttttctcctttaccattatcatagttaattacacatttagccaaaaataaactgcaaattgccttgcaaattttcttcttttattattcttcagatatatcaatcaatacgaggctttttttcctccccaacgctttaatcattctgatcattactccgggtgaaacggttctctaacgcgatcgtttaaatttcgcgatagatcagggaaacgttataaagattgagtggaaagaacttccattcttcaggctgcttgtattactttgattctttttc

SEQ ID NO: 586942 - DNA, 857 bp, Homo sapiens
caaaacgaaaactcttgtgcttcaaaagacactaaagaaaatgaaaaggcaagccacagaaggagagaaaatatttttaaagcctacatctgataaaggatctgtatccaaatacataaataacttttacaactcaataataagaagacaaacaacccaattaatacattgacaaaaggtttgaatagacatttcaccaaagaggatatatgaatggttaataagcacataaaaagatgcccaacatcattagtcattagggaaatgctaattaaaaccacagtgaaatactacttggcacccactagaatggttataatcagaaagatagacagtaccaaatgctggcaagaatatggagaaatgggactcctcatgtattgttgatgggaatgtaaaatggtacagctactttagaaaatagtttggcagtttcttaaaaagataaacacaaatttactatacaacctagcaattattccactccttgttatctacccaagagaaatgtaaacagacatttacacaaaggctagcatgtaaatgttcatagcagcactattcctaatagccaaaaagtggaagcaacccaaacatcaatcaacactacagtggaatactattcaataatagaaaggagggaaatactgatgcatgctacaacatgggtgactctcaaaaaaattatgctcagtgaaagaagccagacacaaaagaccacatagtctatggttctatttatatgaaatgtccagaaaaggcaaatctatatagacagaaaatagattactgattgctggggctgggggtgggaatggagactgattatactgggcacgggtaatctctagaggtgc

SEQ ID NO: 586943 - DNA, 347 bp, Homo sapiens
cttatgttcgacccaccggaatggtctgtctcatatcacgtaacagcaaaggcgatccaaatggtggatagtctgagtaagctctcgtagacacatgtggcttgtcaggaaccatatcaactagtggcagtatcaccagacttcaagaatttagggccatgttccagctgtgtaccagaacggcgatcaatcttttccttcagctcagcaatacttgcatgcaatgtgagccgtgtgtcaatccaatacagtgggcattgcctgggcttattttggcctggatggttcagggatgttcacctgagcagtgatgccaggctgcttccattggtgggtcagatgatctg

SEQ ID NO: 586944 - DNA, 139 bp, Homo sapiens
tagagatccccaacttgcggacgtagtctagacgctcccaatgacccacttcagatactacaaaagattgtttcaacatgctctattgaaagggactgttcaaccactgtgacttccatttggaacattcccaatgaag

SEQ ID NO: 586945 - DNA, 249 bp, Homo sapiens
  misc_feature (5)..(5): n is a, c, g, or t
  misc_feature (242)..(242): n is a, c, g, or t
ttttntttttttaaaaggacggaattctttattggggaacggaaatattctggtcttacacagtagataataaaagggaatacggtataccctttattattcataaatgaaaagagaaaaccagggcaaaaggcggcagacagtacatctctaacatatggcaagggcggttcccggggacaacacctccttcagaaagggggccagcacaagggggggccggggtaccggagctcagaatncgggtaa

SEQ ID NO: 586946 - DNA, 469 bp, Homo sapiens
ccactggccccgaagcctacattcccaggaggatgagctgagtgctgtgcaattcatggtgcctcttctttatgaagccaagtgtgtaaaggttgccataaaggacaaacaagtgacatacttcataccttacagtggttggaatcacaaatagggctgagtgggttccggcagagccagagtactcaaatccgtggaacacccaatatgcagaaccagcgagaacttcaaaaagccaatcaggagcagtatgcagaggggccagcatgagcaggggctgcccccaggaacgcacgacatctggtctgcaacagcaaaaatgttgaagtgaacacgacaacgaacaaacagaaaacacctggcaactggagctggtggcagtcccagtgagacccctcagcctccttggaagaaacgggcccgggtagatcctcctgttgaaacttgaggcacccttcatgaacagcgt

SEQ ID NO: 586947 - DNA, 1500 bp, Homo sapiens
  misc_feature (543)..(543): n is a, c, g, or t
attctctacaagaccacaaagacatttggaacactataccgtattattcggcgcatgagctgggagtcctagagcacagctctaaggcctccgttattcgagccgcagcctgggccgagccgagggcgaacctctcctagtgtagagcggagcgacatctcactacacggtgtgagtcgtgcgaccgacccagtgcgagttggtgaataatgcttctgtcataggtaatgatcccatcaattaatgcgcgagcgctctgtgtgccacactcgacgtgaggtgtgcccactatgtaaactccggatagcgccacgcgagtatggagcgtcttccctcgacataaaagtcaacattagagcattctggactgcgttaccatccctacgtcatccgtagctcgcgtgcgtcggcatcatgactgagtagctagtggaggccgggagccaagggaacaggatatgacaccaggttctaccactcaccttacgacagggcaactagctcccgacctctgggagacctctccgttaggaccgtaaaccnaatcttactcacttgtaactaccgtacagcaagagtagtcttgccgtcatgaatcatgtaagggaggccgtatcgaaatagttcgatcgacacaaaccaatttgatcgcgaatgatcaaacaaccacgccgtgcgcaactaacacgcgcaaagagaacacgaacaacgccacccctcgtatcggtacgtgacctcacgggtcgccattaattccagcaagctagggtcccatgacctgtgcatgcgcgtagtcatacatacctcaggttaccgttagggcctggccatggggccagttcactacgtagcataccgttagagcaatgaaatccggaataacacttccacatcaactccggatccttttcatattcggaaagcccgccgagcgggaaggagcagtagaagaaaaccccgatctacatagtagagcaaaacaaccataagtgccttgagattataatccgggtcagacactcctgacaaggtctacactacataacttgattccgtagcccaagagggcactgaccggggacaactaacaatcgttcacccgagaataatgccggtaagacacctacagcgaacgtccccggcgagaacaatacaaacgaacagccccagattatcgggcgaacacacaccaccaagggacacacatggggacgcatgcaagcgcccaactgtaatcgactccaaaaagggcgccgagtacacccaccgagggtatgaacacacgaacgactgacagaaacaagaccaaaaacaaatcacgacccgacaaccgaaccctacacagagtcactcacaaccacacagacagccacacatgagacaacaccccgcgacgtgaacacccaagagaatacgcagcactaataccacacacgaggcactacaccatcatatgctatcacagcagacacgacacacagaacaggacacgagctcaca

SEQ ID NO: 586948 - DNA, 256 bp, Homo sapiens
tccccggccctttttttttaccccccggttgcccggggggcccccccccccttttttttcccccctttaagaacccgggggccgttcccccctccggtttttttttttgggcggggggggggtttccttttttccccgggggcccctttttccccttgggcctttttgggggccccttttgccccgttttttccccccagccggggggggccggggcggggtttcccggggttttttgcccccccgggccccccca

SEQ ID NO: 586949 - DNA, 735 bp, Homo sapiens
gggcccttttcctcagctgcctgcaaggtgctcggtccttccgaggaagctaagggctagcgtatgtggtgtagaggccctcacttacatacctggctgacctaagcacctgtgttacctggcaagctgccagccctaacactacggcccgggcccattggccctacttgtctacctgaaggcttactgccctggcaattctacactcgggcccttcagtttctggcaacggaacgcatcgaaggtgttgacaccatgtacaccgggagaggaataaacgcatacacatgggccctcaattacaacactgccaggccggggtagtaacacattggttgcgacggccctaatttatctgggcgcactatgggacttgttgttcatggcacaaaagtcgcccccttgtgggcccaaacatcgtacaaaccacttcatgggagacgccctccatttcgtggccaaatttgtaagggggcgccccgggtttgggacccattggaattcccacgcccaggcatgggaggtaggctatggccacaccccaagtgccaacaggagaacgggccaccttgggaccccccgtatcccacaatggcacaatggcctaggctacacaaggtcatggaaagcggaacgacaacgcaacaagcggtgtcgccagcgcgcagacaacgggaaacgaagcacacgacaatccccggcaggcgacagcatccgtggcactggacatgaaca

SEQ ID NO: 586950 - DNA, 106 bp, Homo sapiens
acctagaggatcccctggatcccacccatacattctcatctctacatctgtctgatgtacccagctcctgtcagcccaggataaggtgagagcagctactcagtcc

SEQ ID NO: 586951 - DNA, 817 bp, Homo sapiens
  misc_feature (4)..(4): n is a, c, g, or t
  misc_feature (101)..(101): n is a, c, g, or t
  misc_feature (138)..(138): n is a, c, g, or t
  misc_feature (148)..(148): n is a, c, g, or t
  misc_feature (253)..(256): n is a, c, g, or t
  misc_feature (310)..(310): n is a, c, g, or t
  misc_feature (332)..(332): n is a, c, g, or t
  misc_feature (385)..(385): n is a, c, g, or t
  misc_feature (392)..(392): n is a, c, g, or t
  misc_feature (403)..(403): n is a, c, g, or t
  misc_feature (417)..(417): n is a, c, g, or t
  misc_feature (432)..(432): n is a, c, g, or t
  misc_feature (483)..(483): n is a, c, g, or t
  misc_feature (533)..(533): n is a, c, g, or t
  misc_feature (663)..(663): n is a, c, g, or t
  misc_feature (699)..(699): n is a, c, g, or t
  misc_feature (725)..(725): n is a, c, g, or t
  misc_feature (729)..(729): n is a, c, g, or t
  misc_feature (817)..(817): n is a, c, g, or t
aatnttaaaagctatttatcttttaatatgaaaaaaattatttatttcaacataaaataaaaatctcaaatgtaggataagaacaaaaccaagtgtgtaangggggaagcaacagcaaaaggaagaaatgagatgttncaaaaaaaangaaggagggttcacacactcctctggggactgactcaaacactgatgtgagcagtatacacacactccagagtcaggggtgttcattcttttttgggagtaagannnngtggggattaagaagacgtttctggaggcttagggaccaaggctggtctctttnccccctcccaacccccttgatncctttctcttttaaagggaaaggagctgagtaagggaggtaaagtatagaaanggaaggnttccaaatatnacagaatgggacanactcctccaaagtanagcttagagagagagaatataaaagtggagttaatactgctgacacctccnttgaagctgggatgggaaatggacatacttagaaatttaataactttaanagcaaaaaaaaccctctccaaaacttttagaatggaaaatcccatccccttccttatatagtgacttctacccactaccttctaccattttctactttgggcttaggatgatagccattatctacatgtnttttcagcacctggttggttctaaatgggatctggngacccagcttcttggagatttttaanaggnagtattaactggacaaatggaatgggcaccagaaagaaatacagggtcacccagaatggcagaaacctaggtttcccagagtggaaan

SEQ ID NO: 586952 - DNA, 251 bp, Homo sapiens
taggggctgagcgggagtctagaatgtggatatttgaaagcccctggggtgaagcagtgactatctagacgagcactctgtaaatattgggcaagacgttggacttccctggggcacgaaactgccatagaccagaatgtgtctattatgttgttttttgttgttgttgttgtttgttgttgttgttgttgtttgagacagagtctcactctgtcacccaggctggagtacagtggtgcaatctcggctca

SEQ ID NO: 586953 - DNA, 416 bp, Homo sapiens
  misc_feature (14)..(14): n is a, c, g, or t
  misc_feature (21)..(21): n is a, c, g, or t
  misc_feature (40)..(40): n is a, c, g, or t
  misc_feature (48)..(48): n is a, c, g, or t
  misc_feature (81)..(81): n is a, c, g, or t
  misc_feature (90)..(90): n is a, c, g, or t
  misc_feature (120)..(120): n is a, c, g, or t
  misc_feature (207)..(207): n is a, c, g, or t
  misc_feature (212)..(212): n is a, c, g, or t
  misc_feature (237)..(237): n is a, c, g, or t
  misc_feature (297)..(297): n is a, c, g, or t
  misc_feature (300)..(300): n is a, c, g, or t
ccccctacctgaantgccttnacccatcttaaccccccanttcccatnagggccccctttaaaaaaaacctgctggagacnacaatatcnaaaatgtgaaggggcgcccccatattctgnatggaaaaaaaacatctaaggccatcccagggcaaggaactgtctttctggttcaataagactgcccccgaacagtcctaacaaagnctcancactgaccatacctcagcccctaanccctggggctgaggtatggtccagttgctgaggtatggtcagtgaccatacctcagcccnctnaccctggggggcagctttaacctgggcatgtttcctgggtaccagtggggccaggaggtggctctggctcagagccgtcagtgtggctgaataaaggctctcttgggtaaaaaaaa

SEQ ID NO: 586954 - DNA, 115 bp, Homo sapiens
taatagaatagtgtatagcaatgaacatagggaatgcagatattgctacggatatcattttcttttctattttttggtggggaaaacgggaatcttgtctgttgcccaggttgga

SEQ ID NO: 586955 - DNA, 1716 bp, Homo sapiens
cccttttaagggccaccaccgccctcatggaaagagctgagccgcttcagactgcggggcaagccgggcccgccggacttccccctttccctcgtcccactgggacaaggacgcaagcgcattcgtctgtacatgcgaagtcgacagaatctacagaccagtacttacgcaaacacgatcaatgatacacggtaactcatcactacagcatagttacacaacaacacattagaatcacacaataatacactagtatataggaccacgagacgcgagagaatggagagaagcaagaagacagaacgcgcgacagacacgcacgagccacccatggatgccatagaggaatacgaaagacacacagagagcgaacgaggagagagaggcgaacgaaggcaaaaacgagcgagaggcacgagacaggaaaagagtccaagagcgacacacaacagacgagagaaataaacagaaacaaacaaacaaactcaacacgcccacaccaacaacacctcacagcgaccataaaccaaccacacgaagcaaacagccgaaaacacataatccaaacaaccgaaaacacgtacccaccacaccccctctgacacgtcaccaagatataaacacacataacagcacaaacacacccacaacaccactacagactctataccacatacccagaaaacaaagtaaaatacaaaacacaaaaatagacagacacaactaaaacaaaacacacaaaccaaaacaactcaaaacacacacaaaacctaatcacaaacacagctcaaaacacaaaccacaccacaaatacaacaacaaaacaacaacagcgattcaaaaagtacaaccgaacactaacacacactactcatagaacactagccaacaaaacaaactaaacacaatctatacaagaccaatctacagaaaagatatacgcgatactaacaatattggatatacaaaccactagactcacatggcaatccagatatatacattcaactaaaacaatataatctaaacactatatacacaatatatcaacaactgagacatatctgctatagcatcatacaaaataaactaacacgcgacctacaacctccaccataaacaccaatgcaaaataacaaactaacgattatacaagaactcagaatcacgatacacaaccacaatacatacactagaaatatagatagcatacatgcacatcattactacatcatagtaaccgcagataatcacactctcctcctaaatacacagacatacagtaaacctcagcgaactaatcaataaagataacagataaatacacataaaaaaaagagaagctaacacacataccacatcactcaatacaagaataaaaataaagacatagaaaagaaaatagaaaacaatatacaaacctatacactacataagacacagacgacgtacgctcctaccacatccgtaagctccaaacaaagacaatgacgattacataaacaactaacacacacgtcaattaaaacacaacaaacatagaagatcaataacacccacaacacacaaaccacacaacaacaccaacacacgtcataaatctctcagctgcaaatacacacaaacaagctgacatacgtatccatcagactaaaccaacacgcagacacgaacctacgaagcattaacgagcagaacacaaacacaaaacaacaa

SEQ ID NO: 586956 - DNA, 154 bp, Homo sapiens
  misc_feature (66)..(66): n is a, c, g, or t
tactcttgagtatccccttcacgtggctgcggaacgcagaagaggagtctgaggataactaaaacncaaatacacaaaatgaaacaaagaacaatttaagtattttttaaaagtttcacgtcttcgccaatcacagtgcagcaaggccaagcag

SEQ ID NO: 586957 - DNA, 205 bp, Homo sapiens
  misc_feature (37)..(37): n is a, c, g, or t
  misc_feature (62)..(65): n is a, c, g, or t
  misc_feature (74)..(74): n is a, c, g, or t
  misc_feature (87)..(87): n is a, c, g, or t
  misc_feature (138)..(138): n is a, c, g, or t
  misc_feature (141)..(141): n is a, c, g, or t
  misc_feature (156)..(156): n is a, c, g, or t
  misc_feature (196)..(196): n is a, c, g, or t
ctctgcgagccacaggctaatgagcccttgtctcctncgcacagcctttggacctgtctatnnnnatggtctgnaaacttcaggaanactgatagctgagcatctggcacatattatgcactcgaaaaccatgtattnctntctccttccctttgngacccgtaaaccagggactggacattttttcaagaagcangaactggct

SEQ ID NO: 586958 - DNA, 962 bp, Homo sapiens
  misc_feature (2)..(2): n is a, c, g, or t
cnaacgactagccgaggaaaggatacggctgaccacataagaaggagacctaggagcggttaactacacagtataatagacgtctgtcagacaggatcaaagcaaagctgtgttaacccgggggctggttgatctcccgcgccattggggtgctgtacaccacccgaaaggggtacgcctttaaaaagggggccgaaactatttacaagtgccagcgggcacagaagtttcactcccgccgctgggtgggccttacgggcccccacttggggtcgttaccgggcccgctagtaccgaacccgtgtaaagaagggggacaaagagccgatgtgggcccccccttggaggtgaggcccacttggggccgcacaccagggggggacaccccggggggccacagtgtcgggtccccttctttgttggggtccgcgccttttgttgttgccgccaagtggccctcacaacatttttgttagacgctacttcgggcagagaaccccgccgctagtgtactcccaccccccgggcgcggcacgcttttatgacgccatgtggggcacgccccggctgctttaacgatgacatgtctctggcaacattttagagacctcgcccttcgcccgcccctccccgcccccgattgttgacggttgcggcctccaagcgaccttgggcgacgggagacaccgaggcaagaatggcccctcacagccattgggagacaccgcgtcgagtcgtgtctgagcaacggagacccacacaagagggcgttcgatgggaggagaaggacatcctcgcacctcgaagaatgcacacagaggagtcctcagatgagcgaggccctcgcgaagaaggtgggactatcaaaaaaaagatgataggcgtaaatccatgtgcggcacgggaaatttcgaggggggtggcacccaggcccttaaaaaaaaaaatcccccaacataaca

SEQ ID NO: 586959 - DNA, 915 bp, Homo sapiens
  misc_feature (1)..(1): n is a, c, g, or t
  misc_feature (3)..(3): n is a, c, g, or t
  misc_feature (5)..(5): n is a, c, g, or t
ncncncttcctccgtgggtggttataaacagcttcttgtgacccgtctgttctcgtgttggcaccacccagaccgtgtgtgtcggccccttctgacatgcccgcgggtcgtattaccttctccgcgtggtgttttctttcttcccccgggctgggttgatcaactctttattccaccgcgacgacactgtttgatctcctctctgccctcctttgtggtggcccaccattcttagaggaacacgattgtgtttccccacacaaacgaccgctgctggtttcgccgtcctgccggtcattttccccgcggctatttttgttttcaacccccaccctcttccgccgccgcgctggtgtgggtgacagacacaccaatattatgtggttgctgccgctgtcagatgaaattcttcccgcggcggtttttttggaataatagatgatgcggcgcgaccacacccccagacacctcggtggggagattactcccccccctctgcattataggggccccgccgctgctttataactccgcgtgtctcgctcacggacgtagtagaacacctcccccttgctgccccactaagtcctcttctcctttctagtgtctcggcggtggtggttgtttttatagttctctcgcgggttggttttctcacccccccctcctctctttttgaacccccccttctcttgtttgggggggataaagaactaccccccccaagtgggttggccacgcccccacatgctgctgcgcttgtaatactgtggcctctcccccgcggtcgccccacccccgctcgttggttttgggggcgcccccccccccccggggccccaattttcccgttcccccggggaaaaaaaaaaaaaaatgtgggggaaaaaaaaaaaaaaaaacccccgcgggcca

SEQ ID NO: 586960 - DNA, 568 bp, Homo sapiens
  misc_feature (459)..(459): n is a, c, g, or t
  misc_feature (463)..(463): n is a, c, g, or t
  misc_feature (512)..(512): n is a, c, g, or t
ggtggatggtatagatggaggcatggatgagatggatggatgggtgaataggtaggtaggtagatagatggatgtatagatggatgcatggatgccgatggatggatgggtgaatagatagtagatgatggttaggtaggtagatgagtggatagatagatggatgcatgcatgagatggatgggtgtatagatgatgggtaggtaggtagacggatggatggatagatggatgcatgcatgagatggatggatgggtgaatagatggtagatgatgggtaggtagatagatgaatggatggatagatggatgcatggatgagatggatggatgggtgaatagatggtacatgatgggcaggtagatagatgaatggatggatatatggatgtatggatgagatggatggatgggtgaatagatggtagatgatgggttcacagtattggaagggggangacngaatgcctgtttacagagacccgttacagagctatgttaagtatactgnatgtcattctagtaacgatcgagacatagggtaccggctcgattcgtatctgtctg

SEQ ID NO: 586961 - DNA, 746 bp, Homo sapiens
  misc_feature (2)..(2): n is a, c, g, or t
  misc_feature (63)..(63): n is a, c, g, or t
  misc_feature (104)..(104): n is a, c, g, or t
  misc_feature (188)..(188): n is a, c, g, or t
  misc_feature (192)..(192): n is a, c, g, or t
  misc_feature (194)..(194): n is a, c, g, or t
  misc_feature (197)..(197): n is a, c, g, or t
  misc_feature (210)..(210): n is a, c, g, or t
  misc_feature (219)..(219): n is a, c, g, or t
  misc_feature (258)..(258): n is a, c, g, or t
  misc_feature (268)..(268): n is a, c, g, or t
  misc_feature (276)..(276): n is a, c, g, or t
  misc_feature (280)..(280): n is a, c, g, or t
  misc_feature (283)..(283): n is a, c, g, or t
  misc_feature (287)..(287): n is a, c, g, or t
  misc_feature (294)..(294): n is a, c, g, or t
  misc_feature (336)..(336): n is a, c, g, or t
  misc_feature (353)..(353): n is a, c, g, or t
  misc_feature (377)..(377): n is a, c, g, or t
  misc_feature (379)..(379): n is a, c, g, or t
  misc_feature (383)..(383): n is a, c, g, or t
  misc_feature (385)..(385): n is a, c, g, or t
  misc_feature (391)..(391): n is a, c, g, or t
  misc_feature (411)..(411): n is a, c, g, or t
  misc_feature (433)..(433): n is a, c, g, or t
  misc_feature (437)..(437): n is a, c, g, or t
  misc_feature (440)..(440): n is a, c, g, or t
  misc_feature (464)..(464): n is a, c, g, or t
  misc_feature (480)..(480): n is a, c, g, or t
  misc_feature (548)..(548): n is a, c, g, or t
  misc_feature (578)..(578): n is a, c, g, or t
  misc_feature (583)..(583): n is a, c, g, or t
  misc_feature (604)..(604): n is a, c, g, or t
  misc_feature (669)..(669): n is a, c, g, or t
  misc_feature (734)..(734): n is a, c, g, or t
cngtgccagcccttgagctgccgacattagagacgcccaaggccgtgccgccactggcacgangccgcccgccacgtgtggcccgtcctggcctttcccgctgnactgccgcgctcccgacactcctctctggcgttcctctgtcttaggattttccctctctactgttgtaatgtgtgagcctgtcngccncnccncgagtgaccctcntgcgtcccncgtgtgacggccagaggctttccctttgtaaggcttaantctgagtgcngtcaagantganganaccnaacaccngaaccctaaactccaatgatatggcgccaatttagagcggcncccccccccctccgagncagcggcattccacccctcggcgngngccncncccccnccccctcagagagagcggcncccccaccccctcagagaaagngggnggnccaccccctcagagagagggggancccacccctcagaganagcggcacccccacccctcagagacagcggcacccccaccccctcagagagagcacccccaccctcanaatcctactttggtaaatattaatgtttancagtnagcaaaatatttaacccagtnagcaaaattaacaccgtcatttcgatagttactctgttgtgcatagtaaatgctgcaagatgagnttcacattggatgaagcagatttgagaaacgtttgccagacagtgtgcctccccttcgacaggancctaagccagag

SEQ ID NO: 586962 - DNA, 431 bp, Homo sapiens
gtcgacttccgtctcctcagtcacactgcgcccccctcccttgagtttgaatctgagtttgacttgctttgcttcatttgtttccttcatctctgttgttcaccccacaatagttgcgtgtcggaaaattcttcagggtgtttttagggaagttttagtttttcgttttaatcctgtctgtaagatttcccacatccgatttgtttttcgccccggacgctctcgggaacacctatacataaaaaaaaaagaagaaaaataaaaaaaatcctaggggaccgcttttcctaggcgcctcccgataggccaaagagtttatattggaagcttttttttgtaaatcccaacgtcaaagcacccatccaggcatgacggtagtggtacaggtagtgcacagagaagattgattgccatgccatgtgtttccttga

SEQ ID NO: 586963 - DNA, 362 bp, Homo sapiens
aagtcgcagctactgtgggaggctaaggtgggaggtctctgagcctgggaggcgaggtacagtgagctgagactgcgacactgcacaccaacctgggtcatagagaccccatctcaaaaaaaaaaaaattcagggccacaaaaaagagacaccggagtcgacattattgaacccaaagctgtttctttgacaaggctgattacaccaagataggcaacccacaaaattcccaaatgatatagtcaagcttttaaggcacaaaagtgtcttctgaacaattattgaggtgacagagtgcgtagcctggagatactaatgtaatctgccttgcgcaaattggtatccagacaagtgcagcgtag

SEQ ID NO: 586964 - DNA, 307 bp, Homo sapiens
cacatcactgggctatacctatgaacactaagtacacaaatatctcttagagaccctgctttcaattattttcgagtatacattaggtcatccttatctagatgggggggatccaagactcccatggatgtgtgaaaccaggaagagtatcaaaccccgtatagtgtgttttcacctatatatgtatatccatggtacagttaatttctaaattcaggcagagtaagagattaacaacacagtaaaaatcgaactataccaatatttggtaataaatacatatagctgtggctgcgctgcaacgggc

SEQ ID NO: 586965 - DNA, 789 bp, Homo sapiens
  misc_feature (39)..(39): n is a, c, g, or t
  misc_feature (68)..(68): n is a, c, g, or t
  misc_feature (73)..(73): n is a, c, g, or t
  misc_feature (81)..(81): n is a, c, g, or t
  misc_feature (87)..(87): n is a, c, g, or t
  misc_feature (101)..(102): n is a, c, g, or t
  misc_feature (122)..(122): n is a, c, g, or t
  misc_feature (146)..(146): n is a, c, g, or t
  misc_feature (155)..(155): n is a, c, g, or t
  misc_feature (160)..(160): n is a, c, g, or t
  misc_feature (166)..(166): n is a, c, g, or t
  misc_feature (170)..(170): n is a, c, g, or t
  misc_feature (253)..(253): n is a, c, g, or t
  misc_feature (287)..(287): n is a, c, g, or t
  misc_feature (373)..(373): n is a, c, g, or t
  misc_feature (412)..(412): n is a, c, g, or t
  misc_feature (418)..(420): n is a, c, g, or t
  misc_feature (439)..(439): n is a, c, g, or t
  misc_feature (455)..(455): n is a, c, g, or t
  misc_feature (461)..(461): n is a, c, g, or t
  misc_feature (550)..(550): n is a, c, g, or t
  misc_feature (560)..(560): n is a, c, g, or t
  misc_feature (567)..(567): n is a, c, g, or t
  misc_feature (584)..(584): n is a, c, g, or t
  misc_feature (596)..(596): n is a, c, g, or t
  misc_feature (601)..(601): n is a, c, g, or t
  misc_feature (607)..(607): n is a, c, g, or t
  misc_feature (655)..(655): n is a, c, g, or t
  misc_feature (657)..(657): n is a, c, g, or t
  misc_feature (694)..(694): n is a, c, g, or t
  misc_feature (714)..(714): n is a, c, g, or t
  misc_feature (765)..(765): n is a, c, g, or t
ctctggtactgggtgttccctctagctcccaggctggcntggcctcctgggcgaggggctggcccagngcctncgtttctnggcacntactcagagagttnnggaataaattatagttctgncactcagggacaatgtagatattntgatgcaanattanacattngcanacaaagggtataaaaaccctcttggagccacccctcgcctactggcctcagggtcattgtgtgcaggttgtggccacgcttgnatatgttgcaggtgccctagtaaagtctccgtgnagataatagtctggggcatggttcgcgccccgaggtaggccctttgccctctctgggcttcctgtttcctccttccccctcctacntccctgggcctggtattaaggcttgtggcctttgtggangggggnnnatggaacagagggcaggangtggagggggcagggnggggcngaagggagtgttggtctcagctgttcagcccaggctctccccctgccttgatgatgtccttggccagcacctgcccgcagagccatctnggagccaggnagcaganatagatcacagagctcnaatccacacctngtctncaccanagcccaggcagggcaaggtgtaggactacaaggcaaaaggggctcttnanggcctgttcccaccccacccctggcattacccaccanccaaagaagtgcaaccaaancctcctcaatctccaaataaattatggaaataaattatagtcttcacagtncagttgatttagccacccatgggt

SEQ ID NO: 586966 - DNA, 448 bp, Homo sapiens
  misc_feature (80)..(80): n is a, c, g, or t
  misc_feature (360)..(360): n is a, c, g, or t
ctgcagaatgttgaatgaaggagagctgcctcagcatgtaccaagtctatatatcaggtctactgtgaacacttccaaanccaaacccgtctgaatgcataaacacataatgaagtcctttactgtcacgaaatttgaatccaggatggccagtacataagtaactccttgaaattcaaattggattcagttcttgaagaacgtcaatcaagacttctacattccatgtgtgtgcctgtgctccatcactattatctttcccatcactccagatcccactggccggagcaaggaaaccatactctgtaataggaaggccatctgttaatcctgaactgagttcgagccaatcattcccanaaacccttgcaaacctggggcagctggtgacctcccgaaacaccaaaactggcacgattattattgcaaccattcttcagcacgggga

SEQ ID NO: 586967 - DNA, 479 bp, Homo sapiens
  misc_feature (33)..(33): n is a, c, g, or t
  misc_feature (375)..(375): n is a, c, g, or t
  misc_feature (422)..(423): n is a, c, g, or t
  misc_feature (427)..(427): n is a, c, g, or t
aattcgcggccgcgtcgacgatcggcgtcacgntcacggaggcgtcggccacgttcagcggacacgggagcaagatggcgattccgggcaggcagtatgggcttattttgccaaagaaaacacagcagttgcaccctgttttgcaaaaaccatcagtgtttgggaatgattctgatgatgatgatgaggatcttgctctttcacccaggatggagtgcaatttgtgcagtcacaactcatggcagcctcaacctcccaggccgaagcacgcctctcacctcagcctcccaatagctgggaccacaggcacacaccaccatgcctggctattttttaattatttttgtagagacagagtctcactgcgttgcctangctgctctgaactcctgggctcaagtgatccactgctttggctcccnngttngggcttatagtgtgagcctgcactggctgtgcttagtatgtgtatatatgtg

SEQ ID NO: 586968 - DNA, 466 bp, Homo sapiens
tttgagcctctcctatcccacacgtgcagtagctggagtttcctttttatctaatacttgagtttcccactgccatacgcacgccttgttgatgcctaatgtcttcttgaggtttcctttagagggcactccttacctttggtgccagccattctgctattctgatcctacttcccctcattactgatcttccttctctgccatcctgaccccttcctgtccttggatgcctttggagttgcagagaagctgtctttatcttcctggtgtgatacttgttttctaatagtaggaaatagtgttttcttgttctgcccagttttctctctttatagatgagacatctaagttcctgctccctggatgtatgtcagtttttctcttacatggtaatgttctgatctgagtccggtatctccattgtctaactttgcatagaggaacatacctgtgctttggtggggac

SEQ ID NO: 586969 - DNA, 698 bp, Homo sapiens
tgcccaggctaattctcaaattcctgagctaagagcgatctgcccacctcggctccgaaagtgctaggattacagatgtgaaccactgtgcctgggcctgataagtgtatgttctggttaagaactattgtctccagtcactcattccaggttcccagagcaaactctctctgctctcggagcgcggtgacacatggcatatgtgctccaactagttgtcagtcccaggtctagtactctccagatcagtttatcagagctctcatatatatgtagatgccatccttgtctaaaaacttctcgcgacctcctggaatattcctattgatctcgatgtttatttagcatcagtctcaagaagactaggtcttagtgcacagtatctctgacaaagaaaacagctttgtttgtataactggtatgaacatgaaaagattctcatcagagtgagcatgttaaagttatatcagtttctcaccaaagaagtatgcctgggagccctccagctgttaaatagacatatgctattactacttcttatcaaataatctgtaatgccctgtgatgtttgatgatacttcgttcaatatcaaagtgttatgtatgtgtcactcagtaataagtagcgaaccatgtaaaatgccacttttcaggaaaactgtatgtaacattttgtgtagcaatgttaaacaagaaat

SEQ ID NO: 586970 - DNA, 777 bp, Homo sapiens
  misc_feature (33)..(33): n is a, c, g, or t
aattcgcggccgcgtcgacgatcggcgtcacgntcacggaggcgtcggccacgttcagcggacacgggagcaagatggcgattccgggcaggcagtatgggcttattttgccaaagaaaacacagcagttgcaccctgttttgcaaaaaccatcagtgtttgggaatgattctgatgatgatgatgagacctctgtgagtgaaagccttcagagggaagctgctaagaagcaggccatgaaacagaccaaactggaaatccagaaggcccttgcagaagatgctactgtgtatgaatatgacagtatttatgatgaaatgcagaaaaaaaaggaggaaaataatcccaaatgctttggggaacgacagaaagcccaagtatattcacaacttgctaaaagcacgttgagatcagaaaaacaggaacaggacaccaccgaactggacaagaaaatacagagagaacgagaaatggaaacacagggggagttcgactgataacagaagcatttgtgacatctgcatataagacacaactgcaagagagagctgaagaagaacgaacgcagaacacgagggctgctgcactggaagcatgttggatgtaaccaagcagcaaagatctcaggtggattctataggcacctattaaatcaagcagctcggtgaagcaggaagtacctaaatgccagctttcgtgaagccagatctgctataccggcacgacacatcaggggctctccaatgacgtagttcaaaaaaccgattcccagagaat

SEQ ID NO: 586971 - DNA, 749 bp, Homo sapiens
  misc_feature (33)..(33): n is a, c, g, or t
aattcgcggccgcgtcgacgatcggcgtcacgntcacggaggcgtcggccacgttcagcggacacgggagcaagatggcgattccgggcaggcagtatgggcttattttgccaaagaaaacacagcagttgcaccctgttttgcaaaaaccatcagtgtttgggaatgattctgatgatgatgatgaggatcttgctctttcacccaggatggagtgcagtggcgcaatctcggcttactgcaacctctgcctcccgggttcaagcagttctcctgtctcagcctcctgagtagctgggattacaggcaggcaccaccacgcctggctaatttttgtatttttagtagagatggggtttcaccatgttggtcaggctggtcttgaactcctgaccttgtgatctgcctgccttggcctcccaaagtgctgggattacaggtgtgagccatcgcgcctgagcaatatgtggtggttttttttcgagacggagtctcgctctgtcacccaggctggagtgcagtggcgcaatctcggctcactgcaagctccacctcctgggttcacaccattctcctgcctcagcctcccaagtagctgggactataggcgtccgccatcacgcccggctaatcattggtattttatagtagagacggggtttcaccgtggtctcgatctcctgacctcgtgatccaccctccatcggcctcccaaagtgctgggattaccggcatgagccacgcgccca

SEQ ID NO: 586972 - DNA, 400 bp, Homo sapiens
ggcgagatcacatcacagaccggggctgtagtggggtggggggagggatagcattagaagatatgcctaaggttaaatgacgagttaatgggtgcagcacaccaacatggcacatgaatacatatgtactaaccttcacgtggtgcacatgtaccctaaaacttaaagtataaaaaaaaaaaaaggtaatggcaaaaaacacaattactttggcaccaaaagagtgcctttatcaggtggaggaagttcccttcatatcttagatagctgagagctttggtttattttttatctcagaacggatgtgggattttggaaaggttctctctcctggcttaatggagatttcaaaaatcgggaagtgaaggtgggattttggaaaggtatctaatgggcctaa

SEQ ID NO: 586973 - DNA, 151 bp, Homo sapiens
ctgcggtagcgtcatacgagctcccggaacactctgcccccgaaaacggtgtgttactctcgacacgacggcctctggacgtggacacggcctctggacgtggccacggcctctggacgtgggtctggggtcacgactgtggcgcgggtac

SEQ ID NO: 586974 - DNA, 187 bp, Homo sapiens
  misc_feature (5)..(5): n is a, c, g, or t
gctantggaggcaggattgaacctacatactatgttgggttcttaacctgctagagacacaacaggaaccaacccctaggtatatctgtctagtattctacttcctagtggcaatatgacgaggtgattccacaaaggcagctgggacaagggaaggacctcaacacatgaccctatggacagaaca

SEQ ID NO: 586975 - DNA, 445 bp, Homo sapiens
  misc_feature (187)..(187): n is a, c, g, or t
  misc_feature (195)..(195): n is a, c, g, or t
  misc_feature (200)..(201): n is a, c, g, or t
  misc_feature (213)..(213): n is a, c, g, or t
  misc_feature (255)..(255): n is a, c, g, or t
  misc_feature (422)..(422): n is a, c, g, or t
aacaatattaaagaccaataaataagtgggagtgaacaaaggtaaaaggtaactaatatcacaattaaaatattctgctatctctcactctctctcttcccctttccatttgtcacacccaggctggaatgtgacaaaaaaatataaaaggtcaatttcatcatgcaggaatgagtcgtagaaaaanggagaaangaacnnagaagaaaacancagcaagtcactgtaagtactgtgaaaataaactgaaagtangggctagaaaaaaaacagagaatgtccgagtagtctgatggaattgggaggtctgagatgagaaggccacccaggtgagaccagggagattgaggccacaattgattcacgattgcatctctctgctggaccttaattggtactgtaattggacaaagagccatgtngctcttagatgttggcaaagtga

SEQ ID NO: 586976 - DNA, 535 bp, Homo sapiens
ctaacctccctcacgcggcggtggctgccgggacctagcaggtttcatgctggagcggcggcggcggcaacatggcagagaccgcggactggagtgggccgcttcaagaccaactatgctgtggagcgcaaaattgagcctttctacaatgtggctggaaaagcacagcgtggaccagactggccagcacctcattctgcagtctgtggcaccagagtcaacattctggaagtggcctcgtggggccgatgctgctggagtctggagcaggatggaccatggaggacatcaactgcctttgaccatcagcccatgacaatcgaggtgcatggtgacatgccagatcgggccattgcttgctggctcagttgtggcctggcaagagtggcagcgattacccatgcctgtggaaaggctgatacacactggaccccggtggccaaccatggcctatcagaccacaacctccacttctgctagaccacaggtggcatgtgatgggggccgttgctgcgtactggggacaatcggtgcg

SEQ ID NO: 586977 - DNA, 261 bp, Homo sapiens
aaggttttttttcccgggcccgtttttttggggccccaaattttttccccaaggcccaaaaattgggccccccccgttgcacccgttttttaagggggggggcctccctgcttggatttttttgggccccccccccccccggggtcccaatttttaaatccctggggattttttggtgacatgccttgggccaaggtgttgggttgttttttttgggaaagacaaacaaaaaaacaaattttaaatggatttgggggccca

SEQ ID NO: 586978 - DNA, 103 bp, Homo sapiens
gagtgctttgacatacagagaaccgctgtccaggcaagagctctggatcaagaatgggctacactgaaggcccttgcttcactgtattcaacaacgtccacta

SEQ ID NO: 586979 - DNA, 164 bp, Homo sapiens
aaggtctggcccactagttctccagtggatcacatagagcctcacagctgctagctgttcccgggcccggaacgtctgggtcagtccccctgtgctgtccacctcctctgtacagcacagaggagcggagcatgaggacaggagaaggggctacttcttgctgt

SEQ ID NO: 586980 - DNA, 583 bp, Homo sapiens
acttacgcaagcagagaacctaccccagaacaacttaaaatacttctttaacactcccacatttgagtcatattacttgggaagacccattaaaagaaacataacttaaggaatgtgatatagttaatttagtgactggctgtccctctccgtacctcccctattcaggtacaagcattggctatcagaaatagaagagaaagcatacgtaacagagcacatcctcaaataaccaggctctgtgacaaaataagtcctgagaaggaaaactggagagccacagatgttagtgatcagaacagtgtgtctaacatacctgaacatattacctcaagtggctctccaatccttcctcatggcactgggcaaccacttgaattatgacccttcacaccacaggagtgaatcacagcaagagatatgtaataatggaaacctttcattattatcacagcagtagtagaacaatgatgatgctatcagcacttaggagcacaggagaccaggaattagatggggtccttacacgtgggatccaagacctttcttacatgttatgttcagcacacagtatcatcccgca

SEQ ID NO: 586981 - DNA, 266 bp, Homo sapiens
ggctccaccagtgtaaaagctggcctccagtctttggaggcctctggtcgactggaaaataagtttgacatgtttgcgctgacacggggcagctccctggctgaccaacggaaaaaggtaaaatacaaagcccctccggtgccttgccctccatccttcctttgttccttttggccgggcaccacagcactggggctcccctcttggttgatcctcttgtactggaaaaggtgccttttgtatccccaattaaaggtagaaaccca

SEQ ID NO: 586982 - DNA, 510 bp, Homo sapiens
  misc_feature (308)..(308): n is a, c, g, or t
cgaaatattggtggcagttgggtcctgaactctggtgtgtcagcggctggaaggggtctgggagacacatctttcggaagctggctcctagggcttccagtcagaatactcatgatggagtccacagccacggagagtgaggcctgtagtttctgctgagcctgggcagccgggtgatgtggctccaagacctggtccacagtgaatgggatggaacctggcactacacggtggctctccacagggatggcatggagatgagtggtgagcaaagtatagactccccagatttccattggcgggacggnaaaggcactgggggaaatccacaaagagaaaaagcagcagagttggtccttgaggatccatagtcggagacggatcctcctcattgggattccacctgataactcacatcgggaagcaccaaatctagaggacaagatattacgggaatttctaagataagtaaagctcttgaaatacaatgggactacagaacctgtattc

SEQ ID NO: 586983 - DNA, 1439 bp, Homo sapiens
  misc_feature (108)..(109): n is a, c, g, or t
  misc_feature (133)..(133): n is a, c, g, or t
  misc_feature (213)..(213): n is a, c, g, or t
  misc_feature (223)..(223): n is a, c, g, or t
  misc_feature (256)..(256): n is a, c, g, or t
  misc_feature (260)..(260): n is a, c, g, or t
  misc_feature (279)..(279): n is a, c, g, or t
  misc_feature (308)..(308): n is a, c, g, or t
  misc_feature (330)..(331): n is a, c, g, or t
  misc_feature (333)..(333): n is a, c, g, or t
  misc_feature (359)..(359): n is a, c, g, or t
  misc_feature (363)..(363): n is a, c, g, or t
  misc_feature (368)..(368): n is a, c, g, or t
  misc_feature (373)..(373): n is a, c, g, or t
  misc_feature (386)..(386): n is a, c, g, or t
  misc_feature (393)..(393): n is a, c, g, or t
  misc_feature (471)..(471): n is a, c, g, or t
  misc_feature (1221)..(1221): n is a, c, g, or t
  misc_feature (1311)..(1311): n is a, c, g, or t
agtgaatgaggacaggatgcgcatgtggagcgttccagttggtgaggagctgtgggtcgtgtaggggatgccctgggtagagtgcggtagtgatggaaagggtccaannggttccaagacgcgtaggcgagtnggtctgaaagcccccggtatcattcctcgaatttcagtgcgggaaccaatgcagactggcattaaggctgtggatagctnggtgccaatnggtcgtggtcagcgtgaactgattattggtgancganagactgggaaaactcaatngctattgacacaatcattaaccagaaacntttcaatgatggatctgatgannanagaagaagctgtactgtatttatgtngctnttggncaaangagatccactgtngcccagntggtgaagagacttacagatgcagatgccatgaagtacaccattgtggtgtcggctacggcctcggatgctgccccanttcagtacctggctccttactctggctgttccatgggagagtattttagagacaatggcaaacatgctttgatcatctatgacgacttatccaaacaggctgttgcttaccgtcagatgtctctgttgctccgccgaccccctggtcgtgaggcctatcctggtgatgtgttctacctacactcccggttgctggagagagcagccaaaatgaacgatgcttttggtggtggctccttgactgctttgccagtcatagaaacacaggctggtgatgtgtctgcttacattccaacaaatgtcatttccatcactgacggacagatcttcttggaaacagaattgttctacaaaggtatccgccctgcaattaacgttggtctgtctgtatctcgtgtcggatccgctgccccaaccagggctatgaagcaggtagcaggtaccatgaagctggaattggctcagtatcgtgaggttgctgcttttgcccagttcggttctgacctcgatgctgccactcaacaacttttgagtcgtggcgtgcgtctaactgagttgctgaagcaaggacagtattctcccctggctattgaagaaccagtggctgttatctatgcgggtgtaaggggatatcttgataaactggagccccgccagattaccaagtttgagaatgctttcttgtctcatgtcgtcagcccagcacccagccttgttgggcactatcagggctgatggaaagatctccagnaccatccagatgccaagctgaaagagattgtaaccaaatttcttggctggatttgaagcttaaactcctgtggattcacatccaataccngttcagttttgtcattgttttagtaaattagttccctttgtaaaagggttactctcatactccttatgtaccagaaatcacctgaaaaataaaggttccctaatgcgtaaaaaaaagaaaaaaataaa

SEQ ID NO: 586984 - DNA, 1191 bp, Homo sapiens
gggctggagaggcctggcgggccgctgctgcgggccagtggacggggtgcggagccggagccggagccgactgggctggtgtgcctgcactgtggaccccggcaatccctgcgcgctgcccacgattctgcttctgaggaacctagaaagattgtacaatgaatgtgtgattctcgtgctgctggtggtgacctcaccaacccccgaccacagcccctcacacggcgaggtcacttcgaccgagtagcatgagaacaacccagagtacttgaggcgagcaggaacatggcaccagaccttcgccaggaccttcaacactgactggacgcaaaacgacacgacgggtgtccactgacttctgcaacagcccttgctttctgtgaagaactcggacctcacatgactacacggacgcacatttacaacgaacggggcagacacccacaggccctatccggcattacacgccagattgcacgacttcctactgacccacagaaatgtacccaaactggtcttaccccaagacagactccgcaaggcagggcatggcctgccttacaaacattgagatctctggtatggtgacctcctgtgaaccgactctcacacggaatctgacttctactatgcgctactgaccaccggaccaccaccctactaccgcccgtaaccacagggcacaaccaatcaccataacacacttaaaaaacaatactacaaacaccacatcaacccacacacaattatacataccaacacacatactcacccacacaccaacattccacaatcccccaccaaacacacccatcccatcacatcgtcacccatcaagacacccactcacaccaccacaccaactcacctaccatccacgacaggcaccccagcacaccaccacccagccagcaacaatcacagcagcaaccggagaccaccaccccacacgggaaggcacaaacccagcgcacgccctacacaatacccaaccctgaaaacaaaccgcacgccgcatccaggtaacccacaagaacgaccacgacacaacaaccaccccgtacggagaatcgccgaccagagtacagctgccacgcgcaccaacgccaccacacccctcacacgcaaccagatatcaagcccactcacaaaccgagaccccacacaccaacaacaaaacagacaaccgca

SEQ ID NO: 586985 - DNA, 111 bp, Homo sapiens
ccttgtgatagctctctggagactgctgaagagtgtcaccatcagagacaaggtagagccaactttacaatgtagagcctgagagacaattgtagatgccgagagacaagg

SEQ ID NO: 586986 - DNA, 162 bp, Homo sapiens
ctagtgtgtacttatccaagtaaagtatcccctaaaggcacttcctatctgatttttcccagcaaataggcaggcattctagatcttccacaaaacatcttgcctctaaatggagagatgaatcattctacctgtacaaactagctagctattagagggttt

SEQ ID NO: 586987 - DNA, 182 bp, Homo sapiens
ccctttttttggggggggccccggggggtttggccccctcctggggttggcccccgccttgggggttgttttaaggggcccttttcccttttcccaaggggtcccttttagggggggggggggggttttttggaaaaaaatggaccccctgccccttaattttgccccggcccctgttttta

SEQ ID NO: 586988 - DNA, 647 bp, Homo sapiens
tatggaatacccagggtctgactagtttctggcatacagcaggggctgaataaatttgctgaacatgaatgggggcggcagattgaaaattcaaggacccccaaatgtctggtttgaataccattaactgagagagagaactctacaaaaggaacaggtttggagggatataagatatgctcagttttggacatgttgattttgaggtgctgtgagatttcatagcagaaatgtctatcaggaaactgaaaacagatctggggtttaggaaggagatctaaactggagatacatcgccagaaatagctatatttcagagctttgctcaatatttatatgttttttgcagtagagaatcatacataacttgatttttccaacttaaatgtatatcttgaagctttccatgttctttaatattcttttacattattttcatgattgaataatgttccattgggcaattgtctcatagttatttaactaattgtctttcattggatatttagattgctaacagcttttgtcattgagtgtaatctgtaatggacagtcttcagctaagacatggttctcactagtgagtaattcttgaaaagtgttttctagaagtggaatggctaaataaatgaacatacaaaaaaaaa

SEQ ID NO: 586989 - DNA, 685 bp, Homo sapiens
  misc_feature (491)..(491): n is a, c, g, or t
  misc_feature (612)..(612): n is a, c, g, or t
ggcggaaggcgggctgctcctcggggtgggggagggtatccggcttaagggggctgtggtggacaccgacttcttaatgtcgggggtcttcgcggcgctcacctcggctgcgtagggttcgggacggtacgcaccaggcacagcttcgcgccagaatggcggtacgggcgctcacggaggagtgaatccgcttctagtgctagcgtaaaggcactcgctgagggttgctgtgcgcgcgcgagagcaccgtctggtgactatgtagtgacttggtaggactggatgcttaggctgtggctccgctcgtcggttgacctcatggcgttcagaagcgagacggctgtgtcctatggcctttgtcacgtgcgcggcgtaccataatgagccatgtcttcctcgcgcaggaggcgagtctcagcctaatggtgaggaaccggtttcctgggcaggacgtggacgaagcatagctagcgtgtgcagactgagcacantacttccagtgctgtgctgccatcgtgtcgtatgtgcacggcatctacgcaaggctcacagagagggagagagtaagacgagaggaccgcgtggatgaactttgtcacaaggctcctatgnaatggggccccgtccgtatagcactgggttgtcctagcgcgaatcgacgatcctgctttacgtgctcggggac

SEQ ID NO: 586990 - DNA, 145 bp, Homo sapiens
aggcatccccacccggtgctccaccactgccgcacaactcttgtggacatcaaacgataaccactctggcgagtcgccgggtgccagcaagccggttgctgaggtatcgccaggaattagtatgctgtatttctaggtacacgct

SEQ ID NO: 586991 - DNA, 137 bp, Homo sapiens
atccattgccaaggttttgacgaactccttgaagtctggggcctcggccgtcttctgctggatcagggcagccccgttgagctgcggctgcagaagcggatgtagggctgcatgtgcggcactgtgcgctcaggctt

SEQ ID NO: 586992 - DNA, 577 bp, Homo sapiens
aagctaagcgcgtttgcagccgtctccttggtcctgtcaggacttctggggatggtggctcatatgctatattcacaagtcttccaggcaactgccaacttaggtccggaggactggagaccacactcttggaattacggctgggccttctacacagcgtgggtttccttcacctgctgcatggcgtcagcggtcaccaccttcaacatgtacacgaggatggtgctggagttcaagtgcaggcacagcaagagctttaacaccaaccccagctgcctggcgcagcaccaccgctgtttccttcctcctccgctgacgtgcgcaacccacgcaggggaacctttgtccagctgccatcagtaccccagccatcccatccgctctgtctctgaagctattgacctctactcggcgctacaggacaaagaatttcaacaagggatcagccaggagctaaaggaagtggtcgagccatctgtagaagagcagcgttaggagttaagtgggtttgggaagcaggctaagtcctaccataggtgtcgctcactatcaacatctgcttgagcaaaaaaaaaaa

SEQ ID NO: 586993 - DNA, 264 bp, Homo sapiens
ttcgtatggtgagtggatcccggtcgggcttgcagatgaatatacagtcgagcctcatattttctcatcagttctgcggtctcctccctatcgtcatcccacttaagactgtcactgatcatgtcctcgagctgctgctgtcttagctcaacgccatgctggatgccatcccacaggtactagaccccttaccaatttttctgctattgctgttctcatatctgaaccggaagctttatttttcaatttctgtgcccattgcaa

SEQ ID NO: 586994 - DNA, 163 bp, Homo sapiens
acaggagcgcgttcttaatctggattcgagctacacttgtgaaactgtcttcatgagactggctcatttattgtcctatagttctcctgcttgtacattccaaatgccgggagctcagagcatgtcatctgggccacacgcaacaagatagttgtaaatggcg

SEQ ID NO: 586995 - DNA, 397 bp, Homo sapiens
  misc_feature (174)..(174): n is a, c, g, or t
ggtacttaatagagcagaagaaaataaaaatgtaagaccttgtttagctgaaagacagtgttagatgatattttaagttataaatagctttaatccttgctttttcctttatcttgatttttgtgtggttttttttaggtgtgatataaaaatccttattagtaagtgtctggnagacaattttttgaagtttcaagctttgtttttacagggacctcttctgtgatcacttaggctttttttcaagtatacattttgatttatctgtttttcactagaaatgactaccctgactgccctggtaactttaaaggaggatttctaaaaatgtgatgaagaagataaagattatgtctggatacctaggtttgaatcatagtaaaggtttactaaaaat

SEQ ID NO: 586996 - DNA, 108 bp, Homo sapiens
  misc_feature (22)..(22): n is a, c, g, or t
  misc_feature (51)..(51): n is a, c, g, or t
  misc_feature (72)..(72): n is a, c, g, or t
atgacttgccccacagccatcntgggatgagccccttttcagccaccatgngttcaaattcatcagcattgnaccttggtgaagtcccacttctttgagatgtggatc

SEQ ID NO: 586997 - DNA, 318 bp, Homo sapiens
gcaagaatgaaaaagggctgaagcagtgcctactcgacagaaccggtcatcgtacaagaaatgccacgtgactcaagggcaagcagagtgcagcttggagcaagaagatgatgtctcactctgtcacccaggatggagtgcaatggcagatctcagctcactgcaacctctgcctcccaggttcaagcaattatcctgcctcagccacccgagtagctgagattacaggcctctgccaccatgctcagctattttttgtatttttagtagagcggggttcaccatgtaggcaggctagtcttggactactgacctcag

SEQ ID NO: 586998 - DNA, 389 bp, Homo sapiens
aaccaaatatcaacactgtgaagttgacactgaaatagacagagatcagaaacagaaaatctctctctccctctctccctgtctctctctctctctctctctctctctctctctctctctctcacacacacacacacacacacacacacacagagagagagagagagagagagggagagagagaggaagtggtatgtggtgaggcttatagaagggaacactcgatgtggggaacaggaagagagagaggggaagagaaaagaaaagatgtgctcccgggcccctatgttctccgtgttccattttctatagatctcttttttagatatttgtatatctatatgtgtgtgtgtgtcttcagagtatattttctgtgtgtggggctcctc

SEQ ID NO: 586999 - DNA, 80 bp, Homo sapiens
  misc_feature (2)..(2): n is a, c, g, or t
cntttctaacactgaaaaaaaggtcatttttgctggtataaacattaaggagcaacttttacattaggtcaaagattgtt

SEQ ID NO: 587000 - DNA, 698 bp, Homo sapiens
gacagatggaactagaagctagtctttttacccgatcagtttacactgcttagagccacgacatctgacacaagccgtcaatggtggcaagacagctttgaagctcaccgaccattctcaagacacatgattattcttcccatcactgtttagctccagctgcttgagtacagaaaccctacatttagaccctgtccgattagctgttgagaagttgaactgtggcccaagctcatgtttcttagtccgtgttcactgaataaagtccgattccggtttatgtatctgcttagtgacatcaaatagggtacgagcccatctttagagcaaccgtctttctcacgagcatgagctcaagtcttcgagctatcgactatctggcagaccccctcacaggacgtatccatgctcttgataattatacttgctggaatgctgctaggttctcacagtctgaatcagtgtaaactttctcagggttatagcagtaaccttatataaggtaccaatcttcaagacgtcctagtgcagcgccctctttaggtaacgtatgtgttcatgtacttagtaggcacagggatgatagctgcaactgtcattctcagtataccgacacatggactcgataccatgcactccatggactactcataagtgggaggtcgactatggtacatggacacagctagtttctatac

SEQ ID NO: 587001 - DNA, 1562 bp, Homo sapiens
  misc_feature (462)..(462): n is a, c, g, or t
  misc_feature (753)..(753): n is a, c, g, or t
  misc_feature (1021)..(1021): n is a, c, g, or t
tccaggcggccgggaaaatgggggactttcagaacgtgagcggtgccttaccaaaagcagccgaccatctttcaaaacaagaagagggctccgtgcgtgggagaaaacgtggcaaggagaaagcctcccggcggttactacaagaaactctcggctcgtgggcttcaagaacacccagagggaggctattgtggagggccaccttacttgtgacagagaaaatgtgcccctttcagcgtggtctaagtggtgctccattctcgaaggggcggaatccctcttcgtggccggtggtgtgcaccaagaattgaaagtagtgcagaagcgcacccagtgtggtcactccgcccgagagaacttattcgtgcgacttacattcgcgcagagttcacacacgcggttctcgagagaagaggcgcccaaagagacaacctgtgttctgtggtaccacctgtgtttccnccgtgtggcttctcgaggggaagcgtctcccaagaaactgcgggtgtgacacctatgcgtttccacgagtgtgggcgcccgaagtgtggccgcgaggccctcgtgagaaggccaagacacgaggtgggcgacatctacaagcgggtgcccctcaagagcgggtcccacccaagaggggctgtgtcgcgggaccaccctaagaaaaagacgagttctcccgacagaaaaggtttctccgtgagagggggcgttgggccagcaatcttctgcggcccgcccggctttcccccnccaaaaaaaatgttgggacaacatacttaaccgccgctttaacttatttccttcacaattttcccccaaagaaaaacaacactacacataaactacacaccagcaccactcacaaacagacaaacaaacacacctcgcgggacggggcaccatcatatattacaggcggagcggggcgggggcaacaaaccacaagggggttttaacaaaaacatggcggacccaatgtgtgctaacaacatagtgttgttttcctctgagcaccccncagtctgttttttgttgaacccaacaagtcgggtagaaaactatgcgcgggaggggacccccccaataagaagagagacgccaggtcataacaatttggtaacaaaacgcacgggtaacccttttattactatctattcacgttctaacaagaacaggcagactagctgagcaccagatacgagatacgacgcagctcatagcactacaagagtagttacatcaccaactatgtatgtacataaacaaaaactcatgcggtcggcagacacaacatatcaccaaaactctaatacatctatcataataatatatataataaacaaaaaaataaacactaacacacaacagatacatcacatctatgacattacaatcatcagcacataccaaaaatcaggaaaacgaacacaaaacaaatacaaactcaacatactacataaatgcattacaacctaaattaataaaagttgaatacaataacactcatcaataagcaatgaacgatatcattccattatcgtatctccttcatctcaata

SEQ ID NO: 587002 - DNA, 6968 bp, Homo sapiens
  misc_feature (5108)..(5108): n is a, c, g, or t
  misc_feature (5114)..(5114): n is a, c, g, or t
  misc_feature (5186)..(5186): n is a, c, g, or t
gaattccgtctgagtggcgctcgcggcggccgcgccagtcgcgtcccccaccccaacccccaccccaacggccgcacgcgcgcggcggacggacgggcgcggcgcgtcctcgctcccgctcccgtcccggctggggcgcgtggccgtgtccgccgcgtgcgcgtgctgcgtccaacggcctcgcggggcaggagtaagccgcggccgccgcctgggccccagggcggtctctggggccaggggtcccgcgcccagcgtttcccgcccgccaccctctccgccacgcgcccgcggcaccttttcctcccctggccaagggatccagtcggttcggaccagaaggaggctttcgtttagggtgggggcagcactaaagtctgattggagtcttgcggtccgcgcgtcgcagaagcgccttcggttttgcagagagcaaagagggagcagcgagtgcacggagtggtagtaacaaccaatgttctttccacgccctcactgtgtgtccggcactgtgcggagccacttttctgcctttcatttgattcttgcagtgagctggcgaggtgggtacggctatcctccttccttagcggcccaaggcacgggtttggagagcggggtcacaggcacgcacgggaagggcggggatttgttgacgccgggccctctgactccgagctccccgcttcccaagcctgtttttagtctttgcccccagagcacttgtccctcggggcagtatcagcctcaaaaggccacctgccgagaaggctgcagcggcatttgtacttgggctagttctgggcttccagggagacaagggttggaagtgggaatgtgacaaaggaaaagggtttgggcttcctttctacgtgtacttgtacaggccctgggtagatgtgccgccaccgtagcttctggaaaaaagtagggaaaacgatgagtaagtgcaaatgaacatggactgtgttcctcatcgggtttgaatctcagattgctgatgggaaattcccgccagcgggaagttaggctccggttttagacgttgaatttttttttctctactttttttttaattggaggagacttttgcagaaagaccttgagaagattcactttatagttgaagggaatgaggtgcaaagcgacgaatttaagatctcactagcatctgtgggttaaaatacggaattggaatagaaaggttggcgcccagttacagtatacatttggacctctgtggagcgtgtcatgctggatgaattactggtgttggagatgtgttggaaaaaacaactgtgacagtcgagatctgtggatgaaagtttgtgtacactccgtttatttagcatttactctgctgggttcttgtgtatatgcagaaacaagatgcttttcttcagggactggagcttatatttttctagtagttaccatcttttagattatttaaaagccaacatactccttggcttagtgaaataaatcttctatgttatagaaacacttctataaacataaagatttctataatcgtgttctggaaaccctttctataaacatgtttctataacagtattataataatctataacagtattataataatgttccaagtaacatttacttggaactttgctggtgtggcgattccggttacttgcccttacagactggttactatgaatagcatttaactagactaaagttgagcaatttaagttgtcaaatgaaaacactagaatgacctacatttaaactgtttaagcttgagtccagctaattttattactgcttgaggcaaaatagaatgaaattaccttacacattattgagggaaaatttcgttagtttctacttaaaatattaaaaaaatacagttcttggcctcaggcaaatggttatcacttgggcaggaacatgaaaattacgtgattatttcacaaactggtgctctaactgattacttgtgcatttatcaggaacaagtgaattgaagcaaattgtggtaatgtaaggcttggcaaggctgccctacatccctaccaagtcatacgtcagttttgttggagctgcttaccggtacaaaagtctaagcttttgtacctcttacaggtagaaaagtagagagttctttgtttaactcagtttgctgttcctgagctgacactgcaccaggggaacattaggagattttggtaatgtttgtttgtgacctacttagagcagtttttgttttgtaacttatggtttttttttttcccactcgttctagtattttgcatagaaagtgaacggcagaaggcagttttaagtttttgtaaaagtttgtgaattttatatcgtccttaggactgatggggctagtgttaaaagataaaatttaacataaagcttacatttgtgactaaagccaattttatattttttttctttatttttgtcagtctgataaaactgcccacttggtcttttaacattttgcaaattgattttttttttaactttcagaatttaaataggcattgtatgtttgtttaattatattgtgctttggcttccttggacgaaactattactgactttacaaagaagaatggataattgtggaagtaggtaggtcaaaaaaaaaaaaggaaagcctcgcccgccccccagtaatttgtcaaaagcaagtgggaaaaatctctggtagtgcagtactgcccttccagtactccagtacaagccctggagttgaatttagattcagcaactattatcttacatgtagttggtgatcacaatgtggtggcacactaggtttataattttatatctcagaaatcagctatttacttttttttaaaaaagtattcttggacatcctgtctgtctttagttgggaaggtcaagttgcaagccaggtgatagggttaagagtaggaataattcacacacacgaatagtgtcttaatattctgtcttacaaggtggaaagcaatttcaaaaaaattgcccttacagcctgtagcttagtaaataaggtctttaggcgactttgtgatagagtccctcttctgtcaggtggccagtctgtcatgtaataagctcttggtatgtgtgttgtatcttaggtacttaatcaaaagtaaagattaaagatgattgacagaaatttggcttcctggatggtatacacatctacttagtagggatgtaatctttggtggctattaacttcactggctgtataaagcatcattatgtatttgtgtaaccttttgcatatttagagagtgctttcacacatctttggtattaccatacttttactaaaaagtgaattggagctctgaaaccgaattgtcaaaactattttgaaaagcatgtggtacctaatagggtactatagccagcttatttccttaattgaaaaatcttagagggattttgaatctggaatgtatgaatgtgacacctgcctgcccttgccagttctcccatatgctgtttatgcaaagccatagcgtgtgcttaagtacacccttgtttctgcactgaggttgcctagatttccctggagtgtatccacctgtcttgatctgtttaagaattttgcggatgagcattagtattaactgtaacatatcttttcacgtgatgagaaagaacaaagatttttttaaattgtgaacctgagtaggttttaactttggagtggggaagggatacactaagataaaagatagttgttaagtattctgattcctgaagttttttttctttcaggaaaacggtatttttgagataaagtaagatttgtggaagagttgcaatagagaggtcttgaatacccattatccactgttaacatcttatgtaatccaagtacatttaacagaactgagaaattaacatcgataaaatactgttaatgaaagactttatttggatttccttagtttttctactaatgtcctttttctgttctaggatccagtccaagatgccacattgtatgtagtctcctgatctgtgtcagtttctgtctttccttttgtctttcgtgaccatgacacttgatctcatttggatttgatgttaaggattagactgaagttacagatttttgggggaagaataccacagaaattacccttatcacatcagattgggggtccataatatataactggttgaatttaacctgatgatttggttcaggtggtatctgtcaggttagtgtttttttcccctttagatactattccttagatgctagtcaccaagtccagctcacactcaaggagagaggggaattaggctctactttctagagggaggagaatgtgaatttgtggaagtatattaaagctactgttattattttgggggagatgcttcgaagccatggaaataaagttcccctccttaattttagcattttaatggatctcgtctgcagctattattacttcggggttctaatggtgattttttttattttcctcattccttctacagtataaattttctgtgaggaagatttgtgtattcttcatgttttttctttttttcatttatatcactatagaccacggatattaattttattctttgggttgtaatccacaattatccttgctgatgtttacttatttttgattattatttattttatatttttataaaatatcgtccaggctgtctcacactcctgggctcaagcaatcctcttgtcttggcctctcaaagtgctgggattacaggtgtgagccactgtgctggccacagtttattttgttgttcatgttgttccagcttttttttttttttttggctcctttctccttttgacacttccctatcttatctgttttttaaaagcatgttttttctttcattaattaccaggtatttcaggctcatcttgcattttgcctgtctcaggtccagaatcaaccatttctccaaggaggcgtcaggaagaattgtgaagggaggtgacaggtggtaaatgcgaagagtttggaaaaatagattgacagtaggcccagtgatgttgatacttttcttgctctgagcacagatgttggcttctgtattcatgttactccagttctggnaaaagnttttgtttctaaattcccacgatttagagaaccagatatcaaatgtttgaatacatgacataatcctgaaanaaaatttacaaaaatttaatatattctcaagttagtacacacaaacacttgctgtttttccttggtgtttttgacaacttttttaaagtaaaaagaccacttaaatactatcgtactcagaattaacatttgacattttgcattgccctctaagactcctttttttctatacgggcttccattcccttccttccagggatctttttcacatctttccaggctgttttattgatggggaatttttaaaaatagctttattgaggtataattgacaataaactgcatgtttttaaaatgtactgcctgataatttcagacaccttttgtaatcccagcttctcaaaagactgaggcagcagagaggattacttgagcccagatgtttgagctgcagctgcagtgacctatggtcatgctacgcactccagcctgggcgacacaggagactcttaaaagaaggtatacccatgaaaaccatcaccacaatcaagattgtgaacctatccattacccccaaaagttttctcatgtcccttttccctctttcttgcttgttccttctacccttctccctgcaggaaatccttgatctttttatcactgtagattactttgcgttttttagaatttttttgtaaatacattatgttctttttttaattgctcagtgctagtctgttgtgtaggcatatcacaattttttggtttacctgttggtgggcattgaaaaacggcaaaagctgtgtgtttccagctttttgactgttacaaaataaagcttctgaactttgtgtacaagtctttgtatgggtatacgcctttatttctcttgggtaaatgcttaataggggaatgtttagatcatgtagtagatgtatgcctaacttttaaagaaactccctgttttccacagtggttgtaccattttacattgccaccagcgatgtttggggggttccagttctgccagtatgttggctaacagtgtgtatggtcagtctttttaattttagtcattgtgacaggtgtttagtggtacctcacaggttttaatttgcatttctgtaattgctagtgatcagcatttttcatttggcattcatataatttctttggcgaaatatctttaagtcttttgctcatattttatgggattggttacttaattattaatttttttgttttgagacagtgtttcgctcttgttgcccgggctggagtgcagtggcgccatctctgctcactacaacctctgcctcctgggtttaggtgattctcctgtctcagcctcctgagtagctgggattacaggtatccaccaccacacccggctaatttttgtatttttagtagagatggggtttcaccatgttggccaagctagtctcgaactactgacttcgggtgatctgccctcctcggcctcccaaagtgctgggattacaggcatgagagtactttatatattctggatagaggtattttaaaaattagagatatgggtcaggcgcagtggctcacacctgtaatcccagcactttgggaggccgaggcaggtggatcacttgaggccaggggttcgagaccagcctgggcaacatagtgagaccttgttgctactaaaaatttaaaaaattagccaggcatggtagtgtgcgcctgtagccccagctactcgggagggtgaggtgggaagatcacttgagcccaggagttagaggctgcagtgagccatgatcacaccactgcactccagcctgggtgacagagtgaaaccctatc

SEQ ID NO: 587003 - DNA, 713 bp, Homo sapiens
gcggcgcccgggatcctgtgtagcggctgcagagggtgccgccgccctaggcgaagtagggccgtcctgagcgaaagaaccgcccccagcaggagcaccaccacggtttagcaaagaatcccagaccccgcccgggaaggcagccgcaccatggagtcttccagttcatctaactcttatttctccgcttggcccaaccagtcccagcgctgtcgtgctcctctactcgaaggagctcaaaaagtgggatgagctttgaacgatattttagaagagagcgaggcatgtcacgtgacttgaacatttgcacactgaacatgctacacacctccttgtctactaacgggaattacctccatgtacaaccacattgactacttaaactgtacgctgtctctcaactatctgacggagactctcacttactgctcacttacaacaggctttccaaggaactccccttcaactctgctgggactgctccctccgcacgaggacagttgacgtgagaatcttacactgcacactgagtccaccacactggcgctcttggagccacttcgcgcctctcgtgcccttcacccttgagcacaagtattcacaacaaacttatatctcgaagcgctgtgctgtacactgaccgcacggtacttcagaacacctaccaaagcagccactccaggaggcatcctggtcgttctgctggcctatca

SEQ ID NO: 587004 - DNA, 196 bp, Homo sapiens
gcttaatgctgtacctaatggcgttacctatatgctgttacctaaatggctgttacctaaatggctgttacctaaatggctgttacctaaatggctgtacctaaatggctgtacctaaatggctgtacctaaatggctgatatggctgtgacctaaactggctgtacctaacatggctgttacctaacatggctgt

SEQ ID NO: 587005 - DNA, 186 bp, Homo sapiens
  misc_feature (31)..(31): n is a, c, g, or t
  misc_feature (98)..(98): n is a, c, g, or t
  misc_feature (125)..(125): n is a, c, g, or t
  misc_feature (152)..(152): n is a, c, g, or t
  misc_feature (159)..(159): n is a, c, g, or t
  misc_feature (161)..(161): n is a, c, g, or t
gcgctcccctccacagccttctactcctcanttgacctagggtccccaagccttgccatcaccccggggcctgctgcagaaccgtggcctcaacaatnacagcctgagcggaggcgcaggctggncatggcagctgaccaacatcagccggnacgactncntcaagaagatcgacagccctacctt

SEQ ID NO: 587006 - DNA, 656 bp, Homo sapiens
gcggtctgccgggagtgctggcgtgcggccccggtgagctgccgatcggtgccgggacaaaggcgcggccgcccggtgcctcttcagcagccctgagcctggggcgcacagccggggcgcagcaccgagccacaccgaccgcgattgacatgatgtttccacaaagcaggcattcgggactcctcgacacctaccccagcaactcaaattcaccacctcggactcctgcgatcgcattaaaagacgaatttccagctactgcaatgctcagtaccacagcctcaagctcgaatgtgacaagttggccagtgcagcacagtcagagattgcagcgtcacctatgttcgacattgtacctacgagcatgtcctacgggctttgaacatcggagatgcacaaacaggctgaagatacgtcaaaacggcctgaacaggggaatttggatgcccaagggtccttgcccttaaccttctcccaagaagacaccagcagcagagtcttgaggagacccatggaagagggcccaagtacaagggtaacacgattccaccgaagctttgaagatctaatcaatccctgaacaggcagactcccaaggcccaaacaagactgtacccaacttgtaagggcccttggccccttgccctttgaccgag

SEQ ID NO: 587007 - DNA, 427 bp, Homo sapiens
atcatgtagcgcgtcccttcagtcaacatgttgccctgtctgacagctcatgatgtagccctccctccagacaagcatgtagccctcgctgcagagcaacatgtagcgctcgcttcaggcaagcatgtagccctcgctccagtcaggatgaagcgctcgctccagccaagcatgtaacccaccctccagtcaacatttaagccctcccttcagtcaacatgtagctcatcgcttcagtcaacatgtagcccacgctacagacaacatgtacccctctctacagtcaacatatagcccctccctccagtcaacatgtagctctcccttcagtcaacatgtaacccacccttcagtcaacatgtaacccactcttcagtcaacatatatcgctacgtacagaaaagatatactagactcgacatgcatg

SEQ ID NO: 587008 - DNA, 443 bp, Homo sapiens
agatgagcaaatcatgaaccatccttactcatacctagtatgaaacaacattgcgcagaaacgctagtcctccccagtaaccccttatcatcatattccaatacatgaaaggcatcaagtcagctttcatgagatacatggacaggcgctctttgctttgatcaaaggggaaggtttctatcggctctgctttgtagtcaaactcagcaagaatcacacggttgtagccggtcaccagtggacatgatgtgtagccatcatacttctttgttggtgtttgattcttcataattacagaatttgtcctatcaagtattcctgactgggcagttactgcagcagcggtctttgacgtaggaaggttggtgcagtccccaatcccaaacgcatttgggtacctcctgtgttgcagagtttctttatccacatccacccaaccagca

SEQ ID NO: 587009 - DNA, 156 bp, Homo sapiens
  misc_feature (18)..(18): n is a, c, g, or t
tctagcgctacagggatngcctttgataggggtcggtcccagaccacgcccaagggggtgagagcgcctcacagcatctgagtgcagatcatgggggtatcgcgcttgaatagctatataaagggcgcgggcgggattgagagagaaggggttttt

SEQ ID NO: 587010 - DNA, 1060 bp, Homo sapiens
  misc_feature (102)..(102): n is a, c, g, or t
  misc_feature (104)..(106): n is a, c, g, or t
  misc_feature (118)..(118): n is a, c, g, or t
  misc_feature (194)..(194): n is a, c, g, or t
  misc_feature (211)..(211): n is a, c, g, or t
  misc_feature (213)..(213): n is a, c, g, or t
  misc_feature (218)..(218): n is a, c, g, or t
  misc_feature (256)..(256): n is a, c, g, or t
  misc_feature (270)..(271): n is a, c, g, or t
  misc_feature (298)..(298): n is a, c, g, or t
  misc_feature (573)..(573): n is a, c, g, or t
gcgtggtgctgcatttccggtagcggcggcgggaaatcggctgtgggagagaggctaggcctctgaggaggcgaatccggcgggtatcagagccatcagaancnnncaccatgacggngggcaagagcagcaagatgctgcagcatattgattacaggatgaggtgcatcctgcaggacggccggatcttcatnggcaccttcaaggcttntngacangcacatgaatttgatcctctgtgactgtgatgagttcngaaagatcaagccnnaagaactccaaacaagcagaaaggganagagaagcgagtcctcggtctggtgctgctgcgaggggagaatctggtctcaatgacagtagagggacctcctcccaaagatactggtattgctcgagttccacattgctggagctgccgggggcccagggatcggcagggctgctggcagaggaatcccagctggggttcccatgccccaggctcctgcaggacttgctgggccagtccagtggggttggcgggccatcccaacaggtgatgaccccacaaggaagaggtactgttgcagccgntgcagactgctgaccacagacagtatagccggggctccaatctcagtacccacctgcgccgtgggggtcttcccccgactatgggccgatggagcaccccctccaggcatgatggggccaacttcctggtatcgagagctcctatgggtaccccaatggggatccccccttggaagagggactccaatggcggcatgctaccctccgggaaacggcgggcaacctcccgcacagcatcgcgacgagaccccctccgcctgacaagatcccaccgcgccaacgggcccacaacaacgccctcactgagaccctacaccatgacgcaccccccgcccggagaacccgcaacacggccgccgcaaaacacaccaaccagagccgccacacagaagcggcgacaacacaaccaggcgaacacacacgaccaacccgaaggcgcacaccggatcgaacacaacacacacgacacgagccacagacacgcaga

SEQ ID NO: 587011 - DNA, 887 bp, Homo sapiens
gccccggcccggtggaggctgctccggaccgggacgcagagtctgcgtgacccggcgccgaggcggcaccgagacgcggcgcgcacgctccggctgcgcagcccggccggcatgggggccccgcccgttcccgcgatctccgttcggtctcggctccggctttttacgccccgagaaaagttccggccctgtggtggccccaaaagcccaaagtgaattccctaccggcccgaggaacagcgagcctcccccggcaacccgggggccccaaaaagcagcacagcatggggccgggtgaagccaagaatacaccacggacaaacacacgaaaagaaaataaaaaaaaaaataaaaaaaacacaaataaatagacaaataaaaaagaaatacaaaagaagagcacaagaagaaaaaaagacatataaaagagaaaaaacccaaacacgaaaaaaagacaggaaaaggaagacaaaagaagaggacgaagacacacaacgacaagcacaaaaggcaagccaaaaacaaacagcacaagcaaaacaacaaacgaaaaaaaagaaaaagaaaaaaaggaagaagccacaaaaaaagcaaaaagagaacagaacacacaaaagaagcgcagaagccgacacaaaaacaacaaaaaaaaaaaaaacaaaaaaacaaaggcacgaacaacaaacaatacagaaaaaaacacaccaacaagaagaaaaaaaataaaagcacaacacacaaaacgaaacaaaaaaaacagcaaagcaacaaagagaacagcaagaaaaaaaaagcagaaaaacaagaaacgacaaaagaagcagaccaggaacaaacaaaaggccgaacgacaaaaaagacagaagaagaaacaacagaacggacag

SEQ ID NO: 587012 - DNA, 237 bp, Homo sapiens
tttaatttcccctaaaagtaagtagttgctcagaaccatgggttggatgtatgggaaatcatattgcttctgtgaaaaaatgtttagccaggcattccactacaaacgccatgccatatctacctagatcttgatatctgggtacttagtattaccaagagaacttatcaaaagcaaatggttaagcaaacaaccaaataggagctcaggtcccttaatttggatagtcaactaagt

SEQ ID NO: 587013 - DNA, 379 bp, Homo sapiens
gactattccctatagcttctgcataatgaattcactagaaataactctgcaagtagcagcaaagttaatacccccgaaatccacgacgagctatctaagaacaggtaaaagagcagacccgtctatgttgcaccatagtgggaacggtttactcggtagaggcataaacctacctgagcctggtgatagctggttgtccccgatagactcttagttcaactttaaatttgcccacagaaccctctacatccccttgtaaaatataactgttagtccaaagaggaacagctctttggacactaggagaaaaccttgtagagagagtcccaaatttaacacccatagtatgccaagcagtcgtcggcaaccggaggggact

SEQ ID NO: 587014 - DNA, 144 bp, Homo sapiens
gccatctctcgcctctgcgaggacaagtacaaggacctaagaagatccgcgaggaagcgctcagccagtgtcaggacaacccttgacttttgccccggtgggtgccccagcccatcaatctttttgaagctaacgggagggccc

SEQ ID NO: 587015 - DNA, 339 bp, Homo sapiens
ggggggggggggggttttggggggggcccccccctttcccccccccttttccccccccccccccccccaagggggggggaaaaccccccgggggggggggggccccagggggggggggttgttttttttcccccaaaagggggtttcccccggggccccctaaaaaggggggaaacccacggggggttgttttggaaacccccttgggggggggttgggggataaaattttttttttttggggttgggggggggggggggggcccccttttcccccccccagggggtaagggggggggcccctttttttttttttttcccaaaaaaattttccccccca

SEQ ID NO: 587016 - DNA, 725 bp, Homo sapiens
ggtctgcaggcgcgcgctcccgaggtcccgcctcgcccgctgagccggcctgtaagcgctgcggagattgggctagaggcggaggcctgggccacggcggaggcgctgggtccttctggcactcctctggtggaccgcccccatcggccacacttgccctgctctccagtgattctgtagctcctggctccgtagtctcgcggacagctctctttcctggaagatgtttctggtgggcctgacagggggcattgcctcaggcaagagctcagtgatccaggtgttccagcagctgggctgtgcggtgattgacgtggacgtgatggcccggcacgtcgtgcagccaggataccctgcccaccggcgcatcgtagaggtcttcggcactgaggtcttgctggagaacggcgacataaatcgcaaggtcctgggggacctgatctttaaccagcctgaccggcggcagctgctcaacgccatcacccaccccgagattcgcaaggagatgatgaaggagacgttcaagtacttcctccgggagccccgtaccagccccagaggaaagaagcacgttccctcagctcttaaggaggctgacagtttaatgagaagagacacatgaggctttcgagccatgagcccaggaagtaagttggtttttctagtagggatgggagtaataagagctggtgaataatggagccatagatctgagttcaaatccc

SEQ ID NO: 587017 - DNA, 265 bp, Homo sapiens
ctgctccgcccctctctgccgagtctcaatatctgtcttcggtggactccttcgggagtacacccaccgtcgacgcctagcaggagtgcgccggactcggggaaatgcccggttccttcgtgcccacggacaccgcgatcacaaccagccaggacctgcagtggcttgtgcaacccaccctcatctcttacatggcccaatcccaggggcagacactgacctgccagcccccggacgtagacccctacgacatgccggtaaccag

SEQ ID NO: 587018 - DNA, 1098 bp, Homo sapiens
ggtctgcaggcgcgcgctcccgaggtcccgcctcgcccgctgagccggcctgtaagcgctgcggagattgggctagaggcggaggcctgggccacggcggaggcgctgggtacgtagcgcgccacgcgggccggtgagagccagccgggcgccggggagggggcgggccctggccgcggctgctacgcggggctgccaccgccccgggcgacccaatttcgcggcctagtggggcgtacgggcctcttttgaaagcctgagttacgatgtattgagcgcgtcgtatgcggccagcactagggtccttctggcactcctctggtggaccgcccccatcggccacacttgccctgctctccagtgattctgtagctcctggctccgtagtctcgcggacagctctctttcctggaagatgtttctggtgggcctgacagggggcattgcctcaggcaagagctcagtgatccaggtgttccagcagctgggctgtgcggtgattgacgtggacgtgatggcccggcacgtcgtgcagccaggataccctgcccaccggcgcatcgtagaggtcttcggcactgaggtcttgctggagaacggcgacataaatcgcaaggtcctgggggacctgatctttaaccagcctgaccggcggcagctgctcaacgccatcacccaccccgagattcgcaaggagatgatgaaggagacgttcaagtacttcctccggggataccgctacgtgattctggatatccccctgctgtttgagaccaagaagttgctcaagtacatgaagcacaccgtggtagtatactgcgaccgggacacacagctggcaccgtgatgcggcggaacagcctgaaccgcaaggacgcagaggcccgcatcaatgcccaagctgccctgacagacaaggcccgcatggccgccatgtctaagacaactcgggcgaagtggagtgtcaccaaaccgccaggtcaatcctccttgcacactgagctggagcgcttcctggagtacctgcggctgaggttggggtcctcacagggctcgctggccttggcagcttctctacttgttccccattaactttgg

SEQ ID NO: 587019 - DNA, 1002 bp, Homo sapiens
  misc_feature (368)..(368): n is a, c, g, or t
gctgaaccgtgcggtcgaaccctccgtgtgtcccgacccaggctaagcgttgagcatggctgagcacgggtagcccacagcacgatgcagctggcccagattgcagcggcagaactgacggaggatgagcacctctggtcaactacagaggccccctggcccatgaatgagcatccagtgagatccaggcagctggacaaggacgacgatgagcctgcgaaggtacataggaggcccgtgtctgggcctgcgtggccgtttccagcatgacccctagacgtcccacaaccgtcgtgtgtgacgtgtgcctgaccgcttgtgtgttgcagcgtcggactcccgagtgcactcccctggtagtctggacnctgatcagtggacgaccttgggagcagtcttctagagagagcaagatcgattgtgtgctagagacgcgaaggggtgctcggaggttagccgtgacttaaggagaatcatcttctaccgggtggttacatcactgcacggaaagagtaagggtgttcccgtgtcattgtagaggttaccagtcccagcgaattagcagtagcaagggtatagaccgggcagtcacatgactttgagcgaaagaagcttgagctaacactaggttacgtgcagggcctattgagggcgcccaggggcccggatgggagtagcagaatgcttccttgatccccccgcgttgggcacggacgagtcgactcgcgaagggcgatattgcctggggtccccggagggccatagcttaacaagacattctaaggtccccggctttccacgggaagcggaacggaacataagaacccgcgagcgagtccttggtccctggggaagggtgggacattcctcgaacccgagtccaacggaaaagcgaccttggtaaagggaccttggaggccccatggccaagcaggcgcggagcgaggggtcaagacttgaaccgggaacgggaacgaacgggacagagcgggatggtgcacg

SEQ ID NO: 587020 - DNA, 223 bp, Homo sapiens
agtctgtaccgctgatccgcttagcattttgagatgaggtgattatgcgagtaatcctgtggtgcccagtgtaaacatgagttcttaagagctacagtcagtgcccgggtgctggtggctgacgcctgcaatcccaacactttgcgaggccaaggcgggttgattgcttgagcctgggagtttgagaccagcctggtcaacacggcaaaaccccatctctacc

SEQ ID NO: 587021 - DNA, 937 bp, Homo sapiens
ggcacgagggttcgatgctggtttagggtttcaggcgtggaggttccaaaatccgaggtttgatttcagcctgcccttgccagtgcctgggccgctgggagccgttattggctgccgttaaggaccgttacgtttcccgggtccttctggcactcctctggtggaccgcccccatcggccacacttgccctgctctccagtgattctgtagctcctggctccgtagtctcgcggacagctctctttcctggaagatgtttctggtgggcctgacagggggcattgcctcaggcaagagctcagtgatccaggtgttccagcagctgggctgtgcggtgattgacgtggacgtgatggcccggcacgtcgtgcagccaggataccctgcccaccggcgcatcgtagaggtcttcggcactgaggtcttgctggagaacggcgacataaatcgcaaggtcctgggggacctgatctttaaccagcctgaccggcggcagctgctcaacgccatcacccaccccgagattcgcaaggagatgatgaaggagacgttcaagtacttcctccggggataccgctacgtgattctggatatccccctgctgtttgagaccaagaagttgctcaagtacatgaagcacaccgtggtagtatactgcgaccgggacacacagctggcaccgtgatgcggcggaacagcctgaaccgcaaggacgcagaggcccgcatcaatgcccaagctgccctgacagacaaggcccgcatggccgccatgtctaagacaactcgggcgaagtggagtgtcaccaaaccgccaggtcaatcctccttgcacactgagctggagcgcttcctggagtacctgcggctgaggttggggtcctcacagggctcgctggccttggcagcttctctacttgttccccattaactttgg

SEQ ID NO: 587022 - DNA, 214 bp, Homo sapiens
gtggagtacatggcacctccaacatcacaggatcgagggcgtctgacagggactgaatctcctggtctcccacagtggtatgggcagtggcttcggaacattaaacagattctcttctttcaaggggccaggtaaagatgctacttccccatgtccattattctcaccatcacagaaacccaggtatggggcaggccaggcggactggccccct

SEQ ID NO: 587023 - DNA, 152 bp, Homo sapiens
atccacatacacccacgtactatcagccatcctcatccaacgcccctgaagatccacctgtcacaatcattctcataatcgcccacgggcttacactcctcattactattctgcctagcaaactcaaactacgatttgaccttgtgcgtgtg

SEQ ID NO: 587024 - DNA, 918 bp, Homo sapiens
  misc_feature (912)..(912): n is a, c, g, or t
ggtctgcaggcgcgcgctcccgaggtcccgcctcgcccgctgagccggcctgtaagcgctgcggagattgggctagaggcggaggcctgggccacggcggaggcgctgggtacgtagcgcgccacgcgggccggtgagagccagccgggcgccggggagggggcgggccctggccgcggctgctacgcggggctgccaccgccccgggcgacccaatttcgcggcctagtggggcgtacgggcctcttttgaaagcctgagttacgatgtattgagcgcgtcgtatgcggccagcactagggtccttctggcactcctctggtggaccgcccccatcggccacacttgccctgctctccagtgattctgtagctcctggctccgtagtctcgcggacagctctctttcctggaagatgtttctggtgggcctgacagggggcattgcctcaggcaagagctcagtgatccaggtgttccagcagctgggctgtgcggtgattgacgtggacgtgatggcccggcacgtcgtgcagccaggataccctgcccaccggcgcatcgtagaggtcttcggcactgaggtcttgctggagaacggcgacataaatcgcaaggtcctgggggacctgatctttaaccagcctgaccggcggcagctgctcaacgccatcacccaccccgagattcgcaaggagatgatgaaggagacgttcaagtacttcctccgggagccccgtaccagccccagaggaaagaagcacgttccctcagctcttaaggaggctgacagtttaatgagaagagacacatgaggctttcgagccatgagcccaggaattactggtatatctgcagggcttcgaggcggcagtggctctccccttctgaaattaaacatcggataatgtcnccagcc

SEQ ID NO: 587025 - DNA, 350 bp, Homo sapiens
ccccggcctttttgtaaaaagtgtggcaagccccccccccataaagtgacccagtccaaaaagggcaaggtttttttgtacgcccagggaaaacggggttattacaggaagcaaagtggctatggtgggccaactaacccgtttttccggaaaaaggctaaaactccaaaaaagattgtgttaaggcttgggggggttgggcccccctgcagatttaaaagaatgctggctattaaaaaatgccagcctttttaactggggggagataaaaaaagaaagggcccagtggtcccgttttaagggtcctttttttttatgaagccaataaaattttgggtttttgttcccca

SEQ ID NO: 587026 - DNA, 278 bp, Homo sapiens
  misc_feature (58)..(58): n is a, c, g, or t
tcttgtactgtcgcccaggctggagtgcagtggcgtgatcttggctcactgcaacctncgcctcccgggttcacaccattctcttgcctcagcctcccgagtagctggaactacaggcgcccgccaccatgcccggctaattttttgtatttttagtagagacggggtttcaccatgttccccaggatggtctcgatctcctgacctcgtgagctgacagttttaaaccttttgttgtatgcctactctagttgtttcccttcagtcctgtctataaa

SEQ ID NO: 587027 - DNA, 649 bp, Homo sapiens
gggaacttttgaatggttgttccaaaaggggtcccctgaaggggatctgtgagagaacgtgttcccacagtatttccacgaacctgagtcgcctgaagctgctccacggagggagaactggaacgcgaagcgcgcgaaggtctaaagggcgccacactgggctgaacaaacctcgctgaagcggttctcttcgaagacctgttggaaacaggctcacgcaaaccgtcaacacaagggctccccgagcgagtgagcaccactgcaccgcctggagaccaagctgtggtggctctctgtcacgggacccacttatcgggtaactccttctggggcttctcagcctccactcgccacctgggggctcatcactggcctccctcgcgtccactggtcctctgtctgtctcctcctgtgataacctgggagaccacgagtcccctttagggtttcccggagcttccgggaaggacccgcccactcccacggactccacagatgccacggggccctgctgcccaacaagcaaggaccagcatttcctcgagaggacacctgggcttacctggggggcaggatgcctggggacagttcaggacacacacacatggcccgcaactaaagcaacaccccttcaaaaaaaaaaataaaa

SEQ ID NO: 587028 - DNA, 130 bp, Homo sapiens
gcaacatgaaattacagttgcacaattttccttacgcagatcagctgtgtgtcacgaaatagtcatgcatccaaggccttcccttacagttcctctcctcctgtccctctccagctggtatactgctcgt

SEQ ID NO: 587029 - DNA, 762 bp, Homo sapiens
  misc_feature (244)..(244): n is a, c, g, or t
  misc_feature (301)..(301): n is a, c, g, or t
gggcgcccggttgcagcgtggacgccggatgagatgcttttaggcttgctggcccgcggggctgtccaggcacgcgaggcccctcagcaacaaaatgcttcaacaagttccagaaaacataaattttcctgctgaagaagagaaaatcttggagtttgggactgacatttaatgtgttttcacggaatgcttaaatgcaatccaaaacatagaacccaaaatttacccttctatgactggtccntcctttgtgcaacgtggatctgccctcactatggaccataatactttgcggggtacnaattaacagatattagttacagagatatgcgtcaccagaagtgaggtttcatggttgacgagaagatttggactgggattgccatgggcttacctgtgcgaatatcgaaatggatcaagacacttgggcaatcagcaggaccacgaggatgtgggccaaaattgggagattaccagagtattaacaatcagtgcctgagcaaattggtgatgagatatttctgctggagtggaacgaaattacagcaagacatccccagtgaagactttgaatcatgaagacttgtgtactgtaactgtggttaccaacaaacagcagacttctaggcatgtacttatcaaaggtggtacggtcagaccttccctaattacacctatcccctacaacttacatgcacatagacacacacatgaacacactgaagatatttccttcaggtgtgtgtacacatatgctggctg

SEQ ID NO: 587030 - DNA, 1030 bp, Homo sapiens
taataggctgatgctctgaatgcctagggagttcaagctggtgttctgtctgactgtcactgaatgcctttgtagtagctggctgagatgcgagagcacgatcactctaacctacaatgggcagaataggcaatggttcggctcctggctgatcccagctgctggcctatagctgtacaggactacagatatctatctactaatatgatttcatctcgccgttgtcccattctttgtttgcggtaaatcagtaagcggttccctactcaagtagggatattctcctcaatgtggttgggattactaagtgaattagcgtcaatgaaactcgcaaaagagcactcttgaatacctaaggttgtgcatatccaagaattagtgcctaacatgcgactctttctacccttagactagaccctagtgactcacctaacatttaatgctattcctccgacctacgacttctgcagtaagtccctggcgtgtagcaattcagtttgtccaagcgccgtcccgtaattttatctgttcttagcctctgttgctgggaggcacttgcgacaccgggacatagtgggacacgatttctgcaattacaacaccttgtgtagttcgaagcggcaattcggacgaatatcagagtattcaatcctcgccttagcatgattatatcctacactccaactcaatgagacccacaagcaagagtagcccttctaaacgctaatccaagcctcaccccacatagctaggcctcctcctagcatgcatgcaggcaaatcagcccaattaggttcttccaccccggacttcccgcgtcagccatagaaaggcggcaaccctagtctagaggcctactccactcgaggcgacgtataagattgtaggagggagtcttcttaaagcattcggttcaccccccctagaaaattaattagccataggtccaataattcttgacaatgcttaaagagctatcagcactctggaacgcagacagtttggggccttttacagaagacttttaagg

SEQ ID NO: 587031 - DNA, 791 bp, Homo sapiens
ctcagcacgtactgtgcctgcccccccgcaacgtgacccttctgcaggagagggcaaataagttggtgaaatacctgatgattactggactacaagaagatccccatcaagcgcgcagacatgctgaaggatgtcatcatgagaatatgatgaacattccctgagatcattgaacgagcaacgtacaccctggaacaggaagtttgggatccacctgaaggagatcgacaaggtaagaacacctgtatattcttgtctgcacactgggactcctcaggtcgtcctccttgcaaaaaaccgaagggacagctcccaggctgagtctcctcttggtgattctgggcgtcatcttcatgaatggcaaccgtgccagacgaggctgtacctctgggaggcagctacggcaagatgggagctggccctggggtgaggcacccattcctcggcgatctgaggaagctcatcacagatgactttgtgaagcagaagtacctggaatacaagaagatccccaattagcaaaaccatcctgtagtatgaattcctctggggcctgcgagcccgtcgatgaagaccagtcaaggatgagggtcctgagattcatcgtccataatcagaaccgatatccccgggaatggaaggctcatttcttggaggctgtggatgatgctttcaaggacaattggatgtggatatggccgatgaacatgccatggccctagcatgaggggcccagatgaaatatcggggatgaagcgctgattggacggtggagctgggatgacatacag

SEQ ID NO: 587032 - DNA, 122 bp, Homo sapiens
caggttcacgtgatacctttggtctgggtatcaggaaatcctcttgctccttttttgcctctggtccttcactgccaactccgtctctcccgaactcccgaccccaggtgatccacccacct

SEQ ID NO: 587033 - DNA, 496 bp, Homo sapiens
agctgcacacgccgtgccgttaacccactgccaggtgcaaagtggaagggggcaagaagtcaagggtggcctgccggaggtgggcgcgcagggcaaggagaaacgaagggcgaacccgaggcctcgccgccttccgcggtgtagcccgtcagcatctgatcctggacggcgcgcacaggtgaacacaccttgctgtgccgagaccatgccgagagagacaaggggcgaggaaaacgcagggaactgggggtggggccggtaactgcgcttcagaggctacacaggagagtggaagaagagctggggttgcccggactaggcagaggtcatcttcctcgcccccggagcgaacagacccgtgtggcgggaggaagagcaacgggaagaggtccgcgctgcggcgaagcctggcgggagcgcctccgcgccgcagaagtgcattcgggccccgctacggcccaagggcacccctctctccccgcttttctgcggccgc

SEQ ID NO: 587034 - DNA, 156 bp, Homo sapiens
agagatagccggactcgccattcggcaaggtcgaacggaggagtcgagtatggtctctgcatattgtgagatcaatcatattatggccaagggtcatgatggcaggagctattcagaggtgtggtgcggattcaacccgtcgatggttcaaacgca

SEQ ID NO: 587035 - DNA, 445 bp, Homo sapiens
ccaccacacctagcctcttttagtttttagttttttgttttttgagacagagtcatgctctatcatccaggttggagttcaatggcacgatctcagctccctgcaacctctgcctcccgggttcaggcaattttcctgcctcagcctcctgagtagctggaattacagtcacgcaccaccacacccagctaatttttgtatttttttaatgaagacggcgtttcaccatgttggccagactggtcttgaactcctgacctcaagtgatccacccgtcttggtctcccaaagtgctgggattacaggcaagagccaccacacccagcctcttttattttaaaatgtacaattaagttattattgattatagttaccctgttgtgctatcaaatagtaggtcttacttattctttttgactggggcctgggtgatagggaggtcgac

SEQ ID NO: 587036 - DNA, 134 bp, Homo sapiens
gccccttttttcccggggggccccccccctttgggggcccccggggttttttttcccccccccccccccccccccctgggttttttttttgttttgggggggggggggggattaaaaaaggggtttttttccca

SEQ ID NO: 587037 - DNA, 733 bp, Homo sapiens
tggtctcgatctcctgacctcgtgatccgcctgcctcggcctcccaaagtgctgggattacaggcttgagacaccgcacccggccaatttggtatttttagtagaggcaaggtgtcaccacattgagcaggctggtctcaagctccgtggcctcaagtgatccacctgccttggctcccaaagtgcagtgattacaggcatgagtgagccactgcacccagctgtcaaagatgttatgggttagaaattactgccgtgcgcgatgactcacgccctctcatcccagcacttgtgagagaccgaagcgggtggattacgaggtcacggagactgagaccatctgtggccaacatggtgaaaccccgctctactaaaatacaaacaaattagccaggtgtggtggtacgtgcctgtaatcccagctactggggagactgaggcaggggaatgtgcttgaacccgggaggcggaaggttgcagggaagctgagaatcggcggcccacctgcaatttccaagcctggtgaacagaaggcaagatttcttcttcaaaaaacacacaacacaaggacgggcctggggttggggggggctcccaccctttgtatatcccccaagccttttgggagcccccggaggcagggactagattttgtgacccccaggggtttcacaacccggtctgggcaaatattagagagcccctctttttccaaaacatacaatcaaacctt

SEQ ID NO: 587038 - DNA, 151 bp, Homo sapiens
gatgcgtatattgagtggcatgtgagctgtgccttttgtaatgcctttatcaggttcaggaaattccttatagacgaaggacaaactgttctccactcacaacatttctgacacccactgtgtgggtttcccacgaccattacagttctcc

SEQ ID NO: 587039 - DNA, 114 bp, Homo sapiens
  misc_feature (3)..(3): n is a, c, g, or t
acnagttaagaatttagaacgaattatttaaattatttaaataacttaagtttcctattttcccaactgccccatatatgaatccatgacatccacttgacatttttctgtttg

SEQ ID NO: 587040 - DNA, 665 bp, Homo sapiens
  misc_feature (20)..(20): n is a, c, g, or t
tgagtgtacccctcgagtantggatacgtcgaccacgcccgctatctctacagaccacaaagatttggaacactatgcgatcattcggcgcatgagctggagtcctaggcacagctctaagcctccttattcgagccgagctgggccagccaggcaaactatctaggtaacgaccacatctacaacgtttatcgtcacagcccatgcattgtaataatcttcgtgcatagtaatacccatcataatcggaggcttatggcaactgacatagtcccctaataatctgtgtgcccccgatattgtgctgtttccccgcataaacaacataagcttctgactctataccccccctctcatcctactcctgcatctgcatctgctatatgttgggagtgcctgtgagcagcaacatttgttgaacagtctataccatccccttagcaatggaactactctcacccttgggagaccataccgatatgacactaacccattctatcttacctatacagcctagccaggtactcttcctcctatccttaagcggtgcccactcaaattatcatcaacaaaccaaatttatccaatattcaaaaacccaccccttgaccaatctaaccccaataaccaaaaactgcccccattacttctgacacttgaaatcc

SEQ ID NO: 587041 - DNA, 615 bp, Homo sapiens
  misc_feature (56)..(56): n is a, c, g, or t
  misc_feature (61)..(61): n is a, c, g, or t
  misc_feature (66)..(66): n is a, c, g, or t
  misc_feature (73)..(73): n is a, c, g, or t
  misc_feature (96)..(96): n is a, c, g, or t
  misc_feature (104)..(104): n is a, c, g, or t
  misc_feature (142)..(142): n is a, c, g, or t
  misc_feature (207)..(207): n is a, c, g, or t
  misc_feature (211)..(211): n is a, c, g, or t
cacgtcggggcccaaccagccctccattagggcaagcccgacaagtacatggcggnctggncgagnttttttntcaggtggatgaaagaggaaaanccagacanccccacctacttgtgtggcaagatcagcttttgagctnatgcgggaaccgtgcatcacgcccagtggcatcacctacgaccgcaaggacattaggagcacctncagngtgtgggtcattttgaccccgtgacccggagccccctgacccaggaacagcttatccccaacttggctatgaaggaggttattgacgcattcatttttgagaatggctgggtggaggactaattaggttccctgccctacctggggttctggtccaggggagccctgggcaaaagcccccggcccctataaatagtttatgtttttggcccccccgaccgcttcccccaagttttgctgttggactttggactgtttcccctttcagcatcgcttttgttgggccgtgattgtccccctttgtgggctggaaaaacaggtgagggtggggtgggctgaggccatttccccccctatttgtgtaataaaatccgtgagcccgaggtgggacgtgctggtgtgtga

SEQ ID NO: 587042 - DNA, 260 bp, Homo sapiens
  misc_feature (2)..(2): n is a, c, g, or t
cngtattataggcgctgccccacgcccagttgatttatgtagtaatagtagagatggagtttcaccatgttagccaggctcatcttgaactcttgactcaaatgatccgtctgcctcggccttccaaagtgctgggattacagacgcaaaaatggcgatctttgtgaagaacctctatgggaaaaacaatcaaccttgaggtcgagccccgtgacaccattgagaatgtgcaagtctttcatccaggacaaggaggctat

SEQ ID NO: 587043 - DNA, 741 bp, Homo sapiens
tcaccttcacctgctcatgcgccccgcagctgcgcccgctcccacgccctgcgtagctgagtgacccagactcgccagtgaaatggctagtgatgtgctggtgtgccctgtgtgctgtgtgccctgtgcctgggcctggtgtcatgtggtgatgtgtgtgcctgtgctgtgcatgtggtgctgtggtgccttcatgcttaaatgtgctgctggatgcaccctggctgccgatgatgctgcttgagtagagctggcgccctgctcgagagaagttggtggcctgagatctgctgcctgtcccagccctgccctgcgtgcgtctgcgctgctcctggctgcccttacccctgcttgtgcccttgcaatgtgctgtgacctgtgctgtgccatgcatgccccgtgtgtgcttgatgtgcctgccccattggcaaatgccttgtgcgtgtcccctgtgcgactgacggcgcattggatgaacttcctgtaagtgttgctgcatcctgaatgatgtgctgaccatgctgtgtgtgtgctgtggtgcctgagtgtgatgtgctggcccctggtgctcccggccccttctgcagacctggctgccgtggcgcggtgcacatgcgggtcaaggaagtgcagcaatgatccggaacctgatggccttctgccacctgccaagcattgcgcatgccagccactgcggcgccatctgtcttcagctggcttgctggctggggccaccaccaa

SEQ ID NO: 587044 - DNA, 273 bp, Homo sapiens
atatataatatctatatgatgttccactttgaactcttctttcaaaagattaaaacagtttgagggcagcctgggcagcatagtgagaccccatctctacagaaaaattaaaaaaaaaaattagccaagcatggtggcacacatctgtagttctagctacttgggaggctgagatggaaggatcacttgagtccaggaggttgaggcaaggctgcagtgagccatgatcacctcaccgtattccagtttgggtgacagagtgagaccctgtct

SEQ ID NO: 587045 - DNA, 250 bp, Homo sapiens
ctcagtcacactagccacatgagctcaacagacactgtattacaggacatttccattattgcagaaagttctattggacaacgctgctctaaaaacttcctaagcatatgacctgccaccaactcattaccattttgagggtagtttgcagcaaagacagaattcttcagtgtcagtaacagaaagtacttacacagtccacggttcatctccaaacactttttgatatttggctttaaaaggaaaattc

SEQ ID NO: 587046 - DNA, 627 bp, Homo sapiens
  misc_feature (189)..(189): n is a, c, g, or t
  misc_feature (492)..(492): n is a, c, g, or t
gacgaggaggacagtggtctgcagagcaccctggaggcatcgctggagctacggggcctggcccgcgttgctgataacgcccagcagcagtatgtgcgctcacgcccggcgccctcgcctgagtccatcaagagggccaaggagatggaccttgtggggctgggcctgcaccccctcttcagctcgcgntttgaggaggaggagctgcagcgtgtgaggctggtggacagcataaagaactaccgctcccgggcgactatctttgagatcaacgcctccagccgagacctgtgcagccaggtgatgcgcgccaagcggcagaaggacctgcaaggcccatcgcccggttccagcagtgacagcaggggcggttaggagcatgcatggatgggcccagtgtggcccagccccgagcctgtccagcactgcatggagaagcagtctgagaaggcggacggaggaggatggcgggcagacgagtgtggaggacanttctcagaggtcggtgggccggaagcggcagcggtcaggacccaacaggggagccaagaggcggagggagggaggccctggaagcgggaccaggaaattctacatcccctacgggcccaggacttttgacagcga

SEQ ID NO: 587047 - DNA, 132 bp, Homo sapiens
  misc_feature (41)..(41): n is a, c, g, or t
ctgacacggtatatgtaatacgtccatattttccattcaantttttctctaaagcctaaaactacacacacacacacacacacacacacacacacagagtgcagcacgacacatgtgcagcacgacagagtg

SEQ ID NO: 587048 - DNA, 168 bp, Homo sapiens
ctctagcggatccttagcgcagctatggcatttggctgcagaagtttaaacacggtacatggcatagggtaagtgctctacaaactttaactgctattattagtagtactattattaattaagaaacaccaatgaaagcaatacttacaaggggcacacattatggag

SEQ ID NO: 587049 - DNA, 285 bp, Homo sapiens
  misc_feature (31)..(31): n is a, c, g, or t
  misc_feature (64)..(64): n is a, c, g, or t
  misc_feature (79)..(79): n is a, c, g, or t
  misc_feature (89)..(89): n is a, c, g, or t
  misc_feature (104)..(104): n is a, c, g, or t
gaggaaagaagaaaggttgattaataggtanaaatatacagtttatagaagaaataagacctanggcttgaaagatcangtaacatganctatagttaacaatnaatgtattgtatatttcaaagtcaccagaagaaaataatttgaatattcctagcagaatgaaaagacaaatatttaaggcaatggatcacccaatcacactgatttgatttttatacattatatgaatgtgttaaaatgtcccatgtacccccaaaatatgtacatctgttatgtatgaat

SEQ ID NO: 587050 - DNA, 329 bp, Homo sapiens
  misc_feature (24)..(24): n is a, c, g, or t
  misc_feature (90)..(90): n is a, c, g, or t
  misc_feature (244)..(244): n is a, c, g, or t
ggcaaccctactagggtagaagtnatgaacatcagatgcttcctttagaaaggtgatttgaggagggccctaagggaggagacacttggnttctggaaagctgaaatgaaagtttattctggccaggcccagtggctcacgcctgtaaatcccagcagtttgggaggccaaggcaggcagatcatgaggccaggagttcgagaccagcctggccaacatggcgaaatcccgtctctactaaaantacaaaaattagccgggcgttgtggtgggcacctttaaccccagctactttgggaggcgaaggcaggaggatcgctttgattcct

SEQ ID NO: 587051 - DNA, 681 bp, Homo sapiens
gcgccccctcccgactcgccgcagcacaacaagaacccgcccacacgcggcgtccccccccgcgccggcggcaggaacagctgcggcaggaaggtgtggcccggccacaagcgagccgctagcaggatccaacgtgctagattttgaagagcacccccgctctgcggaagggcagcgccccccgacagtcgggccgcccccgacacctccgcggcagcagcggtctggagagcagagtattacaacatgttcgcccaccgctgctcaccgtccctctcctccctcacccttattgggaccccacaccccccccaatagcaacgacaggtttctcctcacatatacctcccatcgacacctcacaccactaacacatatatcatacatagacacacacatatacatatatacagacacacacacacataatagatatacagacacacaacatatgcacactctgtgggatacaaggtctcacatgactgcacacagagaggtggcgccccacgagatttagccctctcctcactgccctaccagggattctgcaagacaacatgacgtcgctcgctcgacccgtagagcttctgtccacgcacacaccagagaggttggccgcttggagcatttgtattcaatagagcaagatataactggcagcaatcaatagtacagaac

SEQ ID NO: 587052 - DNA, 398 bp, Homo sapiens
  misc_feature (366)..(366): n is a, c, g, or t
  misc_feature (385)..(385): n is a, c, g, or t
  misc_feature (394)..(394): n is a, c, g, or t
gccattataaagtttagattcagacttgctctttgacatagaaagtgaagattcatctttattttgagaaatatcttccttccctctttcaaaaccctggctatgaggacttgctggactaagagatggctgatgcaaatctttggttggcgttggataagcttcttttccttggcgctgactcatctttcctggtgtcagaagctgagattcgtcactgtttgcgaagttcgatcaggttctccatctggccaaacctccctccataatggaaagaagataggtttaatgcttctctttccattaatggtgcagccattctgtaaatctgcaaatcccgtgcggagtccccagggaggcgggacnaaaggaagcccggttcctncgaggtcgnccgc

SEQ ID NO: 587053 - DNA, 209 bp, Homo sapiens
  misc_feature (110)..(110): n is a, c, g, or t
cgccttgactatgacgctcgtgtgtggattgccagcgtaagcttgcattaaggacgccgtgagcacagccactcggcctagtgtagactactcaacgcgtatatctgagngctcccctatgtcaaggtgagagtgatataactatgtacgggaggcatgtgcgcgttacagtcattggtcactagctgcttcctggtgccgacagagtt

SEQ ID NO: 587054 - DNA, 210 bp, Homo sapiens
aggaaggtgaaggaaatgaagagaaggtctgaactagcacggtaacattaaggtccacggttcctgaggtactgaacgcacagaggcgagaacgtcccgtcaaatgggcgtaccacgaaagggtgtattctcatgcacaaacgcagctcggaattacagcccacacacatcccatctttaaagtctgtgttatcaaggcccctttggcca

SEQ ID NO: 587055 - DNA, 165 bp, Homo sapiens
ctgatgtgtatatacataaacatctcaatgccttaaagagcagtattgcctccagcatgtctcacctccagccctaaggcggttttctcctatctcagtatatggaatatacaattgggttttaacacccagaacattccagttgcccagggcatgacgcgggag

SEQ ID NO: 587056 - DNA, 363 bp, Homo sapiens
cccctccagtcagcgattctcctgcctcagactcctgagtagctggaattaaaggcactcaccaccatgccttgctaatttttgtatttttagtagagacagggtttcgctatgttgaccaggctggtctcgaacacctgacctcaggtgatccatccacctcggcctcccaatatgctgggattacaggtgtgagccactgcgcccagcctgcagaaatatattttagtactaactctctggtgtcttctaaagctatagattttgaaaaaatgtgtttttctaaatgtattacatttgcagagtttttctcccatacagattcactgatgttgaaaaaactttgagcaactgcttcaggga

SEQ ID NO: 587057 - DNA, 353 bp, Homo sapiens
aagggacttgccttgtctcggatgagactttggactttggactgtggacttttgagttaacactgaaatgaattaatgctgaaatgaattaagactttgggagatggttgagaagccatgactcattttaaaatgtgagacatgcctttcaccttctgccatgattgtgaggcctctccagccatgtggaactgtgaacacacagtgttcatcccctcaggaggacacagcttttgaggtaccatcttggaagcagagaccagccctcactagacacaaacttcctggcacgttgattttggacttcatagcctctagaactgtgagaaataaatttttattatttataaaaa

SEQ ID NO: 587058 - DNA, 428 bp, Homo sapiens
cacgaggctgacgccgccgcgcatcgtcaccgagtgcgggcgcgcgatgaccgcgcaccacgcggtgctgatcgccaacgtgtcggaagtcgaacgcgcgccggaaggccgcgtgccgccggaacaggccgacgagccggcggtgatccggcatctgcgcgagatccacgccgagctgccttcgcggccggcggtggagctgttccacgaggcgcagcatttccacagcgagggcatcgccggctacgccctggggcaactggatctgctgcagcgcgcgcggctggacgatctgttctatgcgatcgcgcacgccgtgcggcagcgcctcacctacgacgagaagagccaccgcgatctgctcgacgagctcaacgagcggctggtcgacaagtatttcgtcaacttcagcgtgttcgaatcgctgc

SEQ ID NO: 587059 - DNA, 768 bp, Homo sapiens
  misc_feature (70)..(71): n is a, c, g, or t
  misc_feature (124)..(124): n is a, c, g, or t
  misc_feature (145)..(146): n is a, c, g, or t
  misc_feature (148)..(148): n is a, c, g, or t
  misc_feature (178)..(179): n is a, c, g, or t
  misc_feature (186)..(187): n is a, c, g, or t
  misc_feature (191)..(191): n is a, c, g, or t
  misc_feature (194)..(194): n is a, c, g, or t
  misc_feature (201)..(202): n is a, c, g, or t
  misc_feature (205)..(205): n is a, c, g, or t
  misc_feature (232)..(232): n is a, c, g, or t
ggagcgccaggaaggtagcgaggccagcgtcgccccgggactcgctgctcaagtctgtctattgcctgcnncacatccatcctagcagggcccgtcgcccaccaggcggacaaaagcggtccgntgaacaccatgcggccgctcnngngtgccgcccaggctctgctggtgagcgccnncaccccnntgcncanggtcccnncgngcccgcctgcgcgcacctctgccctgntcccagctctactccaggccccgtcctgcccgggggctgccgcccaccgcgcctcgctcgtggccgtttgccgtctgcgatccacgaccctgagtctgccttgccgccggcccactggaggtggcgccggagcatgcgacgctggatggcgcaccacggccgtgctgaatgcgccagaaacccgactcaaacccacccgggcctggctgcacaaactacatggaacccgcgcagcatgcttgctccagacagaggttggacgtcttcttcaatcaccttcgactcggaggggcaacccctaactatgacctaaccccccgcttcacgccggccgggcagccgcagtcatcactaacagtcacacgtggctaaagccctgcttggacccggaggggccagattgttgacagcgcccaacacttggtgggacaagaccccgaggattgggccctgggctgggaacaggggggcaaaaaagaaagaccctctcttgcccggtggacggacccaccaacctacaaacccttgagaccgtg

SEQ ID NO: 587060 - DNA, 223 bp, Homo sapiens
agtcctaatttttagagtgtaattatggagagcctttatttttattgaaagccttttctgctttttttgagattatcactttggttttattctttagttttgtttatgggatgaatctcgattaattgacggttttttttgacggcaaccttggcttcctggggatttacagctatggggatcctcttagatttcgactttgcaggctttgcaagtctttggc

SEQ ID NO: 587061 - DNA, 304 bp, Homo sapiens
gtatagcacctttgcagtgctttggcatcaagactattcatccattttgcattgctataaaggaatacgggaggctgtgtaatttacaaagtaaagaggtttatttggcttatggttctgcaggctgtacaagaagcagatacttatggtgccagtatctgcttctgataagcacctcaggaaactttcaatcatggcagaaggtgaaggaagtgctccattcttttctgttttttgaaggagttcgagtaggattggggttaattctttgaatatttgataggatttgccaatgcagccatga

SEQ ID NO: 587062 - DNA, 447 bp, Homo sapiens
  misc_feature (6)..(6): n is a, c, g, or t
acgtancaggccataaatctcctgcagtttcagcaataggtaaaaacacgtgctcaatgtttttttttttccctttaaattttggcatccagacttgtgtaccctccatctgtaaatcgggccccccctcccaccgccggggaaaaaatatggccaccttgtgtgtgttgtaaagcaacattccaggtgtaaatataaagctgggaaaatttaaatttaccttttaaataatttcctgactaacggggactattttaagcagatgagagctaagagattcagtgaaattatgtggtcataccggcaattgccagattagagtggtgggtagtcaagaattgtatcagatattaggtccctcatcagggggcatggcttccctaggtgatatgtggaattttgggcccagggatgatggagggtgtgggctagtgtgatcaccaccat

SEQ ID NO: 587063 - DNA, 874 bp, Homo sapiens
gagacgtgcttcgccgtctctccttagtcgccgacatgacgaccgcgtccacctcgcaggtgcgacttgaatttagccatcaggactcaaaggccgccatcatccgcctagatcaaccctgtggacgctctacgcctccgtacggttttacgcgtgtccaatgctcttactatgtttgcgcaccgcgtatggattgtggtctttgaagcagacttgtgccgagatatacgttccttcaccaattcttcaatgaggcgagggaacaattgctgagaaattgactggaagctgcaggatccacatgatgtggccgaagtcttcctttcaggatatcacagttcacctcagactgtgatggactgtgagaagcgggtctgaaatgcaagtgaagatgtgcccttaccttttgtagactatatctgtgaatcaggtcccttactgggatactgctcggaactgggcaattgtcaataatgacccccatttgtgtcatgttctttgagattgtcgtacctgcttgagcaggtctacatccatcagagattctgttgtgccactgtgtgcccacgttgcgtctggatggggcgcgccctgattctggcttgggacagtatctgctggtgacagtgcactccctgcggagaacgggattattgaagggctactccctcgggccgtaatttccccatcaagggcgggcgcgctgattaccggtgtcactaggctggggatgcatggtggggctttccttacctttgctgatgctgtccaaactctgttagtgcttgattggtccttcttcactggggtgttggttccccaacgggagatgcgacaggtatgggcggacgtccccggagtgttacaccctggg

SEQ ID NO: 587064 - DNA, 379 bp, Homo sapiens
cccaagccttggcagctttccacatggtgttgggcctgtggtgtgcagaaggcaagagttggagttttggagcctttgcctagatttcataggatgtacagaaacacctgcatatccaggtagaaatctgctgcagggtggagacctcatgaagaacctctactagggcagtgcagaggggaaatgtgaggttggagcctccatgcagactcccactgggcagtgctagtagagctgtgagaagagagccactgtccttcagattcctgaatgatggttcaccaacagcttgcactatgtgtctggaaagcatacgcaccgacacatcctgtgaagcagctgtggtggctgtacctgagagcataggggagagctgcca

SEQ ID NO: 587065 - DNA, 927 bp, Homo sapiens
  misc_feature (1)..(1): n is a, c, g, or t
  misc_feature (5)..(6): n is a, c, g, or t
  misc_feature (15)..(15): n is a, c, g, or t
ngggnnaactgtgcngtccgcgccgcatttggtcgcgtcgcccacagactcttctcaccattttgtttccttgtggcttcgtcccaggttccgtcaaggtggcggagaaggagagggctgaaacacgcgagtccgtcttagtggcggtaacctcataacatgcaataatggcatcgtagaatctctctcgtggaagaataggaacacagtatctttcattcgactcatacgtatccaacaacgatattaaaaaccgatagacatcacatccttcgtatcccgccagcaccccctcacttccccctatgtttatatcagggcgacaaaaactcctagtcgcgtttaaagtacctataatgtaagtttctttatatgcatttcatattttatcctatagtactctttaacgctagcattccaagtgttgatctatcttctcatccttttcctttcactcacaggtttttcgtgtcgtggcgtttctatgttgtctacctcccgctatcgttcaaatgtctcatcctcctaccgcaatactacgccatcccaatgctgttgtacctggtcgtctacgtgcctaccttatcagccattccaaatatacgacacagtctcacagatccataccatcaaactcgcttcacatcccgtgtctcttgccattgttctctattctctggtattccattttgtccttcgctagttcttgttcagtgccgccccctccagactcccgtccactcacactccatgcctgcccgggacactcttagcgtacgctccttcactatcagtatcttcctcttctcacgtcacgcccgcacccctctccttaccaccccagaatatccgtaattcacgatgttatgcgattacgatctggcagaggaggagggtggcgcaacctacattcatctactataactg

SEQ ID NO: 587066 - DNA, 1061 bp, Homo sapiens
ggcatgggagagggtcgcgtcggacagcgacagagggcagcgcagcggcagcggtggcggaaccaagcatcaccgttcgtagcccgagccgaccggcccgcgaccaggctagcgcgccgggcggcggccgaggactcggcacggaggccggcgggagcgggccgaaggaaggaagcgcagcagggatcgcgctaggcaagtgggtccatctgcatctcgaggcgaccttcccagaagccaagcatctcggtcaccattcacagagatccatttggactccttgtggtccttggagcgggagttgccctgcatgaacgtaggagccggaggcgtaaagcgtgcaggttccccggattcccattcccttttgcttgggaagacccattttgcgggtcattcggggttccgttggcccccttcggggcaggcccggttccccccgtggggggcgcttttcccccggggggaattcccctgtgttcgtgggccttgtagctcggggaaggacgttgaattcccccaccttttttggagttttgttcccctgttttggtttgggtcccccccccctgggtgggtgtggcctccccgaaggcccattttgccccccccggtgggggaacacgcaaacgcccccccccgcggtgtgtttgtcctcccttccgcctgaagagacccctaagggggaaaccagtaacagcaactccaattggcaaaggcccccaagacgtaccgtgaattggtgacacagcctttgaacttgcccacgcggcacatggaaaaacgtgggaatagactttcttggccgcggggacactggcgggtggacactgtgtgacccccaaccaattatgtgcccatgtggagcggcggcacattttccccccttttgttgtaaaaagtttggccacattttggtggccgcaaatgtttcccaaaaatttttctccccagtatatgatgtcccccaatataagcagtattgtgtgattagatacaacccacaaggaaaacgataatgttttctccccacatattttgtgtgggccccccggagcagt

SEQ ID NO: 587067 - DNA, 1016 bp, Homo sapiens
  misc_feature (359)..(359): n is a, c, g, or t
  misc_feature (454)..(454): n is a, c, g, or t
  misc_feature (464)..(464): n is a, c, g, or t
  misc_feature (466)..(466): n is a, c, g, or t
  misc_feature (560)..(560): n is a, c, g, or t
  misc_feature (568)..(568): n is a, c, g, or t
gctgctgcttcatggatttccagaattctggtattcttggcgttaccaactgagagaatttaaaagtgaatatcgagttgtagcactggatttgagaggttatggacgcaaacagatgctcccattcatcgacagaattataaattggattgtctaattacagatataaaggatattttagacttctttaggtaggttagtttgaaacaaaacaactctttttaagggacaaacattcaacaaattgtgaatcaatgacttcttttcttgggaggatgcatattccatctacccaaattatctggatcctgtcactatggtttcaggtagtcagcccaaaatatctgtacaggaaattnaaaatgatgcatctagagcaactattctgtctaccagccaagaatgacttttcagatttgtttttaaacatagacctaatggcccgggtgctgtngttgcgcctntnatcccagcactttgagaggctgaggcgggcagatcacctgaggtcagagtttaagaccagcctgaccaacatgttgaaaccctgtctctactanaaatacanaaattagccaggcgtgaacccgggagatggaggttgcagtgagctaagactgtggcttgcactccaacctgggcaacaagaatgagactctgtttaaaacaactcccctcaacactatcgacctatgttttaccggcttatacattccggcagacctctctttgtgcacgcgctatcctcgtcacggctgtttacttctctggaccaccccaatatcctgtttcaccaggttttctgactgtgcccgcctgtattccggtgggggctcccctctgtgacaccccatttttgttgtgcgagacacccccccatagatgcggatgccgtggtacccatcattgtctcggccagtctctgtgcctacccgatgctgtgcgctcctcattggtcgtcgtcgtcaggcgcgcgtgtgatggtgtcctttctatcgtgtggggcgctgcacacg

SEQ ID NO: 587068 - DNA, 704 bp, Homo sapiens
  misc_feature (101)..(101): n is a, c, g, or t
cgtggtggcgcatgcctgtaatcccagctacttgggaggctggggcaggagaatgcttgaacccaggaggcagaggttgcagtgggccaagatcgtgccantggactccagcctgggcaacaagagcgaaactccgtttcaaaaaaatagaaatcaggatacagtggactatcctttaacgtggaggaacatattcagttgccgtctaatctacagaggatattccacgttcttgagtctacctcaatcagggtcataaaacgttggagctctttaaaggcattttggagcaggttaatctctagcagtgaaaaccgtgtaaagctttcaaaagatagtttaaggacattttttaagcaagtgattctcgatgtggtggtgggcatataagtaccacgatatagaaagatagattgagtctatactttttagtaccgtgccatcttaagacaaagcaggacgtagccagaaaatgtagaaccatatgcaagtagaataacaaggtgagcaaatgtgtttgaaaagtatatagtatggggcagggcagggtggtcatgcctgtaatcccagaaccttaggaggccgaggcagggggatcatgaggtccagcagttcaagaccagcctgggcaatatggtgaaaccctggcttccagtaaaagtacaagaaattagcgaggcttggggggctcgcctgtagtccag

SEQ ID NO: 587069 - DNA, 295 bp, Homo sapiens
gctgggcctacttgattcttttgccataacttttattttttttgcaagataatatattttacttaacgaaaacttaaataattatagccatgcaacagcagagatgaagcttagaaatataatattgaaagataaaagcaagtcccagaacactaaatgcagttggatatgttataaagcttaaaataagcaaaactaaacaatacattatttctgcatctatatctatcatattattagaaagtattgtattattaaaaagtaaggtagtgagaaaagcccagaagatgaacaa

SEQ ID NO: 587070 - DNA, 206 bp, Homo sapiens
gcagctcgctgtgctgggactacaggcacctgccaccacgcccagctaactttgtatttttagtagagacgggatgtcaccatattggccaggctggtctcgaactcctgatctcaagtgatccacctgccttggcctcccaaagattacaggtatgagcccccgggcccagcctgctcttctttttataatgcagcgacagcgag

SEQ ID NO: 587071 - DNA, 307 bp, Homo sapiens
  misc_feature (261)..(261): n is a, c, g, or t
  misc_feature (297)..(297): n is a, c, g, or t
  misc_feature (304)..(304): n is a, c, g, or t
ctacatatacatcctccaccaagatagagtcatgggtaaattaattaaggttaagagacaatttcaatgtcttatgccaagctgttaaagtttttttttttcccccttttttatttatttttgagacagagtcttgctgtcacctaggctggagtgcagtggcgcaatcttggctcactgcaacttccgctccccagggttcaagcaattctcctgcctcagcctctcaagtagctgggggttacagccacccgccatcgngccacttgggttttttggaattttttgggaggaagnagggggnttt

SEQ ID NO: 587072 - DNA, 1267 bp, Homo sapiens
  misc_feature (584)..(584): n is a, c, g, or t
cggaagccacgctcacttctgcttgcacttaggcgactcgggagctcggactcctacgcagtcaccgggaagaggccagcggcctgtgccgcatcaattagcaacccagggagacgacttatcacctatcgaagaaatatatcaatatactcgacattgaaggtactctaacgaatgccgagatgacccagatgggacagaaatcccaagattcatatagccatcgggcgggccttgtcgggtttttcacctatggagtcagcgtgaggctcagctaaacacccggctttcgcctttgggaacctagggtttccctaggaagtaagattatttaaatataggcgaatgctccaacaaaagaatcttgacagacaatacgactaactctctaacgatggaaaaatcataccaaatctagataataccctataaatggatgaacgaaataatgaccattataaaaaaatgatcatagcaagcatcaactaatatctcacaaaaccgtgagacctagaggaacaggcaacaggtggaataccaacatatgctaaatcaaaggaaacctatgatgtacgaagtagatnaacgagagagagacacagctctatgagcgaaagagagagcataacgaagacaaaaaccatgggagaacaaaatcgaaaaatatagattagaataataattcatgcaaaaaaattcttaaaaccaaagtataggctcatggcccctgaaagagacgtgaaaggtatccgaacctgacgataaaaagatcgaaaagaaaagaatgctaatactccgaaaacgctaatataagaaaggataatggcccaatgggattaacgccttacgaattacaatgaataacctaaaaatgaatatttcacgcgataaaaaaaggggcaaaatttaaaaattaaccttattacattgatcccaaaaactgatttaacatttacaccacgatatattaaacccctaaaagctctgaaggaagttaatcggaaactccatagatcactaaagtgggtaagacgtaaaatgccgagaagaaatcccaaaataagctgagaaaagaagccgaaaatttagtaggatgaagccccaaggtgcggaaagtagggccgtgactgttgtggacacaaaccctaatttgggctgtgattggaacacgaggaagccccctcagtagtgagtaagaggtgcccgaggtcgaacggtggaggcgtagatgcagcctcagtggtcctctagggcggtgagtacctca

SEQ ID NO: 587073 - DNA, 685 bp, Homo sapiens
gttggccacagatgttgcagcccgtggtctggacagttccattcaatataatgactgtcattaagcgtatgatgtggcacgagacattgatacccacacgcataggattggccgcacaggaagagcgggtgagaaaggtgtgtgacctataccctatctcatctcccaaggacagcaactttatgctggtgacctggtccggaagcttggaagggagccacactcaacacgtttctaaggaactcctagatctgtcaatgcagaatgtcgctggtttcgtgaaatctcgattcacaggagggagaggaaaaaagctgaacattggtgtgtgaggaggtccgctagtgctacagggagcgtgcctggcctgtggctctgagaacatggatcgaggaaatagcaatgtgaatgagcaattatgaggcctacaagccttccacaggagctatgggaggatcgactagacggcggatgagaagcagctttccagtcacagtacaagagtcactttgttgcagcacagtttaagtaaatcatgaaggctggaagtactgctgctggggcaacgtgggtggactagtgcaggaagcttgaattctgttccaactaacttcagggcaacagggccataacaggcctgagaggcccgttaccagtgccgcaaggcatccccaggttggaaaac

SEQ ID NO: 587074 - DNA, 204 bp, Homo sapiens
cccgtcgatggcccatgcagctgagggggtgtctaggtaatcatttggatctcggaggcagagtctgccattactaccagaactagcaatttgggggcttactcatgctaggcttgcggaagaatgaaaaacgcttcgggattctcctataggacttatctgcttgtagatttggctgatccaattaacgatgggccatcgaga

SEQ ID NO: 587075 - DNA, 336 bp, Homo sapiens
  misc_feature (7)..(7): n is a, c, g, or t
  misc_feature (31)..(31): n is a, c, g, or t
  misc_feature (45)..(45): n is a, c, g, or t
  misc_feature (57)..(57): n is a, c, g, or t
  misc_feature (130)..(130): n is a, c, g, or t
  misc_feature (168)..(168): n is a, c, g, or t
  misc_feature (265)..(265): n is a, c, g, or t
  misc_feature (299)..(299): n is a, c, g, or t
  misc_feature (317)..(318): n is a, c, g, or t
cttatanagttgttcagataaatcccgggcnccataataacaatnacaacaacaggncataatactaatattaaatttttataaaatcatgcttggtgacaactctgtgcttttggcctcactgggtganaggattttctattatggtcgtggggactgcatttgttncttaaagtctatttggtaagtgtatggaatctttggctgaagattattccttggtcacataactataaacaagttactttcttcactaggtgcttcnggaatacgatgctatgggttgaattacgtatttncccccatataattgtggnncttacttctcccataggt

SEQ ID NO: 587076 - DNA, 176 bp, Homo sapiens
cacgtcatatcaggcaagcactcttagctcattccaacatactgaagctgttgcagcgcacaatatcctcccatgttgaggtctgccgccaggttaacattgtagctactaagctgaagaagtgtcttcgtaaacgaagtggggttgttcacatagttttgtccattccgtgacct

SEQ ID NO: 587077 - DNA, 515 bp, Homo sapiens
tgacttaaaacgaagtatgtcccaataaatccattatacatagaaaatatcttaagacaaaaatgcatttagggccaggtgcagtggctcacgaatctgtcttaaaacaatttttaaaagtacaattcctactgaacacatatcactttcataccatcgtaaagtcaaaaattgtagtcacaccatcataatcggtgactatctgtatgaggataagtaggagggttcagagaaggttattctctggctggtccagtggctcacgcctgtaatcccagtgttttggcaggctgaggtggtggatctcttgagcccaggagttccagaccagcctgggcaacgtgacaaaactctgtcactaccaaaaatttaaagattagccaggcgtggtgttgtgtgcctgtagtcccagctactggagaggctgaggcataaggatcacctgagctcaggtggttgagactgcagtgaggcatgatcgtgccactgtactccaacctgcaacagagtaagac

SEQ ID NO: 587078 - DNA, 771 bp, Homo sapiens
tgcctccagctctcggggtcggctccagtgaggcgccctcaggagagtgtgcgggcgctctattccatgagacctgatgtggcatgggctggcactgtggctggggctctttccccgtttcgcctcagctacccctcagctcctggtagtctgccagtcctggggtctgtctgccgtttgggtgctgtggagcttgctctggcccctgcctgccgtcccctgtctgcctgcttcctggtgtccagtgcccctcgtggccgactgcctgctgtcattgaggctgctgggtgcggcttctgaagctggacctggccctgctggatgtgttgccctgagaacggagcctgactggcttgtgggcattattgctgctcgacacctgagtgcatgtcccttgcttgttgcaccatgggggggtacagtttactaaataccgcgatttacaaattaacattttgaactaacaaggatacccctcaacttgggaggattgaaggagcacctatggcttcatattggggatttgtttcttggggcacctttgataatagtactgaaaacttacacagattgacaattccaggtgcctaaatataacctttcaatccacagatttcaagagcattctttcacttccgagaagtaattgagcaaaccctcttttggcaaccagctccaatcagaataaccatgcaggattgaacaaccaaagtgatccattccaagggcagggcagccaagactggtgtatggactgacgacagattgtag

SEQ ID NO: 587079 - DNA, 807 bp, Homo sapiens
taaaaaggtagttagctttaaaggaaactccctcaagggggtttcaagccaccaggacaagggcccccccaaaattcttaatcttctcctcgagttcttcggctgaaaaattgggcctttcagcgaagtaacggggtgtgctttggggaagccttttctccctttttccacgaaaaactttgggtagtatagccccgcgaattggcacaccacatctcaatgtgagtggagagtcaaggccccacgagattgttggtgttttaatagagccaaggacatatctacaccacgcggtgtctcgtggtcacaagtgtggaccccaaacgaggtctccccaaccaaatgtgtgggggctcaaaggggtggaacgaggctgggggacaagaaaaagctccctccgggagagttctccactcttcctgttgtacaggagggtggggctagagggggctctccaactaacccaaaatgtttgtcccgacaacaggaaggtgatgaagcccccgtggggggggggtgggggcatcaacctgtgggggctcacagcacgaaacatgttgtggaatcctccgcgcgggtgggtgtggtatgttggccacacgaaccgcgaagccacgtagcgactttgttcttcaccgcgcggggcggggctccccgcgccgccggggggtggctgtgtcccttcttctgcgggggtgtgtgggttcttggtgggctctatctggtggggcgggggccgccggggtgcggacctccggggtggggggtctctctttccactgctgtggtgggtgcccccccctctta

SEQ ID NO: 587080 - DNA, 185 bp, Homo sapiens
aaattatatagcagtcatcccgtctactatatgcggtagccgaggtcagcaacaacctatggtagctgtaccccgagcagtgacctccgaccccctaacaaccccacacctaatactaactacctgactcctacccctcacaatcatggcaagccaacgccacttatccagtggaccgtaagaca

SEQ ID NO: 587081 - DNA, 343 bp, Homo sapiens
cagccacataaatgatactgtgttaggcagtgggaggttgctgcgtaataagtagttaatgatgacaagtcctagatcttccgattataaggctagtatttagaacctatagtatggtggaatttaaagccattattgtcttctgaacatttacaaatgtatcatgaaaataaatttgatagaaagttgaccagtcttactgtttcccatcgtgacttattaaaaatcatatttgtgttttctgcttttgcttccacctcagacctcaatggaaataacttttcagactttacatctattcaaaatgtaattataggttaaacagggcagacatcaggtagag

SEQ ID NO: 587082 - DNA, 577 bp, Homo sapiens
ggggtggggtttggtttttggagtctttttttttaaaggaaatttatggaggaaaaaatgggaaggccttccctttaagatgttatatttttcttaaaaagtaactcctagtagggggtccccctgaatctgtacagacccgtaaaaactgaagttctgcctctgatgtattttgagagtttgtttctttgaattttcatttcacagttacttttcctggcaaccaaacaagcatataaaatggcaccaaacggcacatgatttcccaaatattaaaaagttttttaaaaagtattgcccaccattaatgttgatttctagttatttattctgggaaggtaaagtatttgaaaccaaaaattgggcccttgcccccatcatttgtaagcggtttggttttaaaaaacggtagataattacccaaggtagaatgcccttgtaaggtaacggcttttgggcaaaattttttgtacaaattagcgccaacagattggattttatgttgacatttgtttggttaaagggcaaaatattttgtatgcaagcagtttcaaaaaagtttgtttttcctttgcta

SEQ ID NO: 587083 - DNA, 342 bp, Homo sapiens
ggctaatgacagtgcatgtccagtgatagcggatataggaatgggcagccagaggacagtgacgtgaggtgcgggattgaatcaagcagggctgctcccgtcaggtacagcctggaggtgccggcaccgatgtcggttacctcccagatgctgctcagaatgtgcagtgctgctgtgcgaacacggcctgtgacttgtctcatgttccttccactgcagggcagggctgctgagctagagggtgactggagggcaggttcttgctctgggagtgcatcttgaagaggggacagctgcacacacaacacacacacacacctccatatgcacatgtgtaccgag

SEQ ID NO: 587084 - DNA, 604 bp, Homo sapiens
  misc_feature (10)..(10): n is a, c, g, or t
  misc_feature (68)..(69): n is a, c, g, or t
  misc_feature (72)..(72): n is a, c, g, or t
  misc_feature (84)..(84): n is a, c, g, or t
  misc_feature (95)..(95): n is a, c, g, or t
  misc_feature (100)..(100): n is a, c, g, or t
  misc_feature (111)..(111): n is a, c, g, or t
  misc_feature (114)..(114): n is a, c, g, or t
  misc_feature (140)..(140): n is a, c, g, or t
  misc_feature (144)..(144): n is a, c, g, or t
  misc_feature (160)..(160): n is a, c, g, or t
  misc_feature (188)..(188): n is a, c, g, or t
  misc_feature (203)..(203): n is a, c, g, or t
  misc_feature (205)..(205): n is a, c, g, or t
  misc_feature (213)..(213): n is a, c, g, or t
  misc_feature (266)..(266): n is a, c, g, or t
  misc_feature (287)..(287): n is a, c, g, or t
  misc_feature (290)..(290): n is a, c, g, or t
  misc_feature (296)..(296): n is a, c, g, or t
  misc_feature (323)..(323): n is a, c, g, or t
  misc_feature (326)..(326): n is a, c, g, or t
  misc_feature (370)..(370): n is a, c, g, or t
  misc_feature (376)..(376): n is a, c, g, or t
  misc_feature (382)..(382): n is a, c, g, or t
  misc_feature (396)..(396): n is a, c, g, or t
  misc_feature (411)..(411): n is a, c, g, or t
  misc_feature (427)..(427): n is a, c, g, or t
  misc_feature (456)..(456): n is a, c, g, or t
  misc_feature (466)..(466): n is a, c, g, or t
  misc_feature (482)..(482): n is a, c, g, or t
  misc_feature (500)..(500): n is a, c, g, or t
  misc_feature (509)..(509): n is a, c, g, or t
  misc_feature (527)..(527): n is a, c, g, or t
  misc_feature (533)..(533): n is a, c, g, or t
  misc_feature (593)..(593): n is a, c, g, or t
aagtgttatnaagtgaaatgaaaaaataagtaaaaagtgaggaaaaaataaataatgaaaaggtatanntgnggaaactgttanaatgataaatnggaanaggtaatgaanttngaatgtaagaataaagggaaatcttntatnttcagaagtaatctanatggaaggttaaataatctaccccagangtaaggtaagatggnantaattggngtagaggtatgggatgtgggaaggtggaggtgaagggggtgggatatgatatnggacaaagggtatatatcagncangttatntgttaggggctcccatacactgttggntcnagaaagggctgggctttccttcctgagctgggggatcggggganagggtntgggcngtcaggggccaaancgcagcagggccggnagcaggctcattttcngcccggtacccatcagggtgatgctttcncgcagcccgntatctgccgcacttanattgcacatatagctctngcagcagcngatgcccatggaagccanaacaanattgacgccttctgggtatggggcaggtcggggaacaggttttgctcaggctgttgccanatgttacgaga

SEQ ID NO: 587085 - DNA, 124 bp, Homo sapiens
ggcgaggaatagttttttttattagtatgtaccacgtgacatttttctgaactgctaaaaaataacttgatccagaaaaacacaacaaaatcagaaggcactgatgcagggcgggtaaatgcca

SEQ ID NO: 587086 - DNA, 312 bp, Homo sapiens
  misc_feature (52)..(52): n is a, c, g, or t
aactattattttagggcatctgggcttcattatgaattgttttgaagccggncgtggcgggtcatgcctttagggctaggactttgcgaggctgaggcaggtggatcacctgaggtcaggagttcaagaacagcttggccaacatgacgaaaccccgtctctactaaaaatgcaaaaattagccaggcatggtggcgagtgcctgtaatcccagctacttgggaggctgagacaggagaattgcttgaacttgggaggcagaggttgcagtgagctgagatcatgccattgcactccagcctggcaacagag

SEQ ID NO: 587087 - DNA, 358 bp, Homo sapiens
atccataatcatctgtactcgggtgttggacgccgttggtatgcgcgtgtgctatcagcattctggtaggagtctctggcgtgatgaacttgctcctgtggatgtatagggagataagctgaaaagagcaatgatggatctgcagcatgggagcttatttcttcaagacacctaggattgtggcatagtcacgataattctagtcgtaccgccaagtctaagattagtgctcgtgtctctagtctggagtccgtcggcatacaaggggctgagtctgctcagtctggtgcagagaactgttattgtcttcaaattcatgattcctcagatcgtctagaacatgacctgtattgcatca

SEQ ID NO: 587088 - DNA, 316 bp, Homo sapiens
tctcctgcctccagctcctgcgtagctgggactacagcacgccgacacacaccccactaatttttgtatttttagtcgagacagggtttttgccgtgttggtcacggctgatctcaaacactgtactccagtgatttggcccctttcaggctccaaaagtgctgggattacagatgtgagccacctgtgcccagcttagtaattactttgtattggacttatattgaaatatgtagctggggtgtcctctagagatcataaagggcaggatacagaacccgaaactggacgggtagaaaactcggtcgcaaaaact

SEQ ID NO: 587089 - DNA, 424 bp, Homo sapiens
cagcgcggaggccgcacgagtgcctggagttactgtacaagatgtgaaccatcaggagttcgtcagagctctggcagccttcctcaaaaagtgcgggaagctgaaagtccccgcaagtggtgtggataccgtctaacgactggtcaacgcacaaacgagcttgttccctactgatagaagaacttgtgttactacgacgcgagactagctttccacaagctgcggcatcctgtacctaccggggtggcgcttgggagttaggatccattgaccaaagattctattgtggggacgtcctgagaaagcggcgtcattgcccagggcacttcagccgaaggctccaacgagtgtggtcccgccgtgtgtcctccaaggccctggaggggtctgaaatagtggttggttacacatccggaccatgatg

SEQ ID NO: 587090 - DNA, 126 bp, Homo sapiens
  misc_feature (67)..(67): n is a, c, g, or t
gggtgctctagacgatcccgtgtcatcccccttcgtccacaacacggctaggcaggtgtgctcaggnggtctgaggtttcacggatgttaatgtatgtcagaaaagagtctctcctcagagttcac

SEQ ID NO: 587091 - DNA, 296 bp, Homo sapiens
  misc_feature (67)..(67): n is a, c, g, or t
  misc_feature (135)..(135): n is a, c, g, or t
  misc_feature (192)..(192): n is a, c, g, or t
  misc_feature (231)..(231): n is a, c, g, or t
  misc_feature (251)..(251): n is a, c, g, or t
cccccatctttttttgacagtgttgctctgttactcaggctagagtgtagtggcacaatcatagctngctgcatcattgaacgcctgggctctagtgatcctcctgcctcagcctcctgattagctgggactatngacacacatgcactaccatgcccagctaattttatttttttgtggagacagggtctngccaaattgcccaggctggtctaatgaactcctggcctnaagcaatcatcccacctcancctcccgtgctggttacaggcattagcccattgcacctgcccctc

SEQ ID NO: 587092 - DNA, 248 bp, Homo sapiens
ggtgtaccgtgactgcgagctaaagtcactcaggaaacacaaactcagcatgtttctcagtctccccttagacactcttctcctccttcacatgaggtcctgtcaccatagcctgcagagaactttctggccaggctgtgctccaggagcccagccccacagctccctcctatggccacctggacctctgtccctgagtcaggcttgaagcagcaaagtcatgatgtggaaattgacaatatctgggg

SEQ ID NO: 587093 - DNA, 168 bp, Homo sapiens
tctgatccttacattgtctcttggccttgctctaacgtggttgcttcagctgtgattttccggttctgtgatatgaatcgctctctgtgcagcagagagggcggtacacctggcagtgccgctgcgagggatctggcttctgttaagaacacttactgtcggggttag

SEQ ID NO: 587094 - DNA, 278 bp, Homo sapiens
tcgtccaggtccgctcctggtgtgactgaagcacaaccacatccgtataattacgccttggaccagagctctctgtaagcctatttgaagcacaagaaaaataaacagccatctttggtttgcctggtatttagctgagataaagataagatatggctgcaggctttgacttgttcctttcaagaaatgtcacaaggcctttaaagttgcccagagaatctttcggctttttaattgatttactgacttggggccatggggtctgagtggacgactca

SEQ ID NO: 587095 - DNA, 204 bp, Homo sapiens
caggaaccacagcagccaagtcctatactatgcccgcccctgctgcagcagcagccatttttggctcagccctgctgcagtcccagatgaaagccaggacggcaaggacaagatggcaaaggacttttaaaatggaaactcttaacaaaaataacaatgaagcaagcatcataaaaaatgttgcaataatgagggggtttgtgg

SEQ ID NO: 587096 - DNA, 136 bp, Homo sapiens
ctcagacatgaaaacattggagaatcttatcgagactatgacctgatccatacagatatcgtattgcttagatatgcttattgatttcatccaattttgtgagggtgtgcgtgtgtgtagcgcactgtgtgtgtgc

SEQ ID NO: 587097 - DNA, 391 bp, Homo sapiens
  misc_feature (190)..(190): n is a, c, g, or t
  misc_feature (256)..(256): n is a, c, g, or t
  misc_feature (259)..(259): n is a, c, g, or t
acccacgaaagatgccccacacattcccattaaaggcagaaactaacccagggccagctattattcaacagtggcccggcacttctaacccctggcaccagccagatgagggacattagggagaattattattggcattatttggagaccataaaactggctacctgtaaaacctaagaatcaactgggnaaaaaaaaaaaaaaaaaaaaaaaaaaaaaaaaaaaaaaaaaaaaaaaaaaaaaaaaaaaaaaaaanaanaaaaaaaaaaaaaaaaaaaaaaaaaaaaaaaagggggggggggccggggcttttttctgttaacctctaattggggggggggggcttttttctgggggatcctttaaagtaacccggcgggattccaacttg

SEQ ID NO: 587098 - DNA, 1002 bp, Homo sapiens
ggttggtcgcttccctgcgccaaagtgagcagtagccgacatgtcaggctgggagtcaatattacaggagaaccgagggcgagtgaacgaacgcagaggaagaacaagaagagaagcttgaagcaagtggatgactatagaatattcaggaagagatagttgatttatctggttgatgcctccaaggctatgtttgaatctcagagtgaagatgcagttgagaccttgttgacgatgagcatccagtgtatgcacaagtgtgtagcatcagtaagatcgataagcagtgatcgagatctcttggctgtggtgtgctatggtcaccgagaaagacacagaatttcagtgaatggttccaaaatattgacgtcttacaggagctgtgataatccacggtgcggaaacgaattctagagcttgaccgaagtttcaaaggtggcagcagggacgataaaagactgtttccaagacatgatgggcgcacggatcttgactacatcgactctagtgaaagtgatgtgggtcctgtgccgaggcctcttaagtgatgtccaattcaagatgagtcataacgaggatcatgcgttgttcaccaattgatacgacaagcccctatggcaagtgatctgggtcaaagccacgtcgggtcaggacatgagcggtgatcatccgagatactaggcatcttacttgagtggatgcatcctgaagaaagctggggggcttgacatatcctgttctagcgagatttcatcaggcatagcagaggatgaggactccgggttcacttgaggaatccagtagctagagactgtggaagttcggccaggagacaggagggggatcagcggtaagtgagttaacggggatatggacccggggcttaagggcgaagttcacccaaaagctttgggaaatgacggaacgacggcttaaaaagggggttgcgaccagtcatgggccttcaaggagacacgggctggcttcgtgaaacgccccgtg

SEQ ID NO: 587099 - DNA, 120 bp, Homo sapiens
tggcacacagcgatggtacacgtccagtggtttaagaataaaagcatcctggggcacaaggccaagtacttttcataggcgtgttcgtagatagaccagtggactgatgtcctcattatg

SEQ ID NO: 587100 - DNA, 178 bp, Homo sapiens
  misc_feature (25)..(25): n is a, c, g, or t
  misc_feature (63)..(63): n is a, c, g, or t
  misc_feature (83)..(83): n is a, c, g, or t
  misc_feature (95)..(95): n is a, c, g, or t
tcacccccccccccccccccccccngaagcccctcgaaccagtatgtgttttaggctttgctnggccaaatgggtctctgccngcgactactcangctctgccattgtggctgcagagtgaccatagaccttctgaaagtgaatgagtatgactgtgttccaataaaactttattgac

SEQ ID NO: 587101 - DNA, 128 bp, Homo sapiens
gcccggctatgggcatggtgactcatgtctatactccctgcactttgggaggcacggtgggaggactgcttgacctccagagttccagtccagccttgtgcaacatagctgaaaacccgtctctacag

SEQ ID NO: 587102 - DNA, 390 bp, Homo sapiens
  misc_feature (15)..(15): n is a, c, g, or t
  misc_feature (28)..(28): n is a, c, g, or t
  misc_feature (131)..(131): n is a, c, g, or t
  misc_feature (235)..(235): n is a, c, g, or t
  misc_feature (329)..(329): n is a, c, g, or t
  misc_feature (338)..(338): n is a, c, g, or t
  misc_feature (369)..(369): n is a, c, g, or t
  misc_feature (383)..(383): n is a, c, g, or t
gcttgaccaaaaaanaatcgggagcttntttacccaaatgggagagaggcctgaaatcagcaaaccctcgggatggcaccggttacactggctgggcaggaattgctgggctttacttacatctttatganggatttggggaccctgcctacctacagttagcacatggctatgttaaagcaaagtctgaactgcttaaccaagcgctccatcacctttctttgtggggatgcangccccctggcaagtggccgctgtgcttattatcacaaggatggaaccaatgagaagcaggcccgaaaaatgcattacacggggtaattcacctnaataaagantgatccctcatgctccaaaaggaaaagcttntatgggcgaaaaangctacat

SEQ ID NO: 587103 - DNA, 428 bp, Homo sapiens
  misc_feature (84)..(84): n is a, c, g, or t
  misc_feature (90)..(90): n is a, c, g, or t
  misc_feature (92)..(92): n is a, c, g, or t
  misc_feature (95)..(95): n is a, c, g, or t
  misc_feature (105)..(105): n is a, c, g, or t
  misc_feature (115)..(116): n is a, c, g, or t
  misc_feature (134)..(134): n is a, c, g, or t
  misc_feature (140)..(141): n is a, c, g, or t
  misc_feature (211)..(211): n is a, c, g, or t
  misc_feature (254)..(254): n is a, c, g, or t
  misc_feature (267)..(267): n is a, c, g, or t
  misc_feature (279)..(279): n is a, c, g, or t
  misc_feature (283)..(283): n is a, c, g, or t
  misc_feature (321)..(321): n is a, c, g, or t
  misc_feature (341)..(341): n is a, c, g, or t
  misc_feature (367)..(367): n is a, c, g, or t
  misc_feature (374)..(374): n is a, c, g, or t
  misc_feature (389)..(389): n is a, c, g, or t
gccaggagtggacatgtggccagaccggcgggtcagggttcagctgccaatacttttacgggacatatgggccttgagcagacntcaagncnggntcgaataggngcaggttggnnagcagggcacgtttatcngccccnncaagtgcagagaagccctgaaggtggaggagaagaaacaattccctcagtggggtttttcctccgatttntggggagagaagcccaacctcagttacatcatcgggaaggacncttgggtggagcnttggcccgaggnggangaatgccaagacgaagagaaccagaaacaatgccaggncctgggggccttccccgagngcatggttgtctttgggggccccaantggcccnccccccattcccccnctccagataaaggttcagttatatctcaaaaaaaaaaaa

SEQ ID NO: 587104 - DNA, 101 bp, Homo sapiens
  misc_feature (68)..(68): n is a, c, g, or t
catgttcagcatagttttacagtgctaacaggactgtatgttttcctaatcttgataaatctataatntgtatgcagcaataatctatatttctattcccc

SEQ ID NO: 587105 - DNA, 168 bp, Homo sapiens
accgataaagtcatcatagcaccatccggtgccctccgtaaagtcactataacaccacacggtcccctaccgtataagtcagtttagcacacacagtgccctccgttaagtccctgccctttgtacacaccgcccgtcgctactaccgattggacggtgcgttggccc

SEQ ID NO: 587106 - DNA, 1025 bp, Homo sapiens
  misc_feature (218)..(218): n is a, c, g, or t
gggacagagccctgggaggccgggccgggctcgggggccagcccgggggcccggggccatggatgtgcgccgatctgagaggtgaactgaacgttcgctgaggatgctgcagtcgccgcgtggctgtgacactcgaggtcgcgtcaaggcctggagctatgcattgatggcgggcgtgacaggctgtgctgatttggagggcctggaggcagtcgcgntgacggagcgaggacgggcagcgtcgactgcctgacgagcgaaccggggtggacccgggcgcatcaacgaggagatgcgcatggacaatatattaccgaggcagtaaccaattctacgatagccaagtcatcaaaccaaggaagagcgagtcaggctacgagacggagaccactggaagtggagcagcagcaggcctatcgtccagaaatgaagacggagatgaagcaaggaggcgacccagcagcttcctcccgcctgcaagcttctcaactcgagccagacaggcaggaattccatgagtcgaagagaggccttatgagagaaaaccggggacgggggtactttgagcaccgagaggatacggaggggccgctctcctcagcctcctgctgaagaggatgaggatgactttgatgatagccttgtggctattgacacctataactgcgacctccgacttcaaggtggcccgagatcggagtagtggctatgcgtcacgcgttgcgggctttgcgtacctgtggtcaggaggccgtgccaggtatggggtccgaggggccggggatgcgccgcgatgaagacccacggggggcagctccgggggaagaacctccgggccagagaagccgtgaaccccaaggtgggccggataccaggggcccgcgacccgtgtggacccggattggtgaagagaccctgtccaagggacagtaggcgaggggaacacagtcccacacccgggggggaaacaccgggaaacagggggaacacgcgaggacgggccgaacactaaatgggaaaagacc

SEQ ID NO: 587107 - DNA, 349 bp, Homo sapiens
aggctgtacacttcttatcgtccattagaaaagcattcattccttcaataacttttcctttacattcacaatgtaggctaactggtgcaagagacctaccttcagtctatcttggctcttcgactatgccttcctccctaagcttaatcatctcgagcttctgatttaaattgacaaacttgcaacttttcctctcacttgaacacttagagatcattgcatattaactggcctaatttaaatattgctgtgtctcagggaatatggagacccaagtagaggaagagagatgaagggaatgctagttggtgaaacagtcagaacaaacacaacatgtattaagttcact

SEQ ID NO: 587108 - DNA, 858 bp, Homo sapiens
ccgttactccgaggagataccagtacggtagaggagaagtcgaggcttagagggaactgggaggccactatgctgtctgcaatcgaagttgagggtgcgaaaaatgcagagctaataaaacttttaacttggagaagcaaaaccatactccaagcaaagcatcatcaacatcaccaccagcagcagcaccaccagcagcaacagcagcagccgccaccaccgccaatacctgcaaatgggcaacaggccagcagccaaaatgaaggcttgactattgacctgaagaattttagaaaaccaggagagaagaccttcaaccaacgaagccgtctcttgtgggaaatcttcctcccgacatcactgaggcaagcaaatgcaggaaactatttgagcaacatcatggcaaaggcaggcgcaagtcttcattcataaggcatcacaaggcatttggactttatccagcttggcaaacccgataccctagacggagatagccaaagtggagctgcgacactatgccaactccgtggcaaaaggcagactgcgtgtgcgctttgcctgccatagtgcatcccttacaagtaacgaaacccattccatcagtatgtgtaccaacgaactgctggaagaagccttaactggagtaggacaggtagacaagggcctggaagtccacaagacggcatcgatcagaggcgaaaggaccctcaaggaaacagggcctaggacgaagtacccagggacagccagctggcccggaaagcacgggacagatgaagtgaaaggcacctcaagggtaaacacaaataccacggacccgggaccggggaaccacaaggccaagaagataagggaaca

SEQ ID NO: 587109 - DNA, 1072 bp, Homo sapiens
gcaaccgacgaccctggttgcggcctcatactcagcaccatccgcctgcggccgacgccaggtgctcatgtgagaaagtgctaagagcacgctgagccccccggaggctagccccgggaccccagccgctgcccagggcccgcaggaggctggcgcagcgtgacctggacagggagactccagacacagccgtgagtgagccgagagaacgtgtctgagcccacaggaattgcggcacaaccaggccaggagggagcaacgagtggcatgattggcgcagatggagggacatgggacaccgtgaccgaatgcaggtcccagaggaaatccctggtcataaaggaatcatccacttaccagggagcggcaccaagaggacacagggtgacagacgggtgggattcaaggtattcacgcacatacgaacgacagctaggcacacgactcctctgtaggcagacaccattatcagatcgcaccaggatagtgaacgcccgcaagggaacgaacatagcagacagaggaacgacccgagacggttgacttggaaacctgaagacagttcccgacggggagaagtcgtggtccgttttaacctttgtgcagagcggagcccatgcgaggggccagtacgcaatcgagaccggagtaggtatggtgtgaagctttggaaacgcatggcggcattggtgtaggtcgtggaccgggtgcgcagcggtgtgaagcttggacacggcagaggacacattaaagagagatcaccgtgcgggtttgaagagtcgcggccatgcacggattgattgggcggtgtagaccatgcatgtaaacacaccggaaggccccctgtagtggatacgccgtgggagcaccgaagacattgtgatgagctgctgaaagcacattaaacaggggggataacaccttgtcagtggtggagatcatgctcccaaccacggggcggccccttgtagactactgcagtgagagcccatgaactagtacgtaggggatggcatggaacagacatgatactttcgactgagtacaggatacgggggcttgcaggcgaact

SEQ ID NO: 587110 - DNA, 415 bp, Homo sapiens
  misc_feature (6)..(6): n is a, c, g, or t
  misc_feature (18)..(18): n is a, c, g, or t
  misc_feature (205)..(205): n is a, c, g, or t
aagtanctttagaagggncctaaattgtaaaaataaattttttaaaaagaacaaaagaaataacgggtttccccccccccatagagggaaaggccccatagaaatgaaattttactataaaaatgcaacaactggcccaggcgcaatggctcattcctgaaatccccagcactttgggaacccgaggcaggtggatcacttgagncccaggagtttgagacaaccctggccaacatggcgaaaccccgtctctactgaaaataaaaaaaattagctgggcatggtggtgcttgcctgtactcccagctactggagaggcagtggtaccggaatcacttgaacctgggaggcagaggttgcagtgagccgagattgttccactgcactccagcctgtgcagcaaagtaagagtctg

SEQ ID NO: 587111 - DNA, 369 bp, Homo sapiens
ggtgatgctgatggtgatctagaggatcccggtgcttatcgatgcacactgtgccattggtggcatcgtttggtttattggggagttggctaagggcagtattttgctgtcaagactattcaagaaggcattattggagattccggttcattctgggtgtgtctctaacagatacagtatgtatacattggtataattgtggttgttgaaagtccagcttttgggaggtatatttgaaatgttttagggatgcttctaaggatcagtagtaatttttttagttcgcacctagagatgattacatggacctccccggagtgcttaccaaattaaaatgtgtccacgaagtggcatcgataaacaccgggt

SEQ ID NO: 587112 - DNA, 449 bp, Homo sapiens
gacttgccttgtttgtccagcaattcgatctgcgcaaccacggcctggagattgtccggctccaggcgcatggcttgctccagggcgttttgcgcatccggcagcagggcactgtggatgtacaggcgcgccagttgaatccagttttcggcggtttcgggctgggccttgattttcttcacgaactcatcgagcacttgctgcaacggcccgaagtacagccccagggtgtccggggacaagccgagcaaggcattggcagcggcaaaccgtacgctttgttcagggtcatccagccccaaaccagcaacagggtgcgctgaccggaaggcaccaggccggcgatgctgtggatcgcggcttcgcgcaccaacggcaagtcgctggtcaggtctttgtcggcaagcttcaaggcttgggggctggggtagttaggcagttcggcatgc

SEQ ID NO: 587113 - DNA, 299 bp, Homo sapiens
  misc_feature (162)..(163): n is a, c, g, or t
  misc_feature (214)..(215): n is a, c, g, or t
  misc_feature (239)..(239): n is a, c, g, or t
  misc_feature (268)..(268): n is a, c, g, or t
gcaggatctaccgtagtcgctctggtagggagacttggtgaatacagtctccttccagaggtcgggggtcaggtagctgtaggtcttagaaatggcatcaaaggtggccttggcgaaagttgcccagtggtggcatgtgcagccccgtggctgatggtgtanngcagtcatcgataccatgccatcatgatgcagcttcttagtgcacatggtnngcggagacgatgccatgtgccctnctggtgtgcatgggatgaggcgtaccatngcacagagccgcagctggcccctgtcacctt

SEQ ID NO: 587114 - DNA, 484 bp, Homo sapiens
ataaatgtatgagcatatcacatcacaggaggagctatacagtataagaagtacaaaaacacactagacgtcagaagaggtcaaatcctcctaaactctagtttatcttaacatctggctgctaactttggggaacaaggaagacattgccatctctagttggctgcagggagtattcactaggagaataaggtaaccatcttcatcacgtagcaggctgaaaacttcgagatataaggtgctgagtcgtaatatcagtaggtgaaggcttttggcattttcgccttatgctttgaggcagttcatctttttcatctttcaaatgatctggatcttgctctagttctactatattttccagttatctttttctgcaattctgagcagccactttattcttacccctccgacgtatatcccgaatgtatgcaagttgagattcattgaactggtctttggacctcatttcggttaagtccacaac

SEQ ID NO: 587115 - DNA, 360 bp, Homo sapiens
gaagtgatctaagatccataagcgtcagctcaggaggcatgtgggtcagtaagtacggcttctcttggtatcacaggaatctgatcgcaggtcaagttactggacctctcaaaatgggaataaggacattccattcatctgtgtttatataaggtcgagccagaatgtcaaaatagtaggaccaagtcaatgttggcaaccagcatcttgcttgtctgatttggtttgatcccaggtcctcggaaccaacaggtggaactttgatatcaaactcatacagctgtctcttggctattggcaaggaaaactgtcctgtgtgatagccattggtctgaggtatagaagatgtaagtgttgttg

SEQ ID NO: 587116 - DNA, 101 bp, Homo sapiens
cagaactggctattctagtccctatacagttttaaaggcaagtgctgtaagattatgtttgtgtggaacgtatttttgagaaagataattgagattctgca

SEQ ID NO: 587117 - DNA, 322 bp, Homo sapiens
taatttaacagtggaaatgcacagttaaaaatgagtattgactgggcacagtggctcacacctgtaatcccagcactttgaggggctgagtcgggcagatcacttgagtccaagagttcaagatcagcctgggcaacatggcaaaaccctgtttctagtaaaaatacaaaaattagccaggcgtggttgcatgagcctgtagtcccagctactcaggaggctgaggtggcagaataacctgagctcgggaggtcaaggctacagtgagctaagacggtgtcactgtactccagcctgagcaactggagagagaccctgtctc

SEQ ID NO: 587118 - DNA, 274 bp, Homo sapiens
ttgcgtgagccgagatcacaccactgcactccagcctgggcaacagagcaagactccctctaaacacaaacaaacaaacaaacaaaaaaaaaaccagatcttgactcaataacctaactctgaaaacttaagaaactagaaaagcaaactaaacccaaagctagcagaagaaaatacataacacttaacagcagcacaatgaatagagaatagaaaaacaatagagaagccaaaagtttgtttctttaaaaattttcaacaaaattggaccaca

SEQ ID NO: 587119 - DNA, 239 bp, Homo sapiens
gtgtctctgcctgtggacaagagtacgggaaacagagaactagattcactatcatctaactgacaaggtgccgctttcgagcaaggtaagacattgacacgtatggtccaggacgctgaaaagtacaaagctgaagatgataagcggagggccacgttgtcatccatgaattcgcttgcattcctatgccttcaacatgaaagctcactgtagaagatgatcaaacttcaaggctcatg

SEQ ID NO: 587120 - DNA, 337 bp, Homo sapiens
acagctgttctctaccagacaattgaataatctattaacatcttggaagaagaggaggttgactttatctattgtgcctgtcccatagttgtgcagatgtgatcctgccaacatagttcatgactttcgcaagatacttacagcctatgtagatcttgaactggattagtgctatctgatccctctaaacacttccatttgtttatgccagctcagaaatcgactggtagctttctgttattaacatcatggcatggatcatatttgcctcattcctattttattcattaccactctgtttttactgatcgccttgaatacattgatcacctggctt

SEQ ID NO: 587121 - DNA, 813 bp, Homo sapiens
ttcacactccggatcagatgttccgtgtgccgtgtgtagctgagaggtctgctctccgagctcgctcgtcgctgtgacctcttggcttgccattgagactcctctgatcctggggtcttcgggatccccaggtctcagtgaggactgaaccaagacttacccgtaagttgccgcggggcctttccgattcccctaggccattgcccaagttcttggccaggctgatgggactcagcgaggatgtctctgcaccttgtagattcagaaagctgaatggagtacgagggacatgctggaccaatggagatctcccagttcgtatctgaaggtctacagtgtggatgaactgagtgaccacatacccagcttcacgatgtacaatgacttcaaggatgtggggcagatgctgatgggcaaactagctgtgatccgaggtgtcaccacccaaagagttgtatccagagtttgggctggacatgaatgactgagcaggctcatcgccctttgtgcacagctcccaggacagaagggtgtggcccatgataaacatgagagcccaacagcatacctactgagtttccagcgtagacgatgccagaagcactttgctagagaggccaagcccaatcaggaggaggctagagaacaggcgggcatgcaggacaggggtgttcccagctcctaggttcctgaaatgtcgcagtgatacttgtgtaggggtaatgtacttcatttgcatagggttctcggccgggagctaaaccaaaactgggggttttttcgtgcccaccgtttcatgcctggggtggcggc

SEQ ID NO: 587122 - DNA, 135 bp, Homo sapiens
cacgagggggttcacaatgatggacaccttggtcacgaactcctgatatcatgggatacacccacatcggactcccaggatgcagggactgcacgagtagggcaatgtcaccaagctcgttgttcttttttccgc

SEQ ID NO: 587123 - DNA, 331 bp, Homo sapiens
ataagcttatagtgttgaagctgggcatggtgttcttgcctgtaaacctggcactttgggaggccaaggcaggcagatcgcttgggcccaggagttggagaccagcccgggcaacccggcgagatcccgtctctacaaaacacaaaaatcagctgggtgtgatggtgtgcacctgtagttccagctactcgggagaccaaggcgggcagatggcttgagcccaggaggtcaaggctgcagtgagcagtgatcatgccactgcactccagcatgggcaacagagcaagaccctgtctcaaaaaaaaaaagaagggaggggcagggcaatgtg

SEQ ID NO: 587124 - DNA, 311 bp, Homo sapiens
cccccccccccccccccccctttttgggggggcccctgggtaaaaaaaaaaaaaagggccccccaaaaaagggttttttcccgggggcccccccccccgttttcctgggttaaaattttattggtttttgaaagggggttttttttttaaacccaaattgggcccaaacccaaaacttttttccaaaccctttgggggcctttcccaaaggtcccccccctttgggggttttgggggcccctttttttccccaaaagggaggccggtgtgtttctttttttttttaatttttaattttttttggggggtga

SEQ ID NO: 587125 - DNA, 248 bp, Homo sapiens
gaaaagggctttattttcaaaaattaacttcaaataagggtataaatgcactgttgctttcctcaacatggctcacaaattctatcccagatctttctgaagatgaagagtttagttttaaaactgcactgccaacaagttcacttcatatataagcatgatacttactctttcgaggtgcatatatttatatacaatgtagagctctgtatactaggattttcaggtctcacagtatcaagtataca

SEQ ID NO: 587126 - DNA, 178 bp, Homo sapiens
gaaacccgctgccgaccttactaccagacaaccttaggccaaaccatttacccaaataaaggtatagggcgatagaaattgaaacctcggcgaatagatatagtaccgcaaggaaagatgaaaaattataaccatgcataatatagcacggactaacccctataccttctgacataat

SEQ ID NO: 587127 - DNA, 239 bp, Homo sapiens
gaattcccccccccccccccccccccaaatttagattgcttgtgattccgaactccagttggggtttgggggttgggggaggggaaattaaagttgattgggaggtgggtttctgaattttcagagaggaaatggttgggaatttgtgtaaatctggggaaaaaaaaaatcctcaaaccttttaacttttttaactatggaaatttccaattggacccaaaaggatggtggaataatga

SEQ ID NO: 587128 - DNA, 350 bp, Homo sapiens
cctatggagtatacggtgggaggagcaacgccgtttctctttggagctgagaaaagtcaatctctcatttacctatgacaacaacagttcagttcctcatgcaaatacatagacaacccaaactgagattcatttagggagaaaaagcaatagagaagaccctttaggatgcatctcttgaactagaattaggatccttaaatcacagccccctagaagggagaaaaaaaaaaaacacagccaaaaccattcccgtgttaaacggtgctcagccaccccttcttgtgtaggttctcgatctgccattacacacgccaaggtcaattcctctcacagtggcgctcgtaaag

SEQ ID NO: 587129 - DNA, 101 bp, Homo sapiens
ttgctgctcaggattcagaacacctgacatatgacccttgaccactaaataccctccagaaagaagctgataacagagcggataccgacaattatggccag

SEQ ID NO: 587130 - DNA, 1548 bp, Homo sapiens
  misc_feature (155)..(155): n is a, c, g, or t
  misc_feature (913)..(913): n is a, c, g, or t
  misc_feature (1160)..(1160): n is a, c, g, or t
  misc_feature (1168)..(1168): n is a, c, g, or t
  misc_feature (1238)..(1238): n is a, c, g, or t
acgacggtccggttgcatcactgcatggcgcccactagtaggaacccgtcggggaaccaactacgcagtggcctcgttgctccaacaggtggtagacatttcacgcggtgcgaccacacgatgggactgcggtgcagcgaagcctctcggggggngtttacaccagcacggtgaacccccgtggtgtggcaccaagggggtctttccgactgttgtcacgcgcgcacaattgtggtgtgacccgcgtgcgacaccctgacaagggggccacaacacagcagcacgggggtgggaaaaaagccacaccccgttgggggcacccaccggtctcgggtcggggcacacagggggctttttcaaacgggaacacaccctgttgcgagacccctcgaaaaggatggggcaacccgtgcctctcggcacaatcaatacaaacaagaggggcaatttttgggtcgcccccgtagcacaaaaatggccgaaacagtgtttgttggccatttaagaaggcgccctgtctagacccccatgcggggcttggtgtttctctctggggaggttgcccccacccctcgtggaagggaaaaaattccccattgggggggtggccacgaccacggcccggtatatgcctcctaattataagggcaaactcgcgcggggaacaccaagccttttaaaacgctttttctcccgaaaagattctttcggggtatacacacggggcccccccacaccctaccgggaggggagaccctcgtgaatacactcggcaaacgctggaaacacacgtgggcccacataatccgcggcaacagactctcgcttttgtctcgccacaaaaaagagcactttctgtagagaaaaacttggggcacagcgcgctcttctctgccacagggggccaaacagnctgtgagacaaatcctctcgcgactcacacccacaggagagagatttataccccacagcccctcctgagagttgagaggagagtggagaggagagagaggagaagtggaaggagagaatagcgagaagggggatgagagacacacagaacgctggttcacacacacttgccccacacgctgaaggtgtctcaacgctgtggagtgttttttgcgtgtgtttccacgcctcttcctcccgacaccccnacactcgngctctctcttctctaaattatagagaagtggagaccacgtgtgtcacacctctctcgtggtgtcctcttnttgagagaacactgtcacgcacgttaagggtgccactcttccacaagagtttgtgcacatgtgccgcttatagtggagacgttcacgggccctcgtgaaacctcgtggttcctctgtctggcgcaagttgctcaacaattcacccacaagtttgttttcactgagtcctgagtggcccaaggaacacccgctgtgggagtttttttttcccccaaggagattttcaacacacaccggagaaggaagaggtaatttcttaagagagatcatcattttatggtgccttgaaataaaaatacttttaccttga

SEQ ID NO: 587131 - DNA, 263 bp, Homo sapiens
aacgggtgatgcggttgactgcagagaggaacgaggaccagagccaataggaccagtgatcagcagggtccggggtctcatgagatctgccattagccgtcacatggcgtcagggattacatagcgtcagagtcatgcagaacataggcttgatgagtagtagtggtgaagtccaggataactataatcgaggagtgaagggggtcgagtgatcacataagtttgcaggggatctcatgtagttcagggtcatatggtggtca

SEQ ID NO: 587132 - DNA, 1042 bp, Homo sapiens
ttggtgtgacgctgttgcatattattttctcttgttctttttttctttgtatcggctcttctatgtgctacttgtttctgttattgccgctttgcttccactgtgttttgggtctaatttactcttctctccgccttttctaaggagtctgcgtttctttgatttttatatttctctccctgcaacccgggtcttaggccccctgttggttgtttgtgagatatgtgtgttatgggagacgctcttgtgtgggtgaagttatactgcctttttctccaagtctttctgttatttgtttcacgttgcgcttggttttaaaatgtgtgcccctgagtatttttatgaacctcatgctagttttaaagggtataaattggttcaaatttatgagtccgatatatagtgataatgttaacaaggttgtaattgctcccgagtttaagggtatttttatctctgtgctttctttttcctggtgtttattaatatattgtgtataaacctcctagctactgatatctttattatagcccttagacttaattttaagttctttaaaattagcgtgtataacttggattaaggaagaccctgggtactgtgtactcgtgatagctattgactttagtagcccattatccatttttccctgtataaattcccactttttattgctgcaccataaattttttaatgtctttatattgtgatagctatgtcttttattgccagatttattggatgtttatgacacgattttactctaaggcttgtggtttttataacataatatatttagttgatagtttacctcataagatgggagtagattttcatctgcctgcccatgggataaatttccgtcttagctaaaaatggaaagttgaactggataaattctttgggtaccccttagacctctgattttaagtccaaagccaatggggtttaattaaatgagactacttccctttataaatatattttcatccttttgaaagtaagtgaaatgttaataaacttatttttttttaaaatgcca

SEQ ID NO: 587133 - DNA, 281 bp, Homo sapiens
tggaacctatttattatataaagaggttgccctataaatttacataaaaaaggccggttgggtcttttgttgtaaaaaaccagtgattttttcataagggtcttttaccattggaaaaaatgggcagcccgccgttttattttatttttgtaaggtttttaaaacatgggaaagcaaagaaaacccagcctgcccttttaaatgacgggtttgccccctttgttgggaaggactggatcctgggctggtagcattttccataaatctctctgtgaaagtga

SEQ ID NO: 587134 - DNA, 351 bp, Homo sapiens
  misc_feature (14)..(14): n is a, c, g, or t
  misc_feature (346)..(347): n is a, c, g, or t
atgtagactttagnaaaacaatatgtcaagtttcctataaaaaattctgggcctgggtgcaagttgtcacgccctgtaatccccagcactttgggaggccgaggtgggtggattacctgaggttaggagttcgagacctgccctggcccaacatggtgaaaccccatctctacttaaatacaaaaattaggtgggcgtggtggcgggcacatgtaatcccagctactcgggaggctgaggcaggagaatcgcttgaacccaggaggcggaaggtgaggtggcagtgagccgagattggccattgcactccagcctgggcaacaagagcgaaaccccatcttaaatnntctt

SEQ ID NO: 587135 - DNA, 355 bp, Homo sapiens
  misc_feature (97)..(97): n is a, c, g, or t
atctagaggatcccggcgagtgcatggctcatacctataatcccagcagttcatgaggctgaggcaggcaaattgcttgagcccaggagttcgagancagcctgagcaacatggggaaacacttggcttttacaaaaaatacaaaaattagcctggcgtggtggcgggtgcctgtaatcccagctacttgggaggctgaggcatgagaattgcttgaataccaagatcgtgccactgcactccagcctgggtgccagagcaagacttcgtctcaaaaaaaaaggaaagaaatggccaaacccattctaacctttgggcaactggcaacccttgatcactctatcagccaattgca

SEQ ID NO: 587136 - DNA, 875 bp, Homo sapiens
gccttacgtgcccgagctccgtctcggaggcgggggcagtctgcagtggtgacgaggaaatggtagacctcagtcttgcggatgcataaacaagaaccatgtccagacattgagggcgagatacacgcgggacttcattgccagagctagaggcagaggcctttgatgatgttgtgggagaacactgttggaacaaatagactatattcctctcctggatgtggatgagaaaaccgggaactcagagtcaacgaagaccccgtgctcagaaactagccagattgaagatactccatcttctaaaccaatactcctagccaatggtggtcatggcacgtatgaagggagcgatacctacagggtctccagctgaattccttgaagagagaatgggctaccaggaatacccaaatagtcagaactgccagaagatacccagagttggtgaccagactgagcaagtggtcgatcctatccagactgtccctttaggatgtaccacttgatgatgactgggggattagtctttccctccagtgcgacaggtgatacgttcaatatttgcagggacaagatgatcccttgaagagacgagggacggatgtctcccctgaagcacaggtggtgggaactcagcgcgtggctggggaggcctgaggagtctcaaggatcggagttctagtttccccagaggtcgtggagcaccttcctgggcaagggacttcctttagagactagccacgagaacaagggatcagaggaggcagagcccagcttggacaacgggtgtggacacggtggccgccagaaggatggctccccggggtcagaaaacgggtggcgcagattgaccaaaaggcaggaggggacggaca

SEQ ID NO: 587137 - DNA, 927 bp, Homo sapiens
tgtatggcctcgatagtatgattgtcctctagtcacggattgctgatgttattgcaagaagtgtatctgagtattatatcaatcttgcgaattgttaatacgattcgttgtatgcaatacgtcaagtgagccagtctgccctctgttcggggaggctcttcccggtgacacgagtccccgatgagtggacgacatcaattactttgcacagcccacactgaaagcaggatccacagactgagggcccagggtatttcaccatactgctgatggaaaaacctgacgtccttgctggacctggtttcgcccatggttgaacatgctgggaccgtcgcgtatcattcctatgcctacgttgtgcattcgcgttgaacgtaattgacctgatcagggccccatggatttgtgaaactctgtggaatatggcctggtcaatgctgaagagggcatcccctgagacccacagtaggcaagctcagacgaaacatttgtgcccagaatatcctgtaactcttagcagaatccgtgagcataagtaaaatgcccggttgagcgtcatcacacaggtttcagagaggtaatgcgttggatgtacccaactgaatgtgagtgcttataaactcaccaagatctgccttatgatgagtcttcccattcgcttacgaaggcattataacaactcatggaatactgggtcgctctctacagcacgtctgtccatgacgacttcgctttttatgacccgttaaggtcacgcactccattcattgtgaggttcacctttggcatgacttcagttgtccttggaatgagcgcttgtcgaccggttctgacacccccctaattcgtttgcactcttcccgtcaaattcctataagtcttgctcttccaaaattttttttcaggcgtctgtccccctgaatggcc

SEQ ID NO: 587138 - DNA, 512 bp, Homo sapiens
gtcaagtaggtattttaattttatgcagtattgaagaaaaactatgattatattttcctatcagagtagcctttaattccaagttttggtggctttcataagaacagacaccctcaggcccagaaaaagtgacatgcatgcatacctctttagtaacttaccatgttgtccccgtgaagcagcaccagtcatgtcccagtgaccaaggagcacataggaggggacttggggagcgtgtgagcctcagtgtggccccttctcgtctcctgcagaattgatccttttgtttctcaggggagggagcatatctggcatgcattgaaatacttcttctatggaagtgccttttatatgataaattgagaagcacttattaattatctgaatatgatacactattgattgaaacataatctatgtattttaatatatagaattcaatgtatgtattccttactcttaaggaactaacaaaataaaatatcacaaacacggaagagataaaatataaa

SEQ ID NO: 587139 - DNA, 282 bp, Homo sapiens
atcgctttatcttcaatttttttctttaaaaggagtagttgtgtcagggggttaatgctttatgacaagaaaaaaaaaactgcggctagaaccaacttattcatcatcatcatcttcttcttcatcttcatcttcttcatcttcctcctccttcctcattcctcttcattcttccttcattctttccttccttctttcctttttcttttctcttgggcttttttcaggcctttgaccaacttcgcgctttttttgcttgcattcgagggcttttccttttag

SEQ ID NO: 587140 - DNA, 387 bp, Homo sapiens
gtgttggtggttatattaaaagtccttgagtattttgcttttcatgatcttgctcactgcaacttccgcctcccaggttcaggcgattttcctgcctcagcctcccaagtagctgcgactacaggcgtgtagccccacccctggctaatttttgtatttttagtaaaaatgaggtttccccatattggccaggctgttctcaactcctgacctcgtgatccgcccacctcagcctcctaaagtgctgggattacagctgtgagcccccctgcccggccacttttgtatgatttttaatgtatttgtaatttacctaacaaattgcctaatttgctatgttaatgtatttatgaattaaaataaatacggctgcatgtttgtggttca

SEQ ID NO: 587141 - DNA, 404 bp, Homo sapiens
cagaggtgccaggggtaacttagaagtaggagccttttattttcttatttatttatttatttatttatttattttttgagacagagtctcgccctgtcatccaggctggagtacagtggtgcaatctcagctcactgcaacctctgcccaccgggttcaagcaattctcctgtgtcagcctcccaggtagctgagattatgggtgcctgccaccacgcccagctcatttttgtagttttagtagagatggggttttgccatgttggccaggctggtctcgaactcctgacctcaggtgatctgcccgcctcggcctcccaaagtgctgggattacaggcgtgagccaccgcacctggccagtaggagccttttctacgataaagctaaaataacatttttaaaa

SEQ ID NO: 587142 - DNA, 139 bp, Homo sapiens
ctatacctagtgcagcgtacagaatgctatcgttatgacatttacgtatcataacataatgtagctcataaagcttatataaaaattcctggtcacgtgtctgtgaatctttaccatagagtgacattgatgtaccttc

SEQ ID NO: 587143 - DNA, 266 bp, Homo sapiens
ggtccccttttttaaaagtgggggaatattgggtttaagccccccggaaaaattctgctttttgaaaatcccaacttaaaccccccccccttttggtcctaggacagttaaaaacccgggtttttcccccctttaaatttttgcctttattaaaaccaaaattttaaaagccggttaaaaggggggggaaatttttttctaaaaaatttttaaataaaggcccaacttgtttggggaaaattttgggaacaaaaccctttttccta

SEQ ID NO: 587144 - DNA, 124 bp, Homo sapiens
gatctttgagcgacaggaccaccaacaatacatgcagatattgtgtgtgtggacagaaggtactttagacattcagttttgctatatagaaacagaatgaataaatgaactatattattctata

SEQ ID NO: 587145 - DNA, 172 bp, Homo sapiens
gagtctagaaggatcccccttgcggatctcagtaagtgcatgtggactataggtccaaggtctccagagtggtgcaagctggcgtctgtcaatgtcctactgagacagcacagaccaacctagactagcaaacatttgtgttattagtctagaacaagtctatactatatag

SEQ ID NO: 587146 - DNA, 228 bp, Homo sapiens
ggggggctgcacctgcctgcctcttgcctaaggcgcgatttgaatctctttctctcccttcagaatcttatctggcttggatcttaaagaatcactaccaagacgagactcatgatgagcagtgttggacaatggactggttgagcccatccctattataaaaatgtctcaagcaaccgggagctgtggttgacttctctcctacaagctttcccagaaaggatacag

SEQ ID NO: 587147 - DNA, 1814 bp, Homo sapiens
gccgggaaagggatacgtgcttaatcctggtgcagggggcgagcatggccgctccgcgagtattcccactttcctgtgcggtgcagcagtatgcctgggggaagatgggttccaacagcgaagtggcgcggctgttggccagcagtgatccactggcccagatcgcagaggacaagccttatgcagagttgtggatggggactcacccccgaggggatgccaagatccttgacaaccgcatctcacagaagaccctaagccagtggattgctgagaaccaggacagcttgggctcaaaggtcaaggacacctttaatggcaacctgcccttcctcttcaaagtgctctcagttgaaacacccctgtccatccaggcacaccctaacaaggagctggcagagaagctgcacctccaggctccgcagcactaccccgatgccaaccacaagccagagatggccattgccctcacccccttccagggcttgtgtggcttccggccagttgaggagattgtaacctttctaaagaaggtgcctgagtttcagttcctgattggagatgaggcagcaacacacctgaagcagaccatgagccatgactcccaggctgtggcctcctctctgcagagctgtttctcccacctgatgaagagtgagaagaaggtggtggtggaacagctcaacctgttggtgaagcggatctcccagcaagcggctgccggaaacaacatggaggacatctttggggagcttttgctacagctgcaccagcagtacccaggtgatatcggctgctttgccatctacttcctgaacctgcttaccctgaagcctggggaggccatgtttctggaggccaacgtaccccatgcctacctgaaaggagactgcgtggagtgcatggcgtgttcagacaacacagttcgtgctggcctgacacccaagttcattgatgtgccaaccctgtgtgaaatgctcagctatacccctagctccagcaaggacaggctctttctcccaacacggagtcaggaagacccctacctctcaatctatgacccccctgtaccagacttcaccattatgaagacggaggtccctggctctgtcactgaatacaaggtcttggcactggactctgccagcatcctcctgatggtacaggggacagtaatagccagcacacccacaacccagacaccaatccctctgcaacgtggtggcgtgctcttcattggggccaatgagagtgtctcactgaagcttactgagccgaaggacctgctgatattccgtgcctgctgtctgctgtaaaggctgcagcctccccagctctcctctgccagccaccctaaattccagccaacctcacctcctcgggcccagctcaagcccccttccttgctctggaccccttaggtataccctggaagagctggggtgggggaggagggagcgtgaaggtagtgactcctgaacacacccaggtggaaccatctttggggaggagaggcccgtgtgaggggtctgatactccctttgtcttccctctctactcctcgctacacctgagccaggctcttgccaactctgttccagcctatggctttaggctagctgttaaatatgtgacccagcattagctcagcatctgtcagagcaagagaccaggtaatttctaagaacagggttctagcgatgggactgcccatttcctcagctgcagaggaggaaagggaaagggtaggcctgtagactaacgctgtttacacccttgttctgtcaaagcaattaaagatcacttgtgttgag

SEQ ID NO: 587148 - DNA, 1177 bp, Homo sapiens
  misc_feature (656)..(656): n is a, c, g, or t
ggccaatgtggggctatgaacagcactgagtatccccctaagtgaccttggggtgctctgtgaccctcagcggctgccggaaacaacatggaggacatctttggggagcttttgctacagctgcaccagcagtacccaggtgatatcggctgctttgccatctacttcctgaacctgcttaccctgaagcctggggaggccatgtttctggaggccaacgtaccccatgcctacctgaaaggaggtgagccacatttcagcagtgagccccactgccatccctgctgggccctgtttccctatctggacaaaggaaggagaagggtggtcaaggagacccccaaggaccttgcagctctgacctctgagggttcctgggctcagcaagcaacagctggtagggatgatgaatgcatttagcattgaacacgccttgaatcctgacaccaaccctgtgatgccatgctactctgattttaagtcctgccagtcagtgtgggaaccacaatttgaacgcaggctatattggatcaaagctgttgttctgtcacagcctttgtatgtctgtcctacctaccagggatttttacactaaaatatgcatgttgccatggaaggatgccaaaaaaaaaaaaaaaaaaaaaaaaacaaaaaanaaaaaaaacaaaaaaaaaaaaacaacaacacaacaaacaacaaccaaacacggggggggggagcacaacgaaaaatacccaggggggggacgccaagatacgacccacacagcttcttgaacacaaagaggcccacataggaggagagcccaataaaacccacaagagcaaagcgcggcggccgagaatataaaaaagccagcggatagtacggggaaaaacccgtgaccaacaggggataccctatgagggagaggcgagccacccactccgaggggggggggggagcaaaccaactcagcgggggaccccaacacaccaaccaccgcagcagaatgataataaaacagccgaccccaggagcggggacactaaaacaacaacataacgggcagaggaacaccaagaggcgggcgagcaccacacacacggcagaaaaaagcgcgaggacggcaggacaaaaaacaagtacggcgcaaccaaagaaacaaatactaggcaggaccacacatatattcacg

SEQ ID NO: 587149 - DNA, 1008 bp, Homo sapiens
  misc_feature (890)..(890): n is a, c, g, or t
  misc_feature (915)..(915): n is a, c, g, or t
aattcggcagacttgatattatatgagaattttaggaacaaggaagagctgaaaataacttacggtgttaacctgaccaagagaatggttaggttaacatgaacataaatgaacttaccagcaagtgtggagtttttctgaaagaacaatacgaatctgattttatcattacagggtggaagccacatgtgctgttattaagtggaaatgtctcgtgaacatgtggaaagtgatgactggaacttcagatgaaagtcaaagctggagataggagattcagaagtcaccccaccaaagaaggaatggttaaagctataagaactaatgagatcctatttatttgcttattcaatcaacatatgtagaactaaatgctaagaatgtaatgataaataagacagaaagggaccttgcccatatggtatttacaatctactgccagttcataatctcctaaaaaataatgtagaagaacaataacagaatcaaagaaatcttgaacgtctatatttaaggcgttgaatgtaccagaaaaggccttaaaggaggcagaaaaatagcaatgagacaagtttgcgaattctaaaaccaagacaggatttcagaggaagaaaacgcatgtaatatatgggcaaagcttcacacacagaggtgatgcatcctggtgaccaatattacaaggacgagagatgatgactgaagacaggctggaggacttggattgaggtcaacgggatgaggataatttcacccatggtgcgatggactgaacagcaggtgcgtcataattgggttaagctttgagaaaggggagactttagatgcctacactcattccggaatcgggcttcctaaccatgaaaaagcccaggatggccgggtatctgccngggtcaaccaagccattttttttancacgggtaataaggtaacccggattctttaagccccttggcttaggaaccccccaaggggaggccttatctcgagggcataggcacttttccg

SEQ ID NO: 587150 - DNA, 2105 bp, Homo sapiens
  misc_feature (1104)..(1104): n is a, c, g, or t
  misc_feature (1264)..(1264): n is a, c, g, or t
gccgggaaagggatacgtgcttaatcctggtgcagggggcgagcatggccgctccgcgagtattcccactttcctgtgcggtgcagcagtatgcctgggggaagatgggttccaacagcgaagtggcgcggctgttggccagcagtgatccactggcccagatcgcagaggacaagccttatgcagagttgtggatggggactcacccccgaggggatgccaagatccttgacaaccgcatctcacagaagaccctaagccagtggattgctgagaaccaggacagcttgggctcaaaggtcaaggacacctttaatggcaacctgcccttcctcttcaaagtgctctcagttgaaacacccctgtccatccaggcacaccctaacaaggagctggcagagaagctgcacctccaggctccgcagcactaccccgatgccaaccacaagccagagatggccattgccctcacccccttccagggcttgtgtggcttccggccagttgaggagattgtaacctttctaaagaaggtgcctgagtttcagttcctgattggagatgaggcagcaacacacctgaagcagaccatgagccatgactcccaggctgtggcctcctctctgcagagctgtttctcccacctgatgaagagtgagaagaaggtggtggtggaacagctcaacctgttggtgaagcggatctcccagcaagcggctgccggaaacaacatggaggacatctttggggagcttttgctacagctgcaccagcagtacccaggtgatatcggctgctttgccatctacttcctgaacctgcttaccctgaagcctggggaggccatgtttctggaggccaacgtaccccatgcctacctgaaaggagactgcgtggagtgcatggcgtgttcagacaacacagttcgtgctggcctgacacccaagttcattgatgtgccaaccctgtgtgaaatgctcagctatacccctagctccagcaaggacaggctctttctcccaacacggagtcaggaagacccctacctctcaatctatgacccccctgtaccagacttcaccattatgaagacggaggtgagtnaggggctatgatgggtgtccttcgtgtgccatgaaaatctctggcaagggtcacgatgtggaggacacctggggctgggtttcctgtcaagcccacttggcggagggtggccccagggctgcccattccttcctgtaccagggaccaggcctctatgctnactgagcctgggttgtgcgagaaggtggcagagctctccctcgtgccctggggactgtcctgggcccatgagctgatgagagcagagtctgagctgcactgccttatcatttcttcctgcccaggtccctggctctgtcactgaatacaaggtcttggcactggactctgccagcatcctcctgatggtacaggggacagtaatagccagcacacccacaacccagacaccaatccctctgcaacgtggtggcgtgctcttcattggggccaatgagagtgtctcactgaagcttactgagccgaaggacctgctgatattccgtgcctgctgtctgctgtaaaggctgcagcctccccagctctcctctgccagccaccctaaattccagccaacctcacctcctcgggcccagctcaagcccccttccttgctctggaccccttaggtataccctggaagagctggggtgggggaggagggagcgtgaaggtagtgactcctgaacacacccaggtggaaccatctttggggaggagaggcccgtgtgaggggtctgatactccctttgtcttccctctctactcctcgctacacctgagccaggctcttgccaactctgttccagcctatggctttaggctagctgttaaatatgtgacccagcattagctcagcatctgtcagagcaagagaccaggtaatttctaagaacagggttctagcgatgggactgcccatttcctcagctgcagaggaggaaagggaaagggtaggcctgtagactaacgctgtttacacccttgttctgtcaaagcaattaaagatcacttgtgttgag

SEQ ID NO: 587151 - DNA, 1605 bp, Homo sapiens
gccgggaaagggatacgtgcttaatcctggtgcagggggcgagcatggccgctccgcgagtattcccactttcctgtgcggtgcagcagtatgcctgggggaagatgggttccaacagcgaagtggcgcggctgttggccagcagtgatccactggcccagatcgcagaggacaagccttatgcagagttgtggatggggactcacccccgaggggatgccaagatccttgacaaccgcatctcacagaagaccctaagccagtggattgctgagaaccaggacagcttgggctcaaaggtcaaggacacctttaatggcaacctgcccttcctcttcaaagtgctctcagttgaaacacccctgtccatccaggcacaccctaacaaggagctggcagagaagctgcacctccaggctccgcagcactaccccgatgccaaccacaagccagagatggccattgccctcacccccttccagggcttgtgtggcttccggccagttgaggagattgtaacctttctaaagaaggtgcctgagtttcagttcctgattggagatgaggcagcaacacacctgaagcagaccatgagccatgactcccaggctgtggcctcctctctgcagagctgtttctcccacctgatgaagagtgagaagaaggtggtggtggaacagctcaacctgttggtgaagcggatctcccagcaagcggctgccggaaacaacatggaggacatctttggggagcttttgctacagctgcaccagcagtacccaggtgatatcggctgctttgccatctacttcctgaacctgcttaccctgaagcctggggaggccatgtttctggaggccaacgtaccccatgcctacctgaaaggaggtccctggctctgtcactgaatacaaggtcttggcactggactctgccagcatcctcctgatggtacaggggacagtaatagccagcacacccacaacccagacaccaatccctctgcaacgtggtggcgtgctcttcattggggccaatgagagtgtctcactgaagcttactgagccgaaggacctgctgatattccgtgcctgctgtctgctgtaaaggctgcagcctccccagctctcctctgccagccaccctaaattccagccaacctcacctcctcgggcccagctcaagcccccttccttgctctggaccccttaggtataccctggaagagctggggtgggggaggagggagcgtgaaggtagtgactcctgaacacacccaggtggaaccatctttggggaggagaggcccgtgtgaggggtctgatactccctttgtcttccctctctactcctcgctacacctgagccaggctcttgccaactctgttccagcctatggctttaggctagctgttaaatatgtgacccagcattagctcagcatctgtcagagcaagagaccaggtaatttctaagaacagggttctagcgatgggactgcccatttcctcagctgcagaggaggaaagggaaagggtaggcctgtagactaacgctgtttacacccttgttctgtcaaagcaattaaagatcacttgtgttgag

SEQ ID NO: 587152 - DNA, 2356 bp, Homo sapiens
  misc_feature (1835)..(1835): n is a, c, g, or t
gccgggaaagggatacgtgcttaatcctggtgcagggggcgagcatggccgctccgcgagtattcccactttcctgtgcggtgcagcagtatgcctgggggaagatgggttccaacagcgaagtggcgcggctgttggccagcagtgatccactggcccagatcgcagaggacaagccttatgcagagttgtggatggggactcacccccgaggggatgccaagatccttgacaaccgcatctcacagaagaccctaagccagtggattgctgagaaccaggacagcttgggctcaaaggtcaaggacacctttaatggcaacctgcccttcctcttcaaagtgctctcagttgaaacacccctgtccatccaggcacaccctaacaaggagctggcagagaagctgcacctccaggctccgcagcactaccccgatgccaaccacaagccagagatggccattgccctcacccccttccagggcttgtgtggcttccggccagttgaggagattgtaacctttctaaagaaggtgcctgagtttcagttcctgattggagatgaggcagcaacacacctgaagcagaccatgagccatgactcccaggctgtggcctcctctctgcagagctgtttctcccacctgatgaagagtgagaagaaggtggtggtggaacagctcaacctgttggtgaagcggatctcccagcaagcggctgccggaaacaacatggaggacatctttggggagcttttgctacagctgcaccagcagtacccaggtgatatcggctgctttgccatctacttcctgaacctgcttaccctgaagcctggggaggccatgtttctggaggccaacgtaccccatgcctacctgaaaggagactgcgtggagtgcatggcgtgttcagacaacacagttcgtgctggcctgacacccaagttcattgatgtgccaaccctgtgtgaaatgctcagctatacccctagctccagcaaggacaggctctttctcccaacacggagtcaggaagacccctacctctcaatctatgacccccctgtaccagacttcaccattatgaagacggaggtccctggctctgtcactgaatacaaggtcttggcactggactctgccagcatcctcctgatggtacaggggacagtaatagccagcacacccacaacccagacaccaatccctctgcaacgtggtggcgtgctcttcattggggccaatgagagtgtctcactgaagcttactgagccgaaggacctgctgatattccgtgcctgctgtctgctgtaaaggctgcagcctccccagctctcctctgccagccaccctaaattccagccaacctcacctcctcgggcccagctcaagcccccttccttgctctggaccccttaggtataccctggaagagctggggtgggggaggagggagcgtgaaggtagtgactcctgaacacacccaggtggaaccatctttggggaggagaggcccgtgtgaggggtctgatactccctttgtcttccctctctactcctcgctacacctgagccaggctcttgccaactctgttccagcctatggctttaggctagctgttaaatatgtgacccagcattagctcagcatctgtcagagcaagagaccaggtaatttctaagaacagggttctagcgatgggactgcccatttcctcagctgcagaggaggaaagggaaagggtaggcctgtagactaacgctgtttacacccttgttctgtcaaagcaattaaagatcacttgtgttgagaaaaaaaaaaaaacaaaaaanaaaaaaaacaaaaaaaaaaaaacaacaacacaacaaacaacaaccaaacacggggggggggagcacaacgaaaaatacccaggggggggacgccaagatacgacccacacagcttcttgaacacaaagaggcccacataggaggagagcccaataaaacccacaagagcaaagcgcggcggccgagaatataaaaaagccagcggatagtacggggaaaaacccgtgaccaacaggggataccctatgagggagaggcgagccacccactccgaggggggggggggagcaaaccaactcagcgggggaccccaacacaccaaccaccgcagcagaatgataataaaacagccgaccccaggagcggggacactaaaacaacaacataacgggcagaggaacaccaagaggcgggcgagcaccacacacacggcagaaaaaagcgcgaggacggcaggacaaaaaacaagtacggcgcaaccaaagaaacaaatactaggcaggaccacacatatattcacg

SEQ ID NO: 587153 - DNA, 2222 bp, Homo sapiens
  misc_feature (2042)..(2042): n is a, c, g, or t
  misc_feature (2169)..(2169): n is a, c, g, or t
  misc_feature (2204)..(2204): n is a, c, g, or t
gccgggaaagggatacgtgcttaatcctggtgcagggggcgagcatggccgctccgcgagtattcccactttcctgtgcggtgcagcagtatgcctgggggaagatgggttccaacagcgaagtggcgcggctgttggccagcagtgatccactggcccagatcgcagaggacaagccttatgcagagttgtggatggggactcacccccgaggggatgccaagatccttgacaaccgcatctcacagaagaccctaagccagtggattgctgagaaccaggacagcttgggctcaaaggtcaaggacacctttaatggcaacctgcccttcctcttcaaagtgctctcagttgaaacacccctgtccatccaggcacaccctaacaaggagctggcagagaagctgcacctccaggctccgcagcactaccccgatgccaaccacaagccagagatggccattgccctcacccccttccagggcttgtgtggcttccggccagttgaggagattgtaacctttctaaagaaggtgcctgagtttcagttcctgattggagatgaggcagcaacacacctgaagcagaccatgagccatgactcccaggctgtggcctcctctctgcagagctgtttctcccacctgatgaagagtgagaagaaggtggtggtggaacagctcaacctgttggtgaagcggatctcccagcaagcggctgccggaaacaacatggaggacatctttggggagcttttgctacagctgcaccagcagtacccaggtgatatcggctgctttgccatctacttcctgaacctgcttaccctgaagcctggggaggccatgtttctggaggccaacgtaccccatgcctacctgaaaggagactgcgtggagtgcatggcgtgttcagacaacacagttcgtgctggcctgacacccaagttcattgatgtgccaaccctgtgtgaaatgctcagctatacccctagctccagcaaggacaggctctttctcccaacacggagtcaggaagacccctacctctcaatctatgacccccctgtaccagacttcaccattatgaagacggaggtccctggctctgtcactgaatacaaggtcttggcactggactctgccagcatcctcctgatggtacaggggacagtaatagccagcacacccacaacccagacaccaatccctctgcaacgtggtggcgtgctcttcattggggccaatgagagtgtctcactgaagcttactgagccgaaggacctgctgatattccgtgcctgctgtctgctgtaaaggctgcagcctccccagctctcctctgccagccaccctaaattccagccaacctcacctcctcgggcccagctcaagcccccttccttgctctggaccccttaggtataccctggaagagctggggtgggggaggagggagcgtgaaggtagtgactcctgaacacacccaggtggaaccatctttggggaggagaggcccgtgtgaggggtctgatactccctttgtcttccctctctactcctcgctacacctgagccaggctcttgccaactctgttccagcctatggctttaggctagctgttaaatatgtgacccagcattagctcagcatctgtcagagcaagagaccaggtaatttctaagaacagggttctagcgatgggactgcccatttcctcagctgcagaggaggaaagggaaagggtaggcctgtagactaacgctgtttacacccttgttctgtcaaagcaattaaagatcacttgtgttgaggctgtggggtaatgagcactcagcctttggggtacctgttcctaaagtgggccaaaagagccctccctacatgatgccccagtttttgctttattcctatttcatacagcttctcgggggagtgagcaggctacactccagaacaccggtatgggaaggagtgggagaggaagccagctttggcctcacaggcacagcttgcaagcaggccttgggtctcccagaggnacagcttgcaagagccctacagagaaggtgactcaaaggatacaccagtcaccagtgcaagactcttcgctcctgtttttctcttattttttttttgagacggattcgagtactgtagcccaggctngagtgcagtggcagatctcggctcattgcaagctncgcctcccgggttcacgc

SEQ ID NO: 587154 - DNA, 2263 bp, Homo sapiens
gggtgccaagttatgataggtcgagccgggtgttaatcgtgcacgtggcctggccgctccgctgaggtgagccattggctggggtgtcggcgagtgtgttcgtggagcgcgtcctggggacgactcccggcattatcggccaggttgagtccgctcctggcattccgcggaaagatgggtgggtgccgggcagaggtgtggccacctgcgatggggattgacctccgaggggagggggcccttctagacgtcgtgccgtgggataggtaccttctgctccctccccgccaccctgcctcagatcagcacaaggtccttactgctgcccatctgacagttgggaacatcgaggcctgcagcggaggggggtctcatccaacagcctacaaaacccttatttgactctgtccccagtgagcacccccagctcttgcctggtttcccgggacactagggtggggcctgaggagtggagtggcagctgaccctgtctgtgccccttccgcgagtattcccactttcctgtgcggtgcagcagtatgcctgggggaagatgggttccaacagcgaagtggcgcggctgttggccagcagtgatccactggcccagatcgcagaggacaagccttatgcagagttgtggatggggactcacccccgaggggatgccaagatccttgacaaccgcatctcacagaagaccctaagccagtggattgctgagaaccaggacagcttgggctcaaaggtcaaggacacctttaatggcaacctgcccttcctcttcaaagtgctctcagttgaaacacccctgtccatccaggcacaccctaacaaggagctggcagagaagctgcacctccaggctccgcagcactaccccgatgccaaccacaagccagagatggccattgccctcacccccttccagggcttgtgtggcttccggccagttgaggagattgtaacctttctaaagaaggtgcctgagtttcagttcctgattggagatgaggcagcaacacacctgaagcagaccatgagccatgactcccaggctgtggcctcctctctgcagagctgtttctcccacctgatgaagagtgagaagaaggtggtggtggaacagctcaacctgttggtgaagcggatctcccagcaagcggctgccggaaacaacatggaggacatctttggggagcttttgctacagctgcaccagcagtacccaggtgatatcggctgctttgccatctacttcctgaacctgcttaccctgaagcctggggaggccatgtttctggaggccaacgtaccccatgcctacctgaaaggagactgcgtggagtgcatggcgtgttcagacaacacagttcgtgctggcctgacacccaagttcattgatgtgccaaccctgtgtgaaatgctcagctatacccctagctccagcaaggacaggctctttctcccaacacggagtcaggaagacccctacctctcaatctatgacccccctgtaccagacttcaccattatgaagacggaggtccctggctctgtcactgaatacaaggtcttggcactggactctgccagcatcctcctgatggtacaggggacagtaatagccagcacacccacaacccagacaccaatccctctgcaacgtggtggcgtgctcttcattggggccaatgagagtgtctcactgaagcttactgagccgaaggacctgctgatattccgtgcctgctgtctgctgtaaaggctgcagcctccccagctctcctctgccagccaccctaaattccagccaacctcacctcctcgggcccagctcaagcccccttccttgctctggaccccttaggtataccctggaagagctggggtgggggaggagggagcgtgaaggtagtgactcctgaacacacccaggtggaaccatctttggggaggagaggcccgtgtgaggggtctgatactccctttgtcttccctctctactcctcgctacacctgagccaggctcttgccaactctgttccagcctatggctttaggctagctgttaaatatgtgacccagcattagctcagcatctgtcagagcaagagaccaggtaatttctaagaacagggttctagcgatgggactgcccatttcctcagctgcagaggaggaaagggaaagggtaggcctgtagactaacgctgtttacacccttgttctgtcaaagcaattaaagatcacttgtgttgag

SEQ ID NO: 587155 - DNA, 276 bp, Homo sapiens
  misc_feature (240)..(240): n is a, c, g, or t
cagttttcttattcgagttcaaaatggttcataaagcagcgaagacaactcaaaacatcagtaacacatttggcccaggaactgctaacaaacatacagtgcagtggtggcttaagaagttttgcaaggaagagagccttgaagatgaggaacgtgatatgggccatgggaagttgacaacgaccaatttgagagcaatcattgaactacatgaaaaattacagaagaactcagcgttgnctattctacgggtcattagggtcgttcagcatttcg

SEQ ID NO: 587156 - DNA, 1903 bp, Homo sapiens
gccgggaaagggatacgtgcttaatcctggtgcagggggcgagcatggccgcagtgagcacccccagctcttgcctggtttcccgggacactagggtggggcctgaggagtggagtggcagctgaccctgtctgtgccccttccgcgagtattcccactttcctgtgcggtgcagcagtatgcctgggggaagatgggttccaacagcgaagtggcgcggctgttggccagcagtgatccactggcccagatcgcagaggacaagccttatgcagagttgtggatggggactcacccccgaggggatgccaagatccttgacaaccgcatctcacagaagaccctaagccagtggattgctgagaaccaggacagcttgggctcaaaggtcaaggacacctttaatggcaacctgcccttcctcttcaaagtgctctcagttgaaacacccctgtccatccaggcacaccctaacaaggagctggcagagaagctgcacctccaggctccgcagcactaccccgatgccaaccacaagccagagatggccattgccctcacccccttccagggcttgtgtggcttccggccagttgaggagattgtaacctttctaaagaaggtgcctgagtttcagttcctgattggagatgaggcagcaacacacctgaagcagaccatgagccatgactcccaggctgtggcctcctctctgcagagctgtttctcccacctgatgaagagtgagaagaaggtggtggtggaacagctcaacctgttggtgaagcggatctcccagcaagcggctgccggaaacaacatggaggacatctttggggagcttttgctacagctgcaccagcagtacccaggtgatatcggctgctttgccatctacttcctgaacctgcttaccctgaagcctggggaggccatgtttctggaggccaacgtaccccatgcctacctgaaaggagactgcgtggagtgcatggcgtgttcagacaacacagttcgtgctggcctgacacccaagttcattgatgtgccaaccctgtgtgaaatgctcagctatacccctagctccagcaaggacaggctctttctcccaacacggagtcaggaagacccctacctctcaatctatgacccccctgtaccagacttcaccattatgaagacggaggtccctggctctgtcactgaatacaaggtcttggcactggactctgccagcatcctcctgatggtacaggggacagtaatagccagcacacccacaacccagacaccaatccctctgcaacgtggtggcgtgctcttcattggggccaatgagagtgtctcactgaagcttactgagccgaaggacctgctgatattccgtgcctgctgtctgctgtaaaggctgcagcctccccagctctcctctgccagccaccctaaattccagccaacctcacctcctcgggcccagctcaagcccccttccttgctctggaccccttaggtataccctggaagagctggggtgggggaggagggagcgtgaaggtagtgactcctgaacacacccaggtggaaccatctttggggaggagaggcccgtgtgaggggtctgatactccctttgtcttccctctctactcctcgctacacctgagccaggctcttgccaactctgttccagcctatggctttaggctagctgttaaatatgtgacccagcattagctcagcatctgtcagagcaagagaccaggtaatttctaagaacagggttctagcgatgggactgcccatttcctcagctgcagaggaggaaagggaaagggtaggcctgtagactaacgctgtttacacccttgttctgtcaaagcaattaaagatcacttgtgttgag

SEQ ID NO: 587157 - DNA, 1279 bp, Homo sapiens
gccgggaaagggatacgtgcttaatcctggtgcagggggcgagcatggccgctccgcgagtattcccactttcctgtgcggtgcagcagtatgcctgggggaagatgggttccaacagcgaagtggcgcggctgttggccagcagtgatccactggcccagatcgcagaggacaagccttatgcagagttgtggatggggactcacccccgaggggatgccaagatccttgacaaccgcatctcacagaagaccctaagccagtggattgctgagaaccaggacagcttgggctcaaaggtcaaggacacctttaatggcaacctgcccttcctcttcaaagtgctctcagttgaaacacccctgtccatccaggcacaccctaacaaggagctggcagagaagctgcacctccaggctccgcagcactaccccgatgccaaccacaagccagagatggccattgccctcacccccttccagggcttgtgtggcttccggccagttgaggagattgtaacctttctaaagaaggtgcctgagtttcagttcctgattggagatgaggcagcaacacacctgaagcagaccatgagccatgactcccaggctgtggcctcctctctgcagagctgtttctcccacctgatgaagagtgagaagaaggtggtggtggaacagctcaacctgttggtgaagcggatctcccagcaagcggctgccggaaacaacatggaggacatctttggggagcttttgctacagctgcaccagcagtacccaggtgatatcggctgctttgccatctacttcctgaacctgcttaccctgaagcctggggaggccatgtttctggaggccaacgtaccccatgcctacctgaaaggaggtgagccacatttcagcagtgagccccactgccatccctgctgggccctgtttccctatctggacaaaggaaggagaagggtggtcaaggagacccccaaggaccttgcagctctgacctctgagggttcctgggctcagcaagcaacagctggtagggatgatgaatgcatttagcattgaacacgccttgaatcctgacaccaaccctgtgatgccatgctactctgattttaagtcctgccagtcagtgtgggaaccacaatttgaacgcaggctatattggatcaaagctgttgttctgtcacagcctttgtatgtctgtcctacctaccagggatttttacactaaaatatgcatgttgccatggaaggatgccaaaaaaaaaaaa

SEQ ID NO: 587158 - DNA, 174 bp, Homo sapiens
  misc_feature (161)..(161): n is a, c, g, or t
ttccccgagtgcacagtcgaagccccccggtcgtagcccctgcaccgaaggcctccggctcaggtggccgccagggcagtgtctggaggttcgctctcgctgaggcgcaaacttgggtgaggagtctggcgtccctgcagctccccagcccgcccggtacntacccagcggccg

SEQ ID NO: 587159 - DNA, 543 bp, Homo sapiens
ttggatggtgcgcggctcggagggggacgtccctggccgacaaggacatgatggccaaagacagcaagttcaaaatgcccaagttcaagatgccgtcgttcggggtgtctgccccaggcaagtccatggaggcatcagtggatgtgaccgcgccaaaggtggaggccgacgtgagcctcccttccatgcagggggacctcaaggccactgacctcagcgttcagcccccttccgctgacctgggggtccaggctggccaagtggacgtgaaactcccagagggccccgtgcccgagggagccagcctcaaagggcacctgcccaaggtgcagatgcccagtttcaagatgcccaaagtggacctcaagggcccccagatagatgttaagggccccaagctggacctgaaaggccccaaggcggaagtgacagcccctgatgtgaagatgtctctgtccagcatggaggtggacgtccaggccccgagagcaaagctagatggtgtgcagctggagggggacctgtccccggccgacaaggatg

SEQ ID NO: 587160 - DNA, 1555 bp, Homo sapiens
gggtgccaagttatgataggtcgagccgggtgttaatcgtgcacgtggcctggccgctccgctgaggtgagccattggctggggtgtcggcgagtgtgttcgtggagcgcgtcctggggacgactcccggcattatcggccaggttgagtccgctcctggcattccgcggaaagatgggtgggtgccgggcagaggtgtggccacctgcgatggggattgacctccgaggggagggggcccttctagacgtcgtgccgtgggataggtaccttctgctccctccccgccaccctgcctcagatcagcacagcaacacacctgaagcagaccatgagccatgactcccaggctgtggcctcctctctgcagagctgtttctcccacctgatgaagagtgagaagaaggtggtggtggaacagctcaacctgttggtgaagcggatctcccagcaagcggctgccggaaacaacatggaggacatctttggggagcttttgctacagctgcaccagcagtacccaggtgatatcggctgctttgccatctacttcctgaacctgcttaccctgaagcctggggaggccatgtttctggaggccaacgtaccccatgcctacctgaaaggagactgcgtggagtgcatggcgtgttcagacaacacagttcgtgctggcctgacacccaagttcattgatgtgccaaccctgtgtgaaatgctcagctatacccctagctccagcaaggacaggctctttctcccaacacggagtcaggaagacccctacctctcaatctatgacccccctgtaccagacttcaccattatgaagacggaggtccctggctctgtcactgaatacaaggtcttggcactggactctgccagcatcctcctgatggtacaggggacagtaatagccagcacacccacaacccagacaccaatccctctgcaacgtggtggcgtgctcttcattggggccaatgagagtgtctcactgaagcttactgagccgaaggacctgctgatattccgtgcctgctgtctgctgtaaaggctgcagcctccccagctctcctctgccagccaccctaaattccagccaacctcacctcctcgggcccagctcaagcccccttccttgctctggaccccttaggtataccctggaagagctggggtgggggaggagggagcgtgaaggtagtgactcctgaacacacccaggtggaaccatctttggggaggagaggcccgtgtgaggggtctgatactccctttgtcttccctctctactcctcgctacacctgagccaggctcttgccaactctgttccagcctatggctttaggctagctgttaaatatgtgacccagcattagctcagcatctgtcagagcaagagaccaggtaatttctaagaacagggttctagcgatgggactgcccatttcctcagctgcagaggaggaaagggaaagggtaggcctgtagactaacgctgtttacacccttgttctgtcaaagcaattaaagatcacttgtgttgag

SEQ ID NO: 587161 - DNA, 252 bp, Homo sapiens
tgcatagtcttccaactaaccaccttgagtgagacagcaggaaaaaaaaaaagaaaaaaaaaaaacagggaaagagagggccaattaaaatcagactcatccctacaaaacttaaaattaaaataaaatgaatcaaactcagaggctccaaagttggattaaaatccttaatccaaaggtccggggtgaaatatgttaaagatgtgtaaggggtgcatgaatggcacaaggccaacagctgaaaaattggcc

SEQ ID NO: 587162 - DNA, 648 bp, Homo sapiens
  misc_feature (1)..(1): n is a, c, g, or t
naaactcacctgaggaacatgtgggcatgccctatgagatgtcccaatgtaatgatatgatgatatatgctatgtcatccagaacgttaagtttgtcccatgtaatagacagattctatgcgagtatatggcctatccatgtggtcatatagttcaaaacacattatctctgagcatctctcataaggaggtgttaacttcttgtctcatcataaggaccacatcttataatggatccaatagaaccggtaatgtgatatcctatggcatatcaacaagatatggcataccttcatagttataagcggtaagattaaatctaagttcgccatccagtattcttgcccatagaaaaggagtcttatagggagcagggatatagttctttctcttatgatgtagatacaaccttgactttgagtaagcctctatgatagagatcgggctactcagtaagcatgcagtcagtgtgccccattagtgtagagaggaaggcctgagtagtgttgatgagagcctcaggttccatataggcttggcatatatcttgggcaagtcggccaatctatgatcttatattgacgtgtctatgcatgagctctcttcgctccacatactgggagaatatttggacaactccccgataag

SEQ ID NO: 587163 - DNA, 193 bp, Homo sapiens
tatatggttattttctctgccctgtgtatcgataaacatttcagtctgccttcatgatttctcctggagcaccatctcatacttagagagactttccaaaatagccatattggaatatgataccattcgtcaggaaacaaccacaaaatcaaaaaaaagcaagaaacgagacctccgagaccgctgaaaaatg

SEQ ID NO: 587164 - DNA, 402 bp, Homo sapiens
  misc_feature (163)..(163): n is a, c, g, or t
ggggaaagccaaaaatcaagttggtatggaaatccccaagttccccccatgtttccctccctacccatccctgccctctcctattaaatggggttaaatagttcacctgagggtggtggcttatgcctgtaatccccggcattttgggaggctgaggcgggantattgcttgaggccagttcgagacccagcatgggcaacatgacaagatcctgtctctacagaagtaaaaaaaaaaaagaaaaaaattatctgggtgtggtagcaaatacttgtagcctccctcagccggaaggcttaggcaggaggatcacttgagcccaggagtttaaggttacagtgagctataattttaccacctcactccagcctggctgacagagggagaccctgtcactttaa

SEQ ID NO: 587165 - DNA, 380 bp, Homo sapiens
ttatggcaggtctcgtttttgttttgttttgttttgtttttgagatgcagtctcgctccgtcacccaggctggagttcagtggcgtgatctcaacatcactgcaaggctccgcctcctgggttcaagcagttcttctgcctcagcctcccaagtagctgggattacaggcacaagccaccacacccagctaatttttgtgtttttttagtagagacagggtttcgccatgttggccaggctgggctcgaactcctgacctcaagtgatccacccaccttggtctccgaaagtgttgggattacaggcatgagccactgagcctggccagtggtagttttcattgccatgcgtggattgccagagacctgagcaagccagg

SEQ ID NO: 587166 - DNA, 151 bp, Homo sapiens
  misc_feature (56)..(56): n is a, c, g, or t
  misc_feature (89)..(89): n is a, c, g, or t
  misc_feature (130)..(130): n is a, c, g, or t
gtccccttctcttttacagcctggaacaaacttgtatccaaatctaaaccactttngatactagaggtagctccaaatacaggtgatgncactcgagtatcaagagaggtcccagatgtgcatacaagantgtccgtttctgttttgtccg

SEQ ID NO: 587167 - DNA, 262 bp, Homo sapiens
ttccgtgcccagctagtttttttgtatttttagtggaggcggggtttcaccacattggccggactggtctcgaactcttgatctcaaatgatcagtccacctcagtctcccaaagtgttgggattacaggcgtgagccaccagaattagctctttcaagcctcataatatccctagaaagtaaggactgcttgtatctccattttcagattagggagcatgaagtccaaggaggctaagtgactctagggcacggaagatca

SEQ ID NO: 587168 - DNA, 462 bp, Homo sapiens
  misc_feature (265)..(265): n is a, c, g, or t
tacttttcaaaaacaaagacataactgggcacaggggctcacaatgtaatcccagctactccggagcctaggcaaaaggatctcttgagcccaggagttcaagaccagcctgggcaacatggcaagatcctacctccacaaaaaatttaaaaattaggcatggcggtgcatgccagtagtcccagctacttgggaggctgaagcaggagggtcacttgagcctacaagttcaaggctgcaataagctattatcacatgattacanttccattcttgggcaacagagcaagaccctgttcctagagggggcgggggaggtggggaaccacgcacacacaaagacacaagcaaacacattagcctaggcctacacagagtcaggatcattagatgtcactagacaataggaatttttcgctccattataaagtgaccactattgtacatatgattatcattgac

SEQ ID NO: 587169 - DNA, 402 bp, Homo sapiens
agcatgccccttaacctcacaacgccatatcatatgcgctaacgggtatttaagcttccatccttatgcctattaattcactcccctgtccgccgggaatgaatcaaatgtctgccaccaccgccctccaaaccttcgacatccaccccttccccggcagtgtcggcgccgagatcatcggcctggacttatcccgcccagtcaacgagcaggacttcgcccgcatccatcgcgcgcacttggactaccacgtcatcgtgttccgcgaccaacgcatcacccccgaacaacagatcgccttcagtcgccgtttcggcgtgttgcagatccatgtgctcaaacagttcctgttggccaaccaccccgagatcctgatcgtttccaacatcatcgagaacggcc

SEQ ID NO: 587170 - DNA, 406 bp, Homo sapiens
agacttaagttagatgtcaaagcaaccttataaagccaaactttcactaccgtactctttttaaatgatactcatatatcccagatctcttaacttgttaatgttacacctttcattactaaatattcgtccagctaattaggaccatatcatccccacattgcatttaatcaatattcatccgtcaaatcatggctatatttagttctacctgtccaattccactcttcttattatggtttgtctgcttataacacgctaatactacaatgttataaatagcataatagtatataccttcttaactactgtaatggcccgtcactcctttcctctctagcatcctttttctactcccttttcacgtaccatcatatttgcctttcctctacctttgttccatacc

SEQ ID NO: 587171 - DNA, 1428 bp, Homo sapiens
aagaaagaaaaagaaagaaattaatttaaaagccacctaaatggtgacaaaaattccagttgttctcttgagtatcactgtgggctcatggatttcacagattcagtattcccaggagccacgagtaattcttttttttttttttttttggagagatgcgcgagtctcggctcgggcgggtcagactgggaggtggaaggggggtggaacatcgggctcacgtgggaacctctccgcgcttccccggggttcaaggcggatttctttgggcgctctcagcctctcccagaggtagctgggagatggcggggcggcccacaaccattggcccggggaataaatttttttgggatgattttagaggtgagaagaagagggggtctcgcgcccaatctgtggggcccacgcgcgggctcgtggagacactctcgcgggaccctgcggggaccaaccggtggccctgcggcttccccaaggggtgcgtgggaagtgtacgagggggtggaggcgctattccacaaagccggggtcgtgggcgcaaaaggtgcattctgcttttgatatatgggctccaagagaacaaggtgcaccaaactttggggggcgctatttcaaagagaacctcttttcatataccggggggactcctatatggtgccttttattaaaaggagaactcttggatgagatcatcttttttaagagcacgcgaggactttgggcgtttctgcacggggggtgacacaagggggggggcgccccaattatttaatattttcgcacaactgttttccctggtggcgcttacaaagggctcttgtgggagaccccaaagcacaatttttgttcacacaaagggggagggcccttgggggccaccgctattaagcgaagcggcggcaaggacatgggaccacctgggggcacaactcagaacagtcctgagggatcccccaaggggggccctcaacgtggggacttcttgtgcgggggacacatacctcttacaaaaacaaaaggggtgccaaaggggtaaaaacccaaggggacaactagggctttggggggccccaaaaaagatgggcgctgtgaaagccgggcccctatataccgcgagaccccggacaaagcctttgtagtgaacgggagattgcctgtggggggacaaaagtgtgcgagggagagcggtaataacgcgtggaggagacactaggggggccagcacgattaaaggggagcggacaacagggcgaggaggctcacacaagcacaacgagatagagcagcgccaccaagcgaaggtgatggagacgagggcacgacggcagccaccactgagttagaaagcacgcagaaacaggaggcatgtacagtgaagaggaagagaggcatgaactcacgtgcagcagagaagggtagaagttgtca

SEQ ID NO: 587172 - DNA, 540 bp, Homo sapiens
taaggcaccccgcttccttgcttgcatcccacaagaaattccctcctcctatttatagcagcgaatctttccctaggtgaggagacggggtttatctcccctttaaaccccacctatcctggaaggggggtcaatgtgggcctttaaaatccttcctctttcttcctcctctattctctaaataatgatgggggtaagttataccccaagctccctttccaaaatatttcctcagtgctttgcagaaaacccccaaccaaaatgcccttttaaaaaagggggatttttttttttagaatgtaagctcctccaaagcaggggcaatgttttttgtatgttttattgggcccaggaccctggaaaagctccataaaaattttattatgggaggccgtgagtttttattataagggggagaaactgaaatccccaaccctgttttgttgcttgttttattatgccccccgatttaattggggaaaattggcccctttgaataattgtccccaatattacattcaaataaaagggccatgggga

SEQ ID NO: 587173 - DNA, 898 bp, Homo sapiens
ggtttttattttatttattttggtccaaaaagttacaaagttaatatgattgtaccatataaaaatgcagccttttccctagggcaagggaaggaagggcagtaaacataagggcacaggaatcgcagcaagcaccagtctgaaggcagggcccaaagtggggaaacggactgttgggcactgggggtaccccctgacagctggtagagatgggggagtgtaagagacccctctcaaagtggccagggtctgaggttgaactctaatgggggccaagagcacaaatagctaaggacagacgggcgagaggggaggcgggatagctaataaatcccaacgcgtatttgggatgacagtatggaccttataccaacagccccaagacccttctgtgctacaaaaccccagaagtaccgggggtatcaccaagatggcccatcacatatggagacgacaagatgagccactgagagaaagggagggtggcgagaaagacagaacgggggaaatggcggagacaccgggtggacaggacaaagagagtgagacataaagaagccaggaagagaacagacaaagaagaggaggaaaaatagcaagaggaaaacaaggacgagatagagaagagactacaaaacaagaaaaaaaaccaaggaaacacgaatccaaagataaaaaaactaacgcggacaataaccatgagaagacaaaaccaacaaagagaggaagaacacgaagagggacaccagaaaaaaagcaaaagaagaaaaaagagaacagaggaggggcccacaaccacactaacaggagacacccaccacgagcaaaacaaaggaaacacagaggagaaagagaaaaaacggaggaggaagaaagcaccaacacaaaaagacgagca

SEQ ID NO: 587174 - DNA, 109 bp, Homo sapiens
ttgtgccacactacactaggctaattttttaaatttttatttggtagagacaggtgcttgctatgttgcccagggcagttttgaactcctggcctcaagcaatcccctg

SEQ ID NO: 587175 - DNA, 423 bp, Homo sapiens
  misc_feature (209)..(209): n is a, c, g, or t
  misc_feature (272)..(272): n is a, c, g, or t
  misc_feature (277)..(277): n is a, c, g, or t
  misc_feature (283)..(283): n is a, c, g, or t
agctcacaaatttgtcatccagacataaaggaggcttcagaatttattgactcaggagttgaatgttggtatcaaggacctagatttttctcatcactctgcacttcaattctcaatgccctattgaacatcaggctgtagtaagatggctagagtgattcagggataacatctagagataaaaagagactccttttcttatgattttntctaagagaacggatttccaaagccccagcaagcatgcttcacatccatggcagagtgctcanatgtntacctnagctagcctcagaaggatggatcgctgtggcctcagagaccacctggatcttgggaaggtgtcagctctacctgtggcacttggctgagtgggaaagggatggaaacatgaataaagtaagaattaggaaggaaaaggag

SEQ ID NO: 587176 - DNA, 456 bp, Homo sapiens
ccacacgcctagggcacaatggagagggtaaccgctatttgcctactgttgctatttagctaggcttattccagcggtgtgttgcgtcgtgatgcacacatgagagaggttgctcatcggattcctgatttgggagaagcatgtgaagatcatgtgaaattagtgactgatgtaactgatttcgcactaacatgtgacgctgatgagtcagatgataattgtgacagattacttgataccctcttcggagacagattatgcacagatgcaactctacgtgaaacctatggcgaaatggctgactgttgtgcaagcacgatcctgagaggaatgcatgcttcttgtaacgcacagatggcatcccaaacctgactcgattggagagaccagaggatgatgcgatgtgcactagatttcatgacaatgaatagacattgatgcacatcttattggtgc

SEQ ID NO: 587177 - DNA, 376 bp, Homo sapiens
ttttgggggtttttttttaaaaaaaggggtttttaaaaaggcccccccttttagggggaaaaaagcccccccccccccccgggaagggccccttaaaaccttttttaaaaatttttttaaaaaggggaaaaaaaaaacccccccttttcccctttcccgggggggggggtttttggggggggcccccccccccccggggcccctttctgggggggttttttggggccccccccccccccggggggggggggttttcaacccagcctctttttgaacaaggggggccccggggggggtcggggttttttttgggccccccgggggccaagggggggcccccgggcccaaaaaaaaaaaaaaaattttccttccttta

SEQ ID NO: 587178 - DNA, 695 bp, Homo sapiens
gcgtcgtcgccctgcggggtggctgtgtgccgaggcgctggagctgctggatgcactgcgtgcgtgtgcagagagcgcctgcgacccgagagggagcccctgcctgcgtgccctcgtttgcgactcgtgccctgtatgtgccttgcttagtgtgccctgctagccccctgcctgcctgccaacatgctctgtgtggtgactgtgctgtgtgtgctgtgctgtgtgctgactgtgcacctgtggtgtgacttgtccctgtgtgcaatgcaacatgtgcttctccaaatgacatctgttggagaattatttcattgctgttgatagttgtgcagcaatggcttgccacctgacgcccagtgatgctgaaccatgtgctgcactagctgtgaggataatgccccagccaccagctacttgtgtggagttgctctggagcctctgtgtgagacctgtgtagagtgcgcaccagcgggtgaatgtacaccaatggaccatacttgtgcgctctactggtgccagccaagtctcgggatggtgaacgtacttgtctattgcaactgtacacaagcatgaaccccttgtgctgttttggtgagagctgtgatactctcaccttgccgagacttgccagctcaatgccccacgatggaccaacagtaccagttcttagaggatgcagtgaggaaccagcgcaa

SEQ ID NO: 587179 - DNA, 254 bp, Homo sapiens
ttggtttgggggcccccctttttttcctattttttttaaggaaaaaaaaaaaattttttgggttttttcccgcccaaatttttttaaaagaattccccaaaatttttttcccccttttgcccccgtaaaaagctaataggtttacaacccttaaaaggggggggggaaaagcccctggggtttttttttaaaaaggaatcccctctttaaagggctccccccctacaggggtgtggcttttactttcttctctc

SEQ ID NO: 587180 - DNA, 225 bp, Homo sapiens
ttgcaccattctggggtggtggctcttctgggttgaaaagtctggagatacaatgagagggcttcatccacatggcttcctctgacttcctgaccctgcatggaggccactggttcagctccagtgcaggtgaacggggccttacatgcttacgctccttcatgcccagtacacgataccttggcttccccaggggcccactaagcgtgcagtgtccccgcctcc

SEQ ID NO: 587181 - DNA, 415 bp, Homo sapiens
  misc_feature (36)..(36): n is a, c, g, or t
cccgcgacagagtgtgcttggaccagaaggagcagncggctttcttctggttctgtcgattggggagcagctcactgaacgtgcttgttgttctctccaccagcacgccctacaaagtcaggccagggggttgcaaatgtgggtactttccgtgagaactcataagggtagttgggatttcctgatctgatgaagtgggaaaagtactgcatgattttcagcgacaggctcttctcctccagagaaaactgcccctcgtaggctgggtagaagggaagccccaaggcaaactgaacatccgccagcagctccaggctgccatggccgtagttttcaggagcatggtacatgaagacgtttccttgggccctctttgcccaggcacttgccatgtcgattatagggcagatgataa

SEQ ID NO: 587182 - DNA, 1541 bp, Homo sapiens
tctacagaccttcttttttgggacgccgcgccatgttctccccctggggtgaccccgctatcgccagcgcgtggtggtttgcgactcgcgccctttgtgtgagtccccccccgggggtcgccggtgtcctcataccccttccccgggaattgttttactcccttaaggtgccccccgggggagcccgggaagtgacgacccagaatgtgtgttcgaagccaagccacggggggagaccacagctttgtattgcgacccccattttaaggtctcccttatactttttgttaagggtggacacgcaccgcattaatttgggagacccacagagttgtttgtggacacccagaaaaaaatatcccagagcgcgtgggggttgaagcaccggcttcctcccggggaaattttgccccgcgcggcgggaattatttcggtgctgaaccccccaacgaccgtgttcccgcccgggaaccgcccttgtggacgcgaaccgcacgctgggggccccacacataggggccagagccggggccacacaagatagagggggagaatcccggcggcagcggcagtggcccgcggcgctgtggggaaccccgcgggggggaccacccaccccccattcggggtgataaaagaaaagcccgggaagaaaaagcgccaccgcctttcgttgtgagttccgaaactctccgtgagacacaccacagcagagggacacacagcgcgggcaacagtcgaccgcgagggagaccccccttcgggagtctcacagggagaggctctctctgggtggacaccctcgggggcacgacaaagtgcgagatatgcgcgcccacgcgggagcactctctcgaaggggtagagatataggaggctccccgcgccctcggtggagagtttcacagccctctcgacacggcctctgcgcttcacagagactctcgcgagagaacacgctctctcgagcacacagctgggacacggagatgagagtgggagacacatcttttgtggagagccacaacatatagaagatatatatagagaagagaaaagggagaataagcgccacagaggaaataatattagagagagaagagaagagggagacacccactcgagaagagaacacacgcggccacaccacaaaatctcgcctccctctccacaggggcacagtttccacagacgcacaagagaccacagtgttcacagcctcgagagagagctctcacaggcccccctctgagagagagagaggtgggagaagtgtgtccacagaactctctcgagacacagcacaccacaggtccctctctttccacgtgttcaagaattgcacagagacttcttcctcacgaagatgtaagaggttccactgaatggctatggaggaagagcctcactgggaagaatgaggagaagacaccgggcccctctggaacacagaatgacacagagaaaagagagaagagccagaactgttcacatcgcatagagaagagggaggtgttgtaaaagaagatttgaaatccaga

SEQ ID NO: 587183 - DNA, 834 bp, Homo sapiens
  misc_feature (1)..(1): n is a, c, g, or t
  misc_feature (131)..(131): n is a, c, g, or t
  misc_feature (165)..(165): n is a, c, g, or t
  misc_feature (167)..(167): n is a, c, g, or t
  misc_feature (181)..(181): n is a, c, g, or t
  misc_feature (190)..(191): n is a, c, g, or t
  misc_feature (194)..(195): n is a, c, g, or t
  misc_feature (220)..(220): n is a, c, g, or t
  misc_feature (249)..(249): n is a, c, g, or t
  misc_feature (257)..(257): n is a, c, g, or t
  misc_feature (261)..(261): n is a, c, g, or t
  misc_feature (290)..(290): n is a, c, g, or t
  misc_feature (316)..(316): n is a, c, g, or t
  misc_feature (329)..(329): n is a, c, g, or t
  misc_feature (345)..(345): n is a, c, g, or t
  misc_feature (349)..(349): n is a, c, g, or t
  misc_feature (358)..(359): n is a, c, g, or t
  misc_feature (377)..(377): n is a, c, g, or t
  misc_feature (384)..(384): n is a, c, g, or t
  misc_feature (401)..(401): n is a, c, g, or t
  misc_feature (413)..(413): n is a, c, g, or t
  misc_feature (432)..(432): n is a, c, g, or t
  misc_feature (480)..(480): n is a, c, g, or t
  misc_feature (500)..(500): n is a, c, g, or t
  misc_feature (506)..(506): n is a, c, g, or t
  misc_feature (512)..(512): n is a, c, g, or t
  misc_feature (538)..(538): n is a, c, g, or t
ntcttagggccagctaacaaaggggtctccacattgtcaagtttaaccaagagcaaacgggttttaaaacacacctttacatttttataatggggggatgaagagaagaaaattgtgcgtcaaatgttttngaatactcatatccatatgtgggaatagaaattnanatatcatcgtaagnggttataannggnntttgtgcagagccacaatattttgntactattcaaacaataatatctatcttanggtttganaganagtataacattaggcatcaggtttttttnctttctagtttatgattgggaattanaccacaatataanaccaaaaatattttcnaagngaatttagnngttatgttgatttatgcnagaggtnatgttatcatatttttnatacattaattnatacagctacatttggggncctgtgggcatgggtgtgcataccaatattttttctctttattaacanataggggggaattatatgcnactgtnaatctnatttcctgcttcacaaccctcttttnatttctgacatatgtttatgtctgagacagaagagcaaagcacttgcgaacacccctgggttaagcctaacacttcgggagctcttgaggatttgagcgactggtgtggagagactgtcagtatgcagtgccctctgctggccaaattattaaacatcgcgataaacaaaattcccaagtgttaatattacaatgtgggggaataaaactaagattattttggaattagccctataattccggagagtcaccattcactaccataattccttagtgaacagagatttacttttatg

SEQ ID NO: 587184 - DNA, 936 bp, Homo sapiens
gataaagtagacacaatgattgtccaggcgattatccttgttagatgacttggataaagaactaatcaactacgttatgcgatgtaaagaatggtatgagctggcattatcccatgtagtttaggaatagaattatttgatgataattgtaagatacgtgcaaggtgttgtacacgaattgttggtgatagggaagaacgtagtgcactctggctaagcgttttctgagtaagttgtcagaagaagttgatgcaagaagtgagagtagttggggaggatagtccatgggaacggaggtttcaggaagaacgatatgtagcgaatattctggatctttgcaatcgcaatggtggtcgagaatctctgagtatcggagcccagtctatgaaatatctacataaaatcgaatggaatgagtcattggcgtccctaaatgtgaccagtcgactggtatggggaattagtctcggagcacggtttatagctcatgctggtgtctcttccaatatttggacaatgcttgcagctactaccgttcagattcttggggctgaaaaggcagttgtcgagagcccgcaatttctagacgggatgccctaggtatggtccaatttgttcaatgcttcactccgtggtcagaacatgtccctcagacaaagggaagcaatgctcgactgctggaggcatatgcgttgggcatcggaatggtgctgggaggatccggtccgcctggagttgtgaacgagccgttaggccggtggacctggcgccgggttccacactggcccgggccttctaccgcatttcccgtgtggggtttctctggggcgtccctttacacactgttcgggtttttacccccctcttggagggcgggtcaaaacgcgctctcgcggcttcttctcctctctctgccctttcttctcctgggggggg

SEQ ID NO: 587185 - DNA, 351 bp, Homo sapiens
caggatcccccgattactgcgctgggatatccttctccctatggggcatcacagaccctcttccataagatcctgctcccaggcaaaacagccaagatcacagtcacatagcatttcgttccctgagaactgggggtccttgatggtagaataaaattgttttccttgatgtaggtatcagagggctagtgggggaattttttaaaaacccaaaacattttgcatgtgcacgccattgaggaagggacttcccagccattgaaatattataacatcccatggataagtgcttgcttaggccttgggtgttaagagttctgatggtctcaatcacttctttgtgttggagcc

SEQ ID NO: 587186 - DNA, 395 bp, Homo sapiens
cgatcaccgtgtcgtcgctgaatgcgcatttttcgacaacttccgccagacgttctgttcctgactgatgatcggcgcgcgtcatacatacttcaccgccagcggttcaacggcgcgggcaacatcctcatgatcggttgccacgatgatgcgctcggcacctgattcacgcgcgcgttcaagaacatgaacaatcatgggtttgccgttaatatcaaccaatggtttaccgggcagacgcgtggacggtaggcggcgggaataatgaccacaaaactcatgatttactctcatcagcagtcagcacgcgggcttccgtttccagcaacactggaatgccatcacgcagcgggaaagcgaggttgtccagtttgcaaataagctcttgtttttcc

SEQ ID NO: 587187 - DNA, 377 bp, Homo sapiens
tgaggtagagttttgctcttgtcatccaggctggagtgcactggtacgatctcggctcaccgcagtctccaccacccgggttcaagcaattctcctgcctcagcctcccaagtagctgggattacaggcacgagccaccctgtccggctaatttttgtattttttgtagagacagggtttcgccaagttggccaggctggtctcaaactcctggcctcaggtgatccgcccaccttggccttccaaagtgctgggattatgggcgtgagccactgcacccagccttttcattcagtatactttaatgggagcctccctgagtgctgccctaggcgtaggagtgcccagggctctgtcagccccttcagcaccgtgct

SEQ ID NO: 587188 - DNA, 603 bp, Homo sapiens
  misc_feature (164)..(164): n is a, c, g, or t
  misc_feature (175)..(175): n is a, c, g, or t
  misc_feature (184)..(184): n is a, c, g, or t
  misc_feature (194)..(194): n is a, c, g, or t
  misc_feature (198)..(198): n is a, c, g, or t
  misc_feature (210)..(210): n is a, c, g, or t
  misc_feature (382)..(382): n is a, c, g, or t
  misc_feature (423)..(423): n is a, c, g, or t
  misc_feature (430)..(430): n is a, c, g, or t
  misc_feature (456)..(456): n is a, c, g, or t
  misc_feature (459)..(460): n is a, c, g, or t
  misc_feature (476)..(476): n is a, c, g, or t
  misc_feature (508)..(508): n is a, c, g, or t
  misc_feature (531)..(531): n is a, c, g, or t
  misc_feature (546)..(546): n is a, c, g, or t
  misc_feature (568)..(568): n is a, c, g, or t
atctttgccagacaggagctcgtgcggtggccccaggccacagcccacagccatgggttgggacctgacggtgaagatgctggcgggcaacaaatcccaggtgtccctgagcagctccatgtcggtgtcaaagctgaaggcgcagatcacccaaaaatcggcgngcacgccttcnaacagcgtntggctgtccncccnaacggtgtggcnctgcaggacagggtccccctttccaaccagggcctgggccccggcagcacggtcctgctggtggtggacaaattcgacgaacctttgaacatcctggttaggaataacaagggccccaacagccccttcgaggtgcggcttacccagaccgtggccccccttaaacaacaantgaacgggctggagggtgtgcaggaccacctgttttggctnacctttnaggggaagcccctggaggaccagctnccnntgggggagtacggccncaagccccttagccccgtgttcattaatttgngccttcggggaggcggcccaaancctggcggggggagntaagggcctcccccagcatccnagcaggatcaagggccggaaataaaggctgttgta

SEQ ID NO: 587189 - DNA, 107 bp, Homo sapiens
gaacaggtcgctgcttcagtgagctgccttttccaactgcaatcaattcattgttatctcgtcaactccacctcgagaggcatcagcatcccacgctccttgaccaa

SEQ ID NO: 587190 - DNA, 344 bp, Homo sapiens
gggcagtggtgagatcatagctcactgcagcctctaactcctgggctcgggcgatcctcccacctcggtctcccgagtggctggaaccacagtggccacagatgtctttaattccaaaaacctggccgttcagggcaacaaacaagaagatctttgggcgtaacaaatggtgtggttccaaaaattcccaattcgggcccaacccaaacccgtgtaaaggtaaaggaaccggaacaaaccaaaagggttaagggtgggaagggggtttggggcctttggggggcactttggaaagcggccttttccttttaacccaacggcacgggtttgtggaaacccccaag

SEQ ID NO: 587191 - DNA, 434 bp, Homo sapiens
  misc_feature (22)..(22): n is a, c, g, or t
  misc_feature (149)..(149): n is a, c, g, or t
  misc_feature (167)..(167): n is a, c, g, or t
  misc_feature (287)..(287): n is a, c, g, or t
  misc_feature (389)..(389): n is a, c, g, or t
  misc_feature (393)..(393): n is a, c, g, or t
ggccccgcggtccctaaaaatngggccctatggaagaggaccctccctttacccccctggaaattccctagcccagcaacctggtcccggcaggggccccactgaaagcagaagggttttcctccggggggaaccctggcccagtggtngcctgcattggtggtagncctcccaaaggttgcccctatttttaaaatcaattatttttgtgacagtaattttgggtcctggaagagttcagatgcccatcttctgcagttcccaggaagagagattgttctgaagtnccctctgaaaaatattttgccctctgacttgatttctataaatgcttttaaaaacaagtgaagcccctctttatttcattttgtgttattgtgattgaaaanaagntaaaatgctgatagaaggagttgaaatctgatgacaaaaaa

SEQ ID NO: 587192 - DNA, 450 bp, Homo sapiens
ctaggttggggaggggcggtgtccagtgaggtcatctgtggtcggtgttggtggcctcaacccgcgcaggctcagtcccccacccacccccagtccccgtcctccccatgtccttgagacctcccctccagcggcctgggtcacccggcccatccacaagaccacctcccagacgggagtccctgggcactgggaagttctgggctctctctggtttggggagaattgtgggcctcctccacctccagctgcaggacccccaagcggcgcccggggcccacccacagctgcgggagagacacggttttaatgcgcgctcaggctggtctcgggcggcctcagtactcccaaagcgcggtcccggccggggcgtcggcatcggcccgcagcaggcccgagcgccgccgcgcaggtactgtgcgctccgggcgcggatgccaggcggccgca

SEQ ID NO: 587193 - DNA, 161 bp, Homo sapiens
ttgatgacgagctaatatcatgcgagtggatgttggagaagagatcgatggttctcaaggagtgagctgttctacatgaagaagaagcacgaagaggaagtaatagatggcctacaagcccagattgccagctctgggttgaccgtggattggacgagcat

SEQ ID NO: 587194 - DNA, 344 bp, Homo sapiens
ctcggtacccaggagagatgccccagacaaaaaaccaaaactcaatatccacaaaaataagttttaaaattagccaggcaaggtggcaagcaccggcagtgtggctcacgcctgtaatcccaggactttgggaggccgaggtgggcggatcacctgaggtcaggggtttgaaaccagcctggcaaacgtggcgaaaccccgtctctactaaaaatacaaaattagccaggaatggtggtgcgcacctgtaatcgcagctacttgggaggctgaggcaggagaatcacttgaacctgggaggcagaggatgtgctgacctgagatcgtgccattgcactccagcc

SEQ ID NO: 587195 - DNA, 788 bp, Homo sapiens
gtggacctcagttatccatctgtaaagttcttatatatttgtcctaaaataatctatgaagaatagattttggttggacagttagaaatgccttgttcagttggtgtattgaaagctctcctttaacattttcacctgctcattgtgatgtcctccttgttatgtctaatagtctttccaggtcatacttgtgtttaactcattaaactattttgcttacctggatttgtggagcactaagtctgataaagctttctttcgaaaagcttaagtcatgtgtacattgcttattttttgatacatttgactttcctaggaggtttaagaacagtgacaggtatagcttcgacaccttcaaatgatcttgaatgagggaaacaatcagtttgattccaaggatatttcttggccttacatggtctcaaactttgacatgtctgtacacctttcattattaggttctcgacattactttatgtaccagatattgatagtctatacacgatcttaatattctcgtgatcttatagcaatgtataaagtgttcaaataatagtcagggaacttagtatacctacttaagctcaggacttgttaccctctgaatagagtgcctttgagtgactcatgctaattagaaatttcacatcagttaaattgctaacctaactggcccagaaggaatgttaataatgggaggccttgatcgattgacgccattacatgttcacacatggaccactcattcaggtccaccacatgacgatgtacacttttccttgatgaat

SEQ ID NO: 587196 - DNA, 929 bp, Homo sapiens
gtgggtgagatccatgtgaagacattagaagaaattcttcttggaaaggagccagtcagaaacgtggagaattgctacactaaactcaagacagacggaccttgcaaaatactgatgatatctagcttcaggagcaggaatgctcctccactatccgtatcaaaaccttctctgaggtcctggctgaaaacaaacatcggcagtaggaagcagagagacaataaaatagcgaaatcaggatacaatgttgctagtcagacgtctaaagtattgtagtatctgagaattaaggaaaacagtattaatttgcctagcacagttgtagcgagcgagagtgacaatgagaggagccgtgctggttaaaacaaagtctatgccggaggtgcatggttatgacgctggttagaacttaaaactggtagaaggcagctgagggtgaagaaagagctctgacgagcaacaacaggtccccgatctcaaagatgaggtcactccagagggtgaagagcggctgatgcgggatcagccataagaacaggggatgcaaccgaagagaagaacctgcagagaaggacaatgcacagcccgattctccaaacacaggtcattaggaaacagaagcctataaagaagggttccaaagtggcagaccacccagggagattgacgtccactaaaaccttcccatgtccaagaagatggtcgcagagccgtgcaaagaagcagagcaacatgcgaggacaaccctgcagggagacggggactgtccagtcttctggacatgcacatgcggggcagaatgaagctctagccaagaacccaaggtggcagagaaaccagcgctcacatgacgaggccgagaaccacacaggacggccaggggtcccaacaaggcatccaaaggggcgctcgccccacggatggacccc

SEQ ID NO: 587197 - DNA, 371 bp, Homo sapiens
taagccaagacctaacaaacccgcaaggcttaaactaccaaacctagataaaaaatttcagtgaggacaactcggaacaaaaccaaactcggagcagtacatgctaagatgcaccagtcaaagcgaactaatatactcaatgaatccaataagttgaacaagggaagaagtgacgtaggaataacagaggcatccctattctagagtccatatcaacaagagggtttacggacctcgatgttagatcagagcatcgccgatggtgcagccggtattaaaggttccgtttagttcaacaattaaagtcctacattgatctgagtacagaccaggagtcctccaggtcgggttctatctaagttaaattcctc

SEQ ID NO: 587198 - DNA, 292 bp, Homo sapiens
  misc_feature (38)..(38): n is a, c, g, or t
ggaatacgagcaatgggcggaggggtgctctcctgagnctacagaaggaatgatctggtggttaagataaatagcacaagtcaaacttattcgagttgtccacagtctgcgatgttgatcttcttgctaggtcttgccattcctggacccagagtgctccaaggcatccagaatattcattccttcttatcactgtgccaaacaccacatgcttgccatcctacctactcagtcttggcactgcagatcaaaaactgtgaaccattggtgtcgggtccatcatttgccatag

SEQ ID NO: 587199 - DNA, 194 bp, Homo sapiens
atcccactcaaatatctcatcaacaaccgactaatcaccaccaacaatgactaatcaaactaacctcaaaacaaatgatagccatacacaacactaaagggacggaacctcgatctcttatactagtatcctcaatcatttttattgccacaactaacctcctcgggacttcctggcctcactcatttacacca

SEQ ID NO: 587200 - DNA, 137 bp, Homo sapiens
aagtatcgaaggatgaatcttcatggatctatgtataggggaggtaaaccacatggaaggaggtgtcggggcgccgtgggtcctcaagcttagggttcatgttgggctcatcccggtccctgaccattcaacgctgt

SEQ ID NO: 587201 - DNA, 134 bp, Homo sapiens
ccggtggagacgggtctcatgggggcgggtctggctcggtgcagggggacgtgctaatggaagcagccgacacgggggagagtgaccccaggaagggggtctctgagaatatcatggctggggccagcgggctc

SEQ ID NO: 587202 - DNA, 369 bp, Homo sapiens
ctctggatgcaaagtgctctggctgcaaagtgtccatcaatgaatgaatggataataaaatgtggtatgtacatcacatggaataatattctgcctgaaaaagaaagaaaactctgggctgggtgtggtagctcacccctgtaatcccaacactttgggaggccaaggtgggcagattgctttgagctcaggagttcgagaccagcctaggcaacatggtgaaaccttgtctctagaaaaatacaaaaatttgccaggcatctgtagtcccagctacttgggatgctgaagctggagaatcacctgggcccgagaaagcagaggttgcagtgagccaaaatcatgcccgccgacactttgcatccagag

SEQ ID NO: 587203 - DNA, 179 bp, Homo sapiens
ttagggctagagtatggggggaaatagggaaatggggagtgactgctaatgggtatagtggattcttttagggggtgatgaaaatgtcctgaagttgactgcagtgatggctgcccaactctgtgaattaacttaaaaccactgtattacagccgggtgcgctggctcacgcctgttac

SEQ ID NO: 587204 - DNA, 288 bp, Homo sapiens
ggacggatcatcaccaaaggtagcgttggtatcgtagctaaatgggaggaggtttcatcgttgataaatgtcgtgactaaagaaaccctggcgaagatagaggagacacctgctaggtgtaaggagaagatggttaagtctacggaagagctcccgggatgaggagtagttccctgactcaagggaaggagtaacactgatacaacctgatacctgactccggacctccgactaatagcagcatgcgcagccaggacagataaggcagcagcagggcaggataagagt

SEQ ID NO: 587205 - DNA, 367 bp, Homo sapiens
gtgtactcttgactacgagtgattaatccgttgtaatggagggacctataacagtgacagagggaggacaggacagcgaatgatgctgaattgaacttggatcgtactgactgtgcagcccttcaacaggtgtgtctttcagcaacatagatgaccagatgctgctattttccattaccgataagagacgacatgtgtgtcctttgcttccaggctgacattgagattcgaaatactggcttgaacacgcattgtgcattagtcaggtcacgcagtgaaggctatttttacaatgctgattattacttcctggcagggaatgacttcatggtgcctactgtatacgcacacctagccattgcttttg

SEQ ID NO: 587206 - DNA, 884 bp, Homo sapiens
  misc_feature (26)..(26): n is a, c, g, or t
  misc_feature (34)..(34): n is a, c, g, or t
  misc_feature (40)..(40): n is a, c, g, or t
  misc_feature (46)..(46): n is a, c, g, or t
  misc_feature (59)..(59): n is a, c, g, or t
  misc_feature (97)..(97): n is a, c, g, or t
  misc_feature (99)..(99): n is a, c, g, or t
  misc_feature (108)..(108): n is a, c, g, or t
  misc_feature (122)..(122): n is a, c, g, or t
  misc_feature (129)..(129): n is a, c, g, or t
  misc_feature (137)..(137): n is a, c, g, or t
  misc_feature (149)..(149): n is a, c, g, or t
  misc_feature (166)..(166): n is a, c, g, or t
tccccaggaggcgggacggcggcggngggggganaggaanaaaaanaagcgtctccagntgaagccattgcagccctccggtctctccgcaaaaaantncctggcccngatgagcccccgcnggtgcgntccccgantatccccgaggngggctgggggcacgggncccagcgccgacgatcgcgtgccgtttggccctgggagttaggttgtggtgacgggatggggcttctcccttagccggggctcacaagggccagagaagattccgtgaagtgtctgcgctgccgtgctctacgccctcaatcgtgctcttgggtaaatgtccatcagtgtgtgggcgagttccggctgggatgagggattacctaaatatggtcctcattttattgcagaaccgagggtaggcggaccgcagtcttttggatttacttccctgtggtccatccggtcatgatggcggttggctgtccttatcatgggggggatgtcggatctctgtgtcccaggtgacacgactctgtgcttcctggctggcacttggccaagtttgcttgcccttcctgtggacacactgccttggccgtggaccttgacccggaacctttggttccagccacgggcgactttggccgttgagcccgggtgccaccttttgggtcccaagtttggcgggtacctggctgggatttcccgcaaacgtcctggcgcgggagcttctccccggcggtcgcatgccccaatgtggcccccactgttcgtagttcttccttttgcctcatgcgtcgtcttcgcctccaggggcggccacttcctcctcccggctcgtcgtcctggtagtctttacctcgcgttgagcgcagccgcttgtctgcgtcttctcc

SEQ ID NO: 587207 - DNA, 112 bp, Homo sapiens
aaccatctatggaacccttaaagtttctaggagaattcagacatgttgtgaaaaatgtcccactctcaatgggctgaatgtattaccatatctcatactaaaattactcttc

SEQ ID NO: 587208 - DNA, 133 bp, Homo sapiens
acggatgctatcagatgtgattctgtggcggggaggtaatgtgtgtgattgtgtgtctgtgtgtgtgtctgtgtatgttgtgtgtgtgtgtatgtctgtgtatgtaacggtgtgtctctgtggcggggggtgt

SEQ ID NO: 587209 - DNA, 851 bp, Homo sapiens
  misc_feature (160)..(160): n is a, c, g, or t
  misc_feature (224)..(224): n is a, c, g, or t
cgaactagtgttagtagcaatgaatggtaacgacgtaagctaccacaagggggtgtgtgcataacataatgaagtaagtgttaaaatgagtagtccaccgcacaattcgttgatacacagcacagcgctggttttcatattgtgaaaatgcttacattcnggaagagaacacacttgtggtgtggagtcggtcactcattctgccctggtctctcctaaaaatngatgtgtgttgcttggcgtcgcacaggagcccggctcacccgtcctgactcttgctagaaaaaccgggtcggatgtcgagagcacaccacggggggtccgcacggaacgcgccgacacacacaaaaggggagaacaccttgttagtagatcaagatagcgcggggtagacaatcattctgcgatggccatttggcaggtagaacgccaccgcagaaaaagacagaacgtcgaatggcttgttattggttttcgaatagaagccactcatgttaatcatatatattggtgcgaggtatctctcagcaatatacttactgtcaggtacattagaagacggcacttttgtgtgtggttccacacacacatacgtccagggacacattctttttgtgtactactgcggaaatacgagagtagtagcaccgacccacaaagaggggggttatagagatgtgggtgtcgccgcccaccaccacgcggtggtttctactctgacaccgcgtgggacacttgcgtgccggccccttgttctacaaaagcgggggttcctgttagtacaacccctggggtagctcgatggttgtagaagaacttatgtgttgcccgacccccggcaaacaatgtcg

SEQ ID NO: 587210 - DNA, 419 bp, Homo sapiens
ttaattaaggaagaagaagaaaagcccccaataagcaaacctcttctcccgggggggtgggttttttaataaagcagggggcacaggttttttccctggtaaaaagggggcagggggccccaaacaaataatggggggttgctcccttagggggcccccccggttttactttttattcctgcgggtagtatgttggggggagttggggggggaaaactttttcccgcaggaaacaattttccccattattccccccaggtaaaaattcccccccaaaaaagggaaaaaaaggtggtgctcccccgggggggcggcctttttaaaaatagtggcccccccgggcagcaagaattcggcaggggggtaaactttggtgggcagttttaaaagccttcctccccacaattttggggaaagta

SEQ ID NO: 587211 - DNA, 207 bp, Homo sapiens
  misc_feature (123)..(123): n is a, c, g, or t
gtacgagataagagtttgtccttcttgaggtggctggtgagtattttcccaggcccctgcctgcgaggggatctgaaacagacctcccttccaggttggcagctgcaaacctgcacaagatanttggtgacactggtgtcagtccaaagcccactgccctgtcattcttccacagcttcagtgtgacaagagtagaaggagtgtctc

SEQ ID NO: 587212 - DNA, 468 bp, Homo sapiens
  misc_feature (38)..(38): n is a, c, g, or t
atatgtattacatatagagcattgtcttctatatgtanagagttcttataaaacaataagaaaaatatttcctaactagaggaaatggacacataattcataaaagaagaaacaaaggagcaattaagatataaatatatttggctttgttgattaaagagtaacaattaaaatgacaggtgacttctgggccggatgcagtggctcaagcctgtaatcctagcactttgggaggtagaggcaggcatatcacaaggtgaagagatcaagaccatcctggccaacatggtgaaaccctatctctactaaaaatacagaaattagctgggtgtggtgacgtgcacctgtagtcccagctactggggaggctgaggcaggagaatcacttgaacccaggaggcggaggttgcagtgagccaagagtgcgccactctactccagcctggtgacagagtgagactccatctc

SEQ ID NO: 587213 - DNA, 205 bp, Homo sapiens
tagaacacccacagcacactgagcacatagttgacgattgttccgagtgcaaaactgatcgtcccggccgtcagcacctcgacgtgaaggacgtgcgtcaacagcagaagcgcgccggtatcgacaaccgcggcgaccgctcccaccacgagataccggagcatctgcaggagcccgttctgtgtgcggtagaccaccagtcggc

SEQ ID NO: 587214 - DNA, 279 bp, Homo sapiens
  misc_feature (27)..(27): n is a, c, g, or t
  misc_feature (47)..(47): n is a, c, g, or t
  misc_feature (56)..(56): n is a, c, g, or t
  misc_feature (183)..(183): n is a, c, g, or t
  misc_feature (217)..(217): n is a, c, g, or t
gatcgccccggaccctcactcctggcngtcgtgagtctctggcgtcnagtgctgantgggcggctggtcctgggtctggtctccatggctggccgcgtttgtttgtgccagggcagcgcgggatccggggccatcggtccggtggaggccgccattcgcacgaagttggaggaggccctgagncccgaggtgctagagcttcgcaacgagagcggtngccacgctgtcccgctggcagtgagactcacttccgcgtggctgtggtgagctctcgtttcg

SEQ ID NO: 587215 - DNA, 319 bp, Homo sapiens
caggtggatcacctgaggtcaggagtttgagagatcctcccacaggactggcattacaagcctgagccaccacacccagcctagatgttttaattcccttctgaatgtttaaaatgtgagcactcctagtgttaaaaaaaaaagtttacatttatgaacataccctatcttttacaaggactatacctggtgtgttttttgggtttctgttagaaagttgtctcattctgttttgtttgcaaagtgtctgaatatgaagactagattcctgaacctaggggtgattaggcaaaggtaccagccaagaactgatgatgga

SEQ ID NO: 587216 - DNA, 799 bp, Homo sapiens
cccgtacacgccgtggtctatgtcccattcgagcccctgccgccctgcgcaactctgcccagatcagggcccgactggaaggaggaggtggtgaccctggagaacctgcacagagggctccactccaagcctcctgcctattacgggcagctcccccaggttccacggaccgcaggaccctcacccctgtaccacgggcccagtaccactccgtgcgttcaccctgggccgcccacccacttgggctctctattgggaaaggacccacgccacggaggccacgcccctcgggtggaccacatgggtgaaatgaccgcgccctgtgaaggaccctcccgcgctgccacaaatacgcttctcccctcagtttaccacccacacctattgtaggccgcggcccaggatgacactaatgttgaaggccacctgtcccgcggcacactgaagccctctttgagacccctcgctgtcccacgaacccacgggaggcccagaccttcacttgtgggagacccacgattctcctttgcctgaactaccacaccctggctggaacttgctgctgatccacatgaggtcctagcccctggctgcctggatgcgttccccctgctttcagcataatgtggggcccctcagcgccccggccccgctcaaggccttcctggcctcccctgagtaacgtgaacctccccactccatggccacgggaacccgatgagggttggggggactctgagccgggagcccgagtttgccttcccttctccccggacccataaaatttctaagagagcta

SEQ ID NO: 587217 - DNA, 274 bp, Homo sapiens
taagaaaacaaaagggcagctccacagaagacatccccgcctcgagaacaccaacagcttcaaccttgaccctgtaaggacgccaggattcccagcacctccttgttggcaccctccttcacgatggtgcttggaagccaaggttggtgtccttcgtgcttgagtttcccatccatggcgagaacccgcttctccccggtttgtcactgagcagtggggtatggtgtacaccttacagaatgtgaagctgggaaacctgcaaacttgtcgaatt

SEQ ID NO: 587218 - DNA, 237 bp, Homo sapiens
cacagtgctgggggggcgggatccgagatgctgtgatgtcacagtaactgtcagttcagagcgaagcttcccgtcctttgccgtgtgactttcccacactcctgtaaccatccctccctcccttcttcctctctctctctctcactcacgcatacgcaaatacacagacacactccattcagtgtctccatgactctggagtaaactaacgtctcgagttgccatggggccagcggg

SEQ ID NO: 587219 - DNA, 707 bp, Homo sapiens
agcggaagtggcgctgcactcaatgcggaaagcgcggtgagcgctggagcttcatccgggcacttcataagggatccgcagctgctcccgctcgtccaaaagagacagtgagaagcgagtatctttccggcattcaagcctacaggaatcctcctacctgggcaattacctgggagccattgagaagctgggtgaggttacaggatgaatatgactctgtattatacagcattgttgagctccatctcctattacgtttcccctctaagacaccagctgtccttcggatagagctatccgtagtgacatgactgctgttcttcttgcctgtggcataaagccggaaaataacatgcatccttttccaacaatctcaggtgtctgaactagtacgacaaggtagagttggatccttgtcctgctatggtcgagactatcctcgagttacaacattatacatcagtggaaggcaggagactaccaagaagaagcacgatggcacggtggggctgctcacatacccagtactccagggcagccgaccattctgattgtacaaggtccatgacacgttgccgtgtggggaggatcaaagtcctagcacatggaagctagttacaggatgctagcacaaggttacaagacagaacgtactggggagttcctttccagtgcccgagtccagtctcagtatgtagtgtgtaggt

SEQ ID NO: 587220 - DNA, 1135 bp, Homo sapiens
  misc_feature (872)..(872): n is a, c, g, or t
  misc_feature (955)..(955): n is a, c, g, or t
cggtcattgactgcggttcatgcgcgtctagcagtggtgactgcgggcagacgggtgtctcggaagagagtcggtgcttataaaccttcgccgtgtagttgtgaaccgaagcactgggcacgaaggccaaggtaggagtagcattcctaaagtatcaccgcgtggggagaggcgctcgcctcgagagtagcaggttgaacagggaggagccgggcgggcccaacgagctcacctcctattcggcgagggataaggaatcccgtcagtctctgtaccggcctcggagaaccgagagcgtcgtgtggacagaaatgcgctcgttaaatcagtaacatcgaccgagtcctggcgtcactccggaagccgtgcctctctatgaggtgttggataccgtgtagagtcaagtggggaatctcatctacataacagcagatgctgacgtctcccaagagaagcagacgtcgcgatggacgctacaggtaggctatgccaaaagcgtggctggcgggtctgatccgagatactgccaatcctgttgtgacaatccatcgtctaatgagacgtcacctgagtcatgtccctcgagactagaattacgttagacgtattggtgttccgacacgataatatactctggcaatataatcattacaattattgggctcatgtgagctcaggaatagaatgatgtactccagatgataggaacataatcaggtctacccgtgccggtcagagcaagagccccaggtacataataggagaaacccggtgcgcggctcgatgaaagaggaggtacgctcccgagaaggtatccccatcgtagggcggcaaaccctttattgccgtgcccagggtggttgccacaaggnggtcccataagagagtacggataagaacgtcaggaacggcgcggttgattgcacaccctggactgcgagaacctgtgggccgngccctggcgagggaccgtactactggggggggcacccaggcaaaaccgtcaggaaaaacagctcagggcgtaaaagttccactcttttgttgttccctcggacattcgccggcaaatcgacattaacaacaatacgccgaatcacatccccacacactctcattcataccactacccgca

SEQ ID NO: 587221 - DNA, 238 bp, Homo sapiens
atgcagaacgacgtagtcacctacctagatatgactgatgtatatattcttactactagaagccatgtacaagagtgggaagtgcttacataaaatggaggggcggcaggcggttgcgtgatattattttatttttttattttcctgaagggtggcaggtctctcagcaaagagaaaaagtgctttttgcacacggcttgcggggagtgatataagccagctgcaggctgccattgag

SEQ ID NO: 587222 - DNA, 342 bp, Homo sapiens
agtgtacatgttgtgtatgctcacaggttagataattcattcccccagatatgttttccaattcctgcattcggtcactgtttacattttccattcttttaaatctcaggaaacctgctagagctcagattttaaactacccgtcaagtctaaaaatccagctgtctactactgttttggcaaatgtaaaaactagacagatcaactttctactgctgctacccagtaccaagagattattttcagtcactatttacggctgggctatttgcacattcactgaatctcaaattaaaacagcacacaccatgtacaactcatagatcttaccttgctggaaat

SEQ ID NO: 587223 - DNA, 363 bp, Homo sapiens
  misc_feature (210)..(210): n is a, c, g, or t
tgggtgactctaaggatccttatcgccacacttatcgtctgattcaactcataggtctacatattcttgtacactgagagagtgagggtctgttgtcattgacagctgcagctggactgactggagctctgattatttacccaccacaggtaggttgtgttctgaatctcaggttcacaggttaaggctacacgatcctcatcctccacngggttggagttgttgctggtgatgacgggtttgcgtggctctgcatagactgtgatcgtcgtgactgtggtcctatatgaggcagtgtctgagttatgggcttggcacgtataggatccactattattcacagtggtgttggggataacatca

SEQ ID NO: 587224 - DNA, 850 bp, Homo sapiens
  misc_feature (275)..(275): n is a, c, g, or t
  misc_feature (280)..(280): n is a, c, g, or t
gcaggcgtgagccatcacgcccagccgagggtatcttccataccaacaagattagatgactgaggtgtaatggacaaatgcctatgcacaaagtgagggtatctgaatatgtgcgagcgggagtcgaaaaattccgagctagcttatagcacttaaaagtcaaagcctagacagctagcttcgaacacacagaccttctgcaatgatgctagctcatggcgccgtgctagtacggtgcgtcttgcgtcatcgtgttcgtgtaaccaaaccgaaangtgcncccgtggcccagagccgcaggtcgcggaagacgtgcatcggctaggctcgagctgtacaccatacgcaccgtcgccgcggttacacagtccgactctcctggtggtcaaggcctacctaaagttagactcgggactacagggcgacctcggcacgcacgcccatctaagtttggacattagtaacggagccgacggtcatcaccttgtccgcgccaaggctgggtcttggtccggccaaatgggtcgtactaagaactggctgtcaaaaagaggatagggctcaccatttgtctcggaatcaggggcatgagcctaaccggtacatccacctggtgtggagagagaagactcgcattccgacagctgttgggaactcgcatgacctgggccataacgttctgctggttctaccgtaatgagcctctgtcgaacgaattccacgtctcaagtgagcatgccgggagagagctgagcctcaggatgcccgtagaaccaggggggacgacactatggggcaccaattgggtcttccttgtaaaacttgggggccatgttcccttgaatgactg

SEQ ID NO: 587225 - DNA, 223 bp, Homo sapiens
taggctcaacggggtaggcgtgactagaagacaaggagacgggcatggccgggttgatggattcggttaaccagcgcacgcagctggtggggcaaaaccgcttggagctgttgctgtttcgcctggaaggcccgcagctatacggtatcaacgtattcaaggttgaaagaaggtgctgcagtgcccgaatctcaccatcatgcccaagtccagccaggtggtg

SEQ ID NO: 587226 - DNA, 470 bp, Homo sapiens
tcggtacctctactaggtatcctacaattactccaccaaaaacaaacaacacgctgatatttttctcgtgtgtgtctttttttttggaggcaggtctcactcggtcacccagggaggagtgcaggggcatgatcacagttgatggtagcctcaacctcccgagctcaagcaatcctcccacctcattttttttttaatttttggtaacgatgaggtgtcactatgtggccggggcgggtctgaactccggggctcaggtgatcctccgtgctctgcctcccaaagtgctgggattataggcatgagccacccacccgttcttctggggtgtcttatgtgcaatgttgtcaggccccaacggggaatctggacatctttcttcttccttccctacatcacccaatatgctctccctaaatcggcggtctcccctccatctcggcggctacggactgggccaaggtttacat

SEQ ID NO: 587227 - DNA, 893 bp, Homo sapiens
  misc_feature (22)..(22): n is a, c, g, or t
  misc_feature (123)..(123): n is a, c, g, or t
  misc_feature (236)..(236): n is a, c, g, or t
  misc_feature (300)..(300): n is a, c, g, or t
  misc_feature (515)..(515): n is a, c, g, or t
  misc_feature (654)..(654): n is a, c, g, or t
  misc_feature (674)..(674): n is a, c, g, or t
  misc_feature (719)..(719): n is a, c, g, or t
  misc_feature (734)..(734): n is a, c, g, or t
  misc_feature (750)..(750): n is a, c, g, or t
  misc_feature (786)..(786): n is a, c, g, or t
  misc_feature (801)..(801): n is a, c, g, or t
  misc_feature (809)..(809): n is a, c, g, or t
  misc_feature (865)..(865): n is a, c, g, or t
ggggggggggggggggggtgtnttggtggggccaggcgctgggtggcaggacaccgtgttggggggtgcccagtgggaggtggtgtggtctacacccagagaactaaaggggtgaccgcagtnacttgctccctaaagccctctgctctgcacctcccgccacagctgggtgggcagtcagtgtggcctctgtccaggtggtgggggcatccggggaccaggtgggggcgcacgcnggagcggtgcgtttcaggctgcaggtgccgtctgcccgtctcacttccggcctctccactgtgntggacaccctctctgagcagctttgctggaaagagcggagagcctgctgcaaaccaggcaccttgtaggcaggcaaggaggcagagtcctcaccagcccttccagagccaggccagttagagagggcggccctgcagagtcctatgttcaaacgcagaaggcgcagaagcagagcagggggagggccggccagggcctctgccaggttagaagtnaccatcgcgctcccccaggggctgtgccgcctgctgcctggcagcctccaggaaggccagctccttggcttccttcttctggtttcgcgcctcatactccaacctgttggtgatgatccgctggacgatgaggtctgtngtgaggttgctgccactgtnaatctgacggaagatgccccttctcttgggctcctggtatgggtnggagccatccctgtnagggataatttctgtnttgccgtgacacaccaggtccaccttgaagtgactnaggagctctgctgtnaccgcgtncggggctccaatcaccacttctgaaacgtaccggcaggacagcccgctcagagtcngtccatgcagattcatgaaggggtagtc

SEQ ID NO: 587228 - DNA, 100 bp, Homo sapiens
tttatttaaaattgtcagcggatctgctgtattatttaattgtattagtcttataagagaatacttgtaagatgaaaaagtggcatatgtgctctaaatg

SEQ ID NO: 587229 - DNA, 602 bp, Homo sapiens
gcatcatctgaggagtcgggagagcacatcatcgcgggcgccgtgcgagctgcacctgtgagatctgcctgaaggacctggaggaggaccatgcctgcatccccatcaagaaatctgacccggtctgtctcgtacctgcgagacgtgtcatcgtgaagagtcgaacgtgctctgcctctccaatgtcccccaagaagcatcaagcggctgttacagtgaacggcgcaggaccctttcccctgattggcctgggccgaggacatccgattacatacgtgcagacaggtggtaacaagaaccagatccagtgacgctccaaacgccaagctgggagacaagctgcctaacccccttagggcacaaaggaacgaacagcggtcaccgacagctcgagagaccccgatggagccttgaaggggcaccctggcaaactggacttcctcgggttggctatactggcgggccacccatagaaaccggtgctaccaccggggaacccccaaaaacgagtacccatacaaaccccgcacagaatttcaacacccaaaacggagctggctttggcccgcgttaacgctttcacaccaccgaagcaattcaaa

SEQ ID NO: 587230 - DNA, 153 bp, Homo sapiens
ggcatgtgctgtaggcagcgtatgatgttgcccagcaggaccagggtcacttgctgcatgtcaggcagaagatgtgagtagagcagctccactgccctgcagctgtgtgctccttcccgcgtctccttcagacagctccgttaatcagtgttg

SEQ ID NO: 587231 - DNA, 328 bp, Homo sapiens
gagatggggtcttgccctgtcacccaggctgaagtgcagtggcatgatcatcgctcactgcagccttgatctcctgggctcaggcagtcctcccacctcagccccccaagtaggtgggaccacaggcacacaccaccattcctggctaatttttttttttaacttttagtagagacaggctcttgctatgttgcccaagctggtcttgtactccttagctcaagtgatccacttcagcctcccaaagtgctgggattacaggcatgagccaccacgcccagcctatggaccttattcttaatccaggcttcccttctgtcgtcttctc

SEQ ID NO: 587232 - DNA, 392 bp, Homo sapiens
cggaacctcgagcagactgcggatgaagatgctgacaacaatgaggaggatccagaaggctcttccgaggaggttgttgatgaggacagattcctcgctgcacctttcttgaagatgaggtccgacgctcctgctggggagagtcgcacgttcctcaaaaagatggatgatgaagatgaggacgcataagattccgatgatgatgaagactgggacacaggttccacatcttccgattccgacttagaggaggaagaagggaaacaaaccgcgctggcctcaagatttcttaaaaaggcacccaccacagatgaggacatgacggcggccgagaggaaccgggaggacatagctaagaagatgcccgacaggaaatccaagcgcctggatca

SEQ ID NO: 587233 - DNA, 854 bp, Homo sapiens
  misc_feature (78)..(78): n is a, c, g, or t
  misc_feature (90)..(90): n is a, c, g, or t
  misc_feature (110)..(110): n is a, c, g, or t
  misc_feature (158)..(158): n is a, c, g, or t
  misc_feature (778)..(778): n is a, c, g, or t
agtcctcatcccagcgtagacatcccagctggagctcgcagtcagagactcagaagatcacatcactcccagagattntaaccacctganagcttctcattgcacttggnctgatgtccagactcttttctctggcgatccaaaccccccaagatctngcccttcccttcctccccaccctcgtttcttcccacatcccctcatctgccgtgcagcaaccatgcaggctttctcttgttcttcagatacaccaagcctggttccaccttatggttttgcatttgctgttccctatgtgtgcaatgctcgacctgagcccgggttccctggctcagggaacagaggctgacaccacactcataacacctgatgggatggaggagatggaggtgggcggaagaatgtgttccctggctcagggaacagaggctgacaccacactcataacacctgatgggatggaggagatggaggtgggcggaagaatgtgtaatccagacagcagcaagagtaagggagaagggaagcaagagagagatacataggctgcacatgcattactgagctgacccatcacttcttgagaaactctagccagttgctctgacacatgggaatctctggagtggcaatatggacacacttgtcccatatgcacatagtgttccccaatatccaccatataagatgccattacaaaccaggcgttttgggaaatgtgtaggctaccatggaaaaagaagtcttatttggcgaggttcctctgtgtgtatatatnggcgcggggtgttatcgagggttgattggagtcgtacatactagcgcacactcgcgggagaccgcgccactaatcg

SEQ ID NO: 587234 - DNA, 1118 bp, Homo sapiens
  misc_feature (342)..(342): n is a, c, g, or t
  misc_feature (354)..(354): n is a, c, g, or t
  misc_feature (374)..(374): n is a, c, g, or t
  misc_feature (422)..(422): n is a, c, g, or t
  misc_feature (1042)..(1042): n is a, c, g, or t
gaataagtctgggtgcaggcgcagtggctcacgcctgtaatcccaacactttaggaggccgaggcaggcggatcggctgaggtcaggagattgagaccatcctggccaacatggtgaaaacccgtctctactaaaaatacaaaaattacccaggtgtggtggtgcacacctgtaatcccagctactcaggagggtgaggtaggagaatcgcttgaacctgacaggtggaggttgcagtgagctgagatggcaccactatactccagcctgggtggcagagtgagactctgtccccaaaaaaacaaacaaacaaacaaaaaatcacatcactcccagagattntaaccacctganagcttctcattgcacttggnctgatgtccagactcttttctctggcgatccaaaccccccaagatctngcccttcccttcctccccaccctcgtttcttcccacatcccctcatctgccgtgcagcaaccatgcaggctttctcttgttcttcagatacaccaagcctggttccaccttatggttttgcatttgctgttccctatgtgtgcaatgctcgacctgagcccgggttccctggctcagggaacagaggctgacaccacactcataacacctgatgggatggaggagatggaggtgggcggaagaatgtgttccctggctcagggaacagaggctgacaccacactcataacacctgatgggatggaggagatggaggtgggcggaagaatgtgtaatccagacagcagcaagagtaagggagaagggaagcaagagagagatacataggctgcacatgcattactgagctgacccatcacttcttgagaaactctagccagttgctctgacacatgggaatctctggagtggcaatatggacacacttgtcccatatgcacatagtgttccccaatatccaccatataagatgccattacaaaccaggcgttttgggaaatgtgtaggctaccatggaaaaagaagtcttatttggcgaggttcctctgtgtgtatatatnggcgcggggtgttatcgagggttgattggagtcgtacatactagcgcacactcgcgggagaccgcgccactaatcg

SEQ ID NO: 587235 - DNA, 608 bp, Homo sapiens
  misc_feature (544)..(544): n is a, c, g, or t
tagtgccagtcctgcagtaggggggggcggaatagaaagataaggttttcgagaggagaagtgcgccaatgttgtcttttctttccacgttatactgtgtaaggtgatgttcccggccgctgttgcacctgatagtaagggacagatttttaatgaacattggctggcatgttgggggggacattttagttttctgatgccacatagtcttgcataaaaaagggttcttgccttaaaagtgaaaccttcatggatagtctttaatctctgatctttttggaacaaactgttttacattcctttcattttattatgcattagacgttgagacagcgggatacttacaactcactagtatagatgtaacttattacaggatcatactaaaatttctggcatatgcatactgaagacattttaaaaaccagaatatgtagtctacggatatttattatcataaacccgacctttggctaaacacccaatttaactaaagacctactgtcgggtaggttcaattagaggaaatgtttattggcaatanttttggcttttaggcttgtgatccaacaaaataacccttaaacaatcaccacttaaattatgtg

SEQ ID NO: 587236 - DNA, 157 bp, Homo sapiens
actgaccaatatactatactccactgtgtaatactacaatcgatcagtcataaaaccaactctgtcctattttcccatcaaacacataacacctttccctctatgctgtgatacctcctcttcacacgcatacataaccattatcaccatataaaag

SEQ ID NO: 587237 - DNA, 223 bp, Homo sapiens
caggctcgctgtcgctgattacaggcacgcgcaacacacctggataatttttatattcttagtatagatgcggtttcaccatgttggccaggctggtctcgaacttctgaccccaggcaatccgcctgcctcgacctcccaaagtgctgggattacaggtgtgagccaccgctcccggccccaggagccctctcaatcagagtggtcatgccaggatcttata

SEQ ID NO: 587238 - DNA, 324 bp, Homo sapiens
gctcgacctttgaagctccagctcaaagggttttttgaatcctggttttgcttgtaggcagataatgcaccatgaactttcctctctattagtgaaaacctttcagttttggggtccatgttttcagacttcttaaggagcttgttggagtctgaagaagcttctgctaaacccatcactgtgagtattcttgggagttcttttttcccttctcctgcactttctttttctttacctcttcttcagctatgcactcctattccagttccaacagcaacccattagtcaattcatcaggaaccccctctaggaattactcaatgt

SEQ ID NO: 587239 - DNA, 102 bp, Homo sapiens
tgtatctcggctctaccttgtctctcggctctaccttgtttctcggctctaccttgtctctcggctctccctcggatacagtagggagacaaggtagagccg

SEQ ID NO: 587240 - DNA, 240 bp, Homo sapiens
  misc_feature (5)..(5): n is a, c, g, or t
gcttntgaggatcccatcgcgtgctgagcatgtatccgcctgcgagcatgtctttggttgtatcaaattctatgcaagatgttttctggattccttttattttttagacagggtctcactttgtcgcccaggctggtatgcagtggtgcaatcttggctcaatgcagcttccacctgctgggctcaggcgattcccctacctcagcctcctgagcagctgggactacaggcatgcaccac

SEQ ID NO: 587241 - DNA, 116 bp, Homo sapiens
cttctggaacaccacgtaggctacctggaaacccggaactggctttggatgaaaaaacttcgaccttgactcctttgggctctcagccaggtccggcttctgttgcaactccaaca

SEQ ID NO: 587242 - DNA, 1392 bp, Homo sapiens
gttctcaggacttcccctaggagcaagacctctgagcccgccagagcgcggtccgcagcggtccctcgcgcagcgatggcagctgaagagactacgtcgctagaagaaggaacaagggttaacgaacgattcgttcactaagaggttcttaccagggatcgatgaacgtcgggaagacagcagcttcgaacgtatgggaaccaagttggcttcggcttggcgtcatctggcgcacacaggatggctcatgatatgtggaccatggacgacgtagaccgtaggatgacctccgagtttggtagtgacatcaatctctgtgcagaactgccaaggcagcatacgctgaatggctctattgctgatgaccagtcacaacgtagactggctagcgctacaagataccaatacggagagcgagaaggtcggtaaactaacaaaggattgtccgctgggtaccgggtctacgattgtggatgcctagtcaggcttgatatgaatgggtatgcaggccaggggaggtcagcgcgaaccactgtggcactgtgctccccagcaaagacactcgcgatgtatacctacgtatctcgtggcctcgtgaacgtctattcgtccgacgagggaaattctgcaatggcataggtccactcttttggcaaccagtggacccccaatgaggtccaagcccgaaagccgaaaacgtcacttaccagctcgataggaatgctcgggggaagcatatggtgtgtcgggggaacttctgggaccttttccttggattgggggtgcagcgaaaaccgtggtgggcgtttggacacaccgtcgcgttgacccgtgtggggcacgcagtcgggagtgcaattgattaaccgactgcggtttcgcattccgtgggagagaagtgttctcccattaagggaaccactacatggtcatttgaggacgtggaagagcataggagacgcgccaaaccgtagaaaagctgtgccatgttggggtagtacagacccacgatgggttggtggggttgtccccagagagggcaaccgcgattgagctccccaaggtggctgggatctgtcgccgaggtgtgtccgttcctgccacttatccgatgttggccacaatgtggcgcgtgcgcgcggagaagtgtccagtctaggatggggccccaccagggggccctagggaggaaacggatgggcccaggaaaagggacaacaaacggcacggacactcaagaggggaaaggggagcgagagaggactgggggccaagaacacctacgcggaaggaacacgacctggggggcggccattgcccccaaggagatgtggccagtggcgaaagacatatgcggccaagcgggtaccgaaaagtggcgacaacggagag

SEQ ID NO: 587243 - DNA, 204 bp, Homo sapiens
  misc_feature (128)..(128): n is a, c, g, or t
  misc_feature (195)..(195): n is a, c, g, or t
gggccgcgtcgatacggctgcagacgacagaaggggctgtctcttggatataagccattttaactggggcgagatgatatctcattgtagttttgatttgcatttctctaatgatcaatgatgctgancaccttttaatatgcctgctgtcattgtttgtcttcttttgagacgtctattctcctgtggcctatntttgattgg

SEQ ID NO: 587244 - DNA, 232 bp, Homo sapiens
ctgtagaccatggagagaggacaaggtatgtacttcatgggatgtagaaggcagaaaatcatggtagacttcctgagtacttacagtgctgtcaaccaagggcatagtcaccccacagatagtgcactgctctgaagagtccagtggacaaatagaccttcacatctagagctttctatcataacgtacttggtgaatatgaggagtatattcctcacttaacaactaccac

SEQ ID NO: 587245 - DNA, 288 bp, Homo sapiens
cacctcgggaaccgaggtgataacgatacacacacctacaggatgaacctgatctcttatagtagtatcgcttcatcataactcttgccacacctaacctcctcggactcctgccacattcatttacaccaaccacccacatatctcataaacctagccatggcacatcacccattatgagcgggcgcagagctactaggctatcgaactaagatactccctgccctagcccacttctataccacaaggcccacctacaccccttatccccatactagttattatcga

SEQ ID NO: 587246 - DNA, 242 bp, Homo sapiens
gccccattttgcctgttgttccagttttggtcaaggcccttggggggtggccccccccccaggccttttaaaaaagccccagtttaagggccctgggaccagctgccctacttcccaggtttgtagccaggaaaagggggcatcccaaagttaatggtccaaaaaggggggtgtgagccccgcagggatgggcccgccccccccttggatgttttcagcaattaaatttttttaagggggca

SEQ ID NO: 587247 - DNA, 149 bp, Homo sapiens
gagacacgcacattcgataatcagtgggtcctagcgtatttcctgttgtaacacataggaaatatctccttttagacgtatagtatatttcctaggaaaacataaacccatggggaagatgacaacaagagacacgaggaatcccaaat

SEQ ID NO: 587248 - DNA, 102 bp, Homo sapiens
ttgttacccccggggcccggaactcggggggggggggtttcagtgacccaaaagggggggggtggggcccccccccctgggggtgggggaggggcgcgggca

SEQ ID NO: 587249 - DNA, 80 bp, Homo sapiens
gcggccgcctactactactactactattgctcgaattcaagcttctaacgatgtacggggacatgcaataaatgttctgg

SEQ ID NO: 587250 - DNA, 918 bp, Homo sapiens
gagctggtgatgatgccgctgctgggcgcggtgtctcatggaggcagacgtgcttttgatctctcggtccgtccttcttactcactatcctagaggtgctgtgctcagtcgccccggatggcatacgacttcgaatgtgacactggcacgagtgagcccccgtggaggtctcctcggagaaaatattctgtatggggttgcttgactatcagtgccgtgcaatcgtatcatcacgttgatacggtgggagtgcctgaatgtaatactgagtcaccagtcatcttgagaacggtcagtttagagggctggtgcaaaaggatgagttgcacattgttgaagcagaggcaactgaatttacgaaggcagtccaattaaagtaacactgtgcaaactttgaacaatgtctgtacagccaacggatttcccttgggggctcttgaaataacaccacccagtggtcttaacggtctgaactgtggttcaagggccagtgcctatagtggaaccagcactttagtacctgtgccaggaacgatgccgagtcagacgcatgacagaggaggacgatgtgacatcttagtatattcctgggaaacgcggctcttgccccctgggagggtggatacgcaagggttcgaaccgcagcaaccgtgacacttgctgcttgctgcacacgactgacgatgattattcaacagggtgatgcactgcagcgtactgatcactgctgcctctcgatgacgaggaagctactgcacaccgcccgtgcggccttatccgcatacccggcacaggctaagcaacacatggcattaatcaaacgtctaccccgatcacgtgcccaccccaaccgggaaccccagcacacagcagcctcggcgcattaccaccgtgctcatacgggatctacaggccccg

SEQ ID NO: 587251 - DNA, 720 bp, Homo sapiens
  misc_feature (7)..(7): n is a, c, g, or t
  misc_feature (720)..(720): n is a, c, g, or t
tggaaanaccggggcacgcgtactcggtcaccggagccgaggaggttgaaagtaacggaagcctacagaaactgatccgcatccgaaatccctggggagaagtggagtggacagggcggtggaatgacaactgcccaagctggaacactatagacccagaggagagggaaaggctgaccagacggcatgaagatggagaattctggatgtgtttcagtgacttcctgaggcactattcccgcctggagatctgtaacctgaccccagacactctaaccagcgatacctacaagaagtggaaactcaccccgaacacattctggatgaaccctcagtacctgatcaagctggaagaggacgatgaggacgaagaagatgcagagagcgtgtgaaccttactagggtgctcattcagaagcaccagacgcggcataggaagatgggcgatgacatgcacaccatcggctatggcatctatgaggttccagaggagttaagtgcgcagaccaacattgagctcagctgaaacttgttcctgacgaatctcgccagggagcgctcagacaccttcatgaagcttcgcgaggtgctgaaccagtataagctgccgccagtagagcacattctcgtgcctctcatcttcgaacccatcatggatggtgatttcagaatccgggctttcttggaaagaaagctgactgacacactgacgaagatgan

SEQ ID NO: 587252 - DNA, 218 bp, Homo sapiens
  misc_feature (212)..(212): n is a, c, g, or t
cagaaattctcccaccttggtcccccaaagtattgggattacgggcatactcactgtgcctggcctattgtcatgtttttttttaaaagaaagctccttgttttctgattacttgtggatacgtactcctggcttaatctgagacatgtacattttttactgtaatttgtttgttaaaatataaatatttctcttctaatttctggcccatntcagga

SEQ ID NO: 587253 - DNA, 536 bp, Homo sapiens
  misc_feature (452)..(452): n is a, c, g, or t
  misc_feature (457)..(458): n is a, c, g, or t
caattataaattgtgcctcaaagtgcacacaaactacacacacacacacagagcctcaaagtatgtgaatcaaaaacaacagaacaaaagcaggaaactgacatccaaaattatagctggtgaattaatactgctctctcagtaactgacggaacaaccagataaaaatataggaaaaatacggatctaaatgacaaaatcctgacccaaatggtacttggcagtgccaagatagactgtatgtcgatggattgagaaaaggttcaagcctgaaatagtatacaaaggatgttgtctgaacacttgaaattaaattagaaaccaacaacaaattgatatccagaaaagcctcaaatgtctgaaaaccaagtaataaactttgaaataccctgtgagtcaaaaaagtattcacaaggggaactggaatgtatttggaataaacttgttataanaatcnnatttctggtagactaaaggtgacaattctttcctgctcctctcttctgtgaggaaccattccccttaaaaccttggac

SEQ ID NO: 587254 - DNA, 757 bp, Homo sapiens
atcttcataatacatggaatagatatggtgcgttcacatgtggaacgacgaatgtggaatgcttacgacatgtaagaaacaagtcatgttgaatatttagcatatgggtaactccactagatggttatatagtaagagaaggatcttctggtcgtgcttgatatgatatagaagcatttcagcatgaattattaagttaatcaaatgaaacagttagtactatagggatgcttcgaataatacatatactttcacacggcgtaagatgttctttgctttaaaaacaaaactagaaaaacaaaaacatgtctccttcgtaagggaagtcttgtcttatggattgctgttcatcatttcctgattttgtatatttggctcacattagttcatacacttgtacttcccccttctgtgctaagctgagtactactttttatgacaagccaaatgtgagtagagattcctccactgggtgatgatattcccattctatgggctcttacaacattgatgtcaactccattcatttggcttatatatgttacatatttgcctttttatatgtttaacctagtctaatcaaattagcagcttcttaaggcagatactgtttctactcataatactttcatggttgccttatgaatcatgctcatttattttattcattcaatcacatattcgtaataggtatcgagttcactgtttgcacattgttctaagcaccgaatatctagtacgtgcattacacagacca

SEQ ID NO: 587255 - DNA, 847 bp, Homo sapiens
  misc_feature (614)..(614): n is a, c, g, or t
tgaaaggcaaggtatatgaagattctggcatcccccttccagtgtgagtcacccagagaaagggcccaagaaggtggcatctggtgtctagtcacctcgcctccagttgtccgccgtcactctccagtcaagtctcgcagttgtccctgatgggcggggggtccccggccataaagaaacataaggctgatgtcgacgactctagatgctcatgagactgaactccggtatgccacactaggtgacgtggtgtgatatggaagggctaggaggacaactcattccagctaagaatctctgacttactgcaacacatgtgcgcatgaaccattgagaatatcgtggatcttctgcatgacctctggctgatcctcctctcctcgcctgctgagcctttcacctctgacctctcactgttcatgccggcacctgtgtgatctcctgggatcgtccgaagcaaggtgcgtgctacgagagagaggctgaaaggctgctggggctgcagcctctgctattacccaggataatgcatctgacccctcgaccctttgacttcactcttgatgcgacatattttagtaccaggaaaaacaattaaagattttccctcctancaattatcgatctgaccccatcgaaaacacacactgttggcgcgcctgggcccccaaaaacattcccacaacccagcctgggggcggcgggccccggggcagcgcaaccctggcctcgttccccaagaactccgggcacgacagggtggtctcccccaaaaaacacgcggggcaccgcttttacaacccccgagggccgggccaccggcttccacgggcccacgagccgttac

SEQ ID NO: 587256 - DNA, 633 bp, Homo sapiens
gtgccgaaacacattcaactactccaagtaccccgcgggggtagacgcaagtcccccgccctttgatgaagttttcagaaccgtctttcccgcaaactgctcgttatgaaaaagttactagtgacaatctttcagcaccgggtcactagtagaattgaagaagtaatggcccacatacgagggcacaacagttgcaataaaccatatcggcgcgccacctgtctcccagcggcgccgctgaacatagctgcgcagcggaggacgcgcccacacagttgcgccactctgtctgcggtatttttattggggtggccatcaagaggggaattctctgctgtgtgtttctcgcacaaatgagcaaggagccccccctcttctctcgacgcgaaatctattattgtatagagagtgcacacaccgcactcagtcataaaaggatgggcggggcagcacacacaccaccaccggccgcacactaacacacgctcattatgtgggccttgtccacacgcggattcttcgagtgtgagcccatgtaggtgcaacaggagatatttcatagaatatatttgtcaatgcgcacgcagactataacaattaaacattttcctctgtggccacaataaacaagaa

SEQ ID NO: 587257 - DNA, 504 bp, Homo sapiens
  misc_feature (18)..(18): n is a, c, g, or t
  misc_feature (81)..(81): n is a, c, g, or t
  misc_feature (239)..(239): n is a, c, g, or t
cgggaaggcatgtaaccnccctaaacccatccccgagaacatcaagaggatcccacaacagttgaagagccttttgaacgnagtagccccgctcgtatcctatggtttcgctttcccacagtttgttaccctgcagtcaactgcagttcaaaaatattaaatggaaaattccagaaataaagaattttaagtctcaaatggtgtgcccttctgagtagcgtgatgaaatctctcgcctngtggctccagccggccggggatgtgagtcatcccttggtccagcacatccacgctgtatacgccacccaccctgctagtgacttagtagccgtcttggtgatcagatcaactatcccagcatcacagtgcctgtgcccaagcagtcctcactttgcttaacagtggccccagagagcaggagtagtgatgctggtgattcggatatgccaaagagaagccacaaagtgcttccttttaaatgaaaaggtgaaaccccctcaactt

SEQ ID NO: 587258 - DNA, 179 bp, Homo sapiens
gcaacccactcaccttactaccagacaaccttagccaaaccacttaccaaataaagtatagcgatagaaatgaaaccttgcgcaatagatatagtaccccaagggaaagatgagaaaattatatacccagcatatatatatgcgcagggctctaccccctatatccctctgcatatatg

SEQ ID NO: 587259 - DNA, 326 bp, Homo sapiens
cccgatgggtcctgcggttccttgtcctgcacctgctgtttctggagtgagctcttgatttaggactactcacatttttccgtcaatgatctgtgacctctgagaggtcacaggggtaaaaataatacatggatgcatgaaaaccttccttagctcatgggaaagtatcctgagaatgggtatcaatttccctgcccaaatttttacatggagccaaactctgtacaaagcacatcgaagcctaatcacatcgagcattccaggagacactatgtctgatccgttctctcctgtatccccgagtcaaggcatggtaggcacgagga

SEQ ID NO: 587260 - DNA, 337 bp, Homo sapiens
  misc_feature (32)..(32): n is a, c, g, or t
  misc_feature (125)..(125): n is a, c, g, or t
  misc_feature (314)..(314): n is a, c, g, or t
  misc_feature (332)..(332): n is a, c, g, or t
cttttttcagcccttaccctccttctaccgtntattagtccccaatgttttttgttgccatctttatgtctgtgagtatccagtgtttagctcccacttataagtgagaatatgccatatttggntttctgttgctgcgttaattcacttaggataatggcttccagctgcatccatgttgctgcaaaggacataatttcgtccttttttatggctgtttagtattccatggtgtatatgtacatatttcctttatccaatccattactgataggcacttaggttgattccatatctttgctattgtggatagngctacaaaggacttatgnagtgc

SEQ ID NO: 587261 - DNA, 762 bp, Homo sapiens
gcctatgggggctgggcagatcttctgtctagatggtggtctctcgccatctatagatacactggatcatatcagagcacattgatcgcatacgaagaagttcggcccattgcaggggtccaatgtgtgacttgcatgtggtcagatccagatgaccgtgggggttggcggtcagttatctcctcgaggagcgtggtgtacacctgttggcgcaagtatattgccgtgcgacatgtgtaatcatgccgaagtggcctctacgttggtgtctagaagctcaggctagactaatgatggagggatataactggtgccatgatcggcaagtgtagtaacgatattgagtgctccaacacttatgtcagtcgttgtggtaactaaagctgcatagtcagtggagaagctgtgatgatactctaaagatactctttcttggagttttgacccagagacctcgtagaggcgagccacatgttactcgtcgtaccccagactacttcctgtaatgaaattttaaactttgtaacagtattgcagtgaaccatatatcgactaatggaaatgggaagagcaaagtaactccaaagtgtcagaaaatagttaaagcattcaaaaaactctgttttcacatggaccagagatggtgcttataaaatacaaggctctgtataaaagcgtgacagtttgaatgaccagtccatggtggtgaacgattgggggcaaaaccatttgggtaacgatggagacttggttttggaaggg

SEQ ID NO: 587262 - DNA, 628 bp, Homo sapiens
  misc_feature (402)..(402): n is a, c, g, or t
  misc_feature (482)..(482): n is a, c, g, or t
  misc_feature (487)..(487): n is a, c, g, or t
cacgatggctcacatctgtaatcccagcaatttgggaagacaaggcgggcaaatcacttcaggtcaggagtttgagaccagtctggccaacatggtgaaaccctctctctactaaaaatacaaaaagccggccatgatagcgcacacctataatcccagctactcgggtggctgaggcaggagaattgcttgaaaccaggagacaaaggttgcagtgagccaagattgtgccacagcactctagcctgggcaacagagcgaaactgtctccaccaaggtgggtggactgattgaggccagcagttcgagaccagtttggccaatgtgatgaaagcccatctctattaaaaatacaaaaattggccagtgcagtggctcacgcctgtaatcctagcactttgngaggccaaggtgagaagactgccttagttgaagagtttgagaccagcctgggcaacacagtgagaccctgtctctgctantacanttagccaaggtgtgtagggtgtgcctgtagtcccagcttacctggaggctgaggcaggagaatcactgggaacctgggaggctaatttttttgaattttagtagagaccgggtttaccatgtgggccgctggtctcgctcc

SEQ ID NO: 587263 - DNA, 198 bp, Homo sapiens
gtcgtaagggctgaggatttttggtccacgtctctctgactcaccgctgttcgctctcgccgaggaacaagtcggtcaggaagcccgcgcgcaacaaccatgcttttaaggataccggaaaacaccctgagccgagtggcattcaccaattcgaatcacctacaagccgcacgtaaatcttggaaagtgtgtctgctt

SEQ ID NO: 587264 - DNA, 382 bp, Homo sapiens
agcgcaatgtagtgcgagcttatctctagctacaagataaaaaataataaattcagcggagtgtgttgttgctgttcctattagtacctgcgaagtcacagaggctggagagggatgattgccttaccccaggaagtcacgcttgcagtgagctatgatcatgccgctgcattccagcctgggtgacgcagcaagaccctgtctaaaacaaactaacaaaaaactagggtgcgttgaaaaaaaaatcttggtgaacaacctctcttgtggattgtaatatactcaaagaaaaatatgatgtaaagattcttacatttactctcccttctgggtgtctaatcaaaaagcgtatatacctaagcttagttgacgctcgtaggag

SEQ ID NO: 587265 - DNA, 1340 bp, Homo sapiens
ggcgcgcgccgcactgccgcgccgtgtcagtcgggagggaggggagcgagcaggcgaagccgcggagtgacgtgggtgaagatggctggccttctccgagatgggtgtaatagcctgagattgcgacaatgctagtggaagagatggattggctcctcccaactgatatccaggctgaatctatcccattgatcttatggaggagtgtgatgtacttatggctgcagaaacaggcaccgtggcaaaattggtgctttgagtattccagttatccagatagtcttcatgaaacgtctgagagaccaatcaggacggcaaacaatggaaaaacaacaattaagactggtgcttcagtgctgaacaaatggcagatgaacccatatgacagaggatctgctatatgcaattgggctccacggatggtcttatgttcgctcaacacgcaggcgaatgctaacggcacctggcatgggctgtagagctactaccaggacttcatgacacaggagaacgagactacctaggacacgctatgcctgtcacatcgaacccacgggataagatagacagaagactcgcaggacgagaaccttacaccacctgccagcgcccactcgtctaggagaacacgaaagcgctaccgagcaccgaacacaacgcgggaccaaaagggaccaccagagcggagacaccacggcgcacacacacaaaccccacaagacaaacaacaacacacgagcctagcaacaacaggcaccaagcaacggcaacggaaactcaccaacccaaccgccacagaaaccacaccaacaggacacaatgaataaccacgaggagagataaattacgcattacacggggcgacgagatggagccaaacagcataggagacacgaaacacacacactgcgcgcaaccacgaacccgatctgcagcaccgctagggagaaccggacacgtgcacgacgcaaccccgagcgagcacgaagaatacgaacgaacaagacaacgtacgacaagacaagtgccattgtgcgctagacggaggttaatgaaaggaaagacgagtcggagagtacgatcaaaacagaaaacgttgcgaagcacggtaagagagaggaaacgaacgagggagggaccgacacacagaaagaaaagactgcgcgtagagaagagaaggtgtagacagaacgacagactaggaggtgacagagaataacacagcgggaaccgaacaacaggatgaggagaaggagcaaaaagcacacagagagccaaagaaacaaagaagaaaaagaaccaccacacagcaccagcggcacgaacatgagaataagaag

SEQ ID NO: 587266 - DNA, 173 bp, Homo sapiens
tctattccagtagagatggggttcacatgtggccaggctggtcttgaactcctgacctcaggtgatctgcctgcctcggctcccaaagtgctgggattacaggcgtgagccatggcacacagccttatctgcattttcaaacggaccagtatgatggtcgtggggtaggaggt

SEQ ID NO: 587267 - DNA, 213 bp, Homo sapiens
cacttggggaagggcccagtgataatgcctcttataacacccacagtgagcctcctgacgccaaagccactgcagcaactcgaggtgcctctgatcagtcgtgagacgtgtaactgcctgtacaacatacaacgccaagcctgaggagccgcactatatgtccaagaggacatggtgggtgctaggctatgtggaggggggcaaggacgcctg

SEQ ID NO: 587268 - DNA, 376 bp, Homo sapiens
ccggtccaatgtgttaattttgtagggttttttgtttttgtttttcattttttgagtcaaggtcttgctctgtcacccaggctggattgcagtggtatgatcttagctcactgtaaccttgaactcctaggctcaaacaaacctcccacctctgcctcctgagtagctgggactacaaacacacaccaccacacccagctaattttgtgtattttttgtagagatggggtctccgtacattacccaggctggtctcgaacttctggccccaagcaatcctcccaatttgacctccccaaattctgggattacaagcctgagcaaccacacccagcctcaatgttagttttttgtttttggtgttttttatatatat

SEQ ID NO: 587269 - DNA, 928 bp, Homo sapiens
acggtgcccatcagtaactattacgttggactcgctcatctctcacgacaagtgaagacctcggagcgtccagtgtttccggccaccggggcttcatcccgccgacgtcagatccagtcggtttggtgcctggactgtagtcgattgttcacgtcctgtagtcttcgcgcccaatgccggcagtgttcatcacgtcgtggcgcgcccgtgccctctcagtcgtccgtggtatatcacccgtacggcccccaggcccacacctcgtggcgccgtatcacgctgcatatcatgcaggacttggctcgagtccgctgtccggcgccgtctccttgccctcagcttcccgggccgggttggcctgtacactagcgtccctcatgtccggagctgcctagccccgggctggccgtgcggactgcggcccatgggacgtggccgcagctacccggtctagcgtgtacggctcgcccggggtagctgcgcagaccgcgccccgcagacactgccctcggcccgaggcgcgacgcgctcgccgagcatgcaagcacaaaagagcgagaagggctgatgctggacccctagcaatcccgatggtcaactggattcactgctccgctccacgaggaatgaagcgcgtgccccgtaccctcgaagtacctagacgcttggacactggatgaacgcgagttgctcttcaatactgtattaaaaccagggaccgtcggtatgaccgtggccgggtttctccagtcatcaccgaatcgggcaggatcaaaaatcctggtttccaggtaattcgaccgattgagattgagaccccgcatgcattacgaagactacccgcactatggagtagtcctaaacccctacccaagccttgctgcctcagcacaagccaaggcaaacccaaaatcccttaaattaccca

SEQ ID NO: 587270 - DNA, 788 bp, Homo sapiens
  misc_feature (27)..(27): n is a, c, g, or t
ttcaaggttcttgtcacccccgaatancgcgtgtagtgaaaggaccctcgcgcagcggtggattcaataaggattaaacttagatatagcactttaaaaaatggtcttaaagtccccaaccagtgtctgctgagaacagacccagtccctgaggaaggagaagatgttgctgccacgatcagtgccacagagaccctctcggaagaggagcaggaagagctaagaagagaacttgcaaaggtagaagaagaaatccagactctgtctcaagtgttagcagcaaaagagaagcatctagcagagatcaagcggaaacttggaatcaattctctacaggaactaaaacagaacattgccaaagggtggcaagacgtgacagcaacatctgcttacaagaagacatctgaaagcttatcccaggctggacaggaaggcctccaaggtgctttattcgtctgttggctcagtcatcacacaaaacagctggaagattgtaaagaactccccaaactttataaatcatttgaacgaacaggtcgaaaacttaaagtctaaagtaggggggaaccaaggcctgctggatagagtgacttaagagaagaaagtcttctgaatttcggctgcaaaattgctagttgccaccaccacggagcctctatccagacacaggacacagcgagagcctgtgagattcctaccttatgttctgcgtacccactgccagatgctgcaaagagaggttccaaggcacatcttgttcaacatgcattggcatgaattttctacaa

SEQ ID NO: 587271 - DNA, 118 bp, Homo sapiens
tcggtcacctgcttacttacccagtgtgtcaacacgacattgcaaatcaaggcaaaattaactccattacagtagataactgtaagaaacttggcctggtattcgatgacgtggtggg

SEQ ID NO: 587272 - DNA, 1082 bp, Homo sapiens
tatcagaagatcgtcccgagcattccaagtaatacagtgcatactacgcatctcaagcgcctggatagtagactatggtgcacgcaagagataagccatacgcgatacgggcactcatacccacgataacctggaccagagacagagcgtattatcacaaggaaccatagacagggcatagcaagacactcgcgagacggccaactgactgcatccacggtgaccccaatccccttagactttctcgacatcggggactcgactcacctctatcgtagtgcataaaactacaggataatcgacaggcccacaacatacttgggcagaccaccgagggccaactgaagaaaagaaggacaaatccaagccaacagaacaaacagcaaccatggcaacacacacataacacacgactataccacaaatgacgccacacgggaaaacgattcaccacacagcgagacgcgagaacacccaccaaaaagaaataggacgacaaaaccacacatgatcagcaccagacgtaatgagtgccaaaccgcacacccaatagagtagaacagacagcatacggggagcacaccacgaaacgcaccacaacactgacgaggggaaacaacctggtgacggaaccccgaccaaggaccacctaacggagtgaacgcgacgagaggaaaatcacaggggacccaacaacagaggaacaggagacagccaacccaaggttgaacgaaaaacgaacaactcgacaaacatctcgagtaatcaccacaaccagggggcgacattacaacacggagagcaaagaaacacacagcacccacagcaggcataacacggcgacaatcccagtaaaaaaaagatgagtcaccacgccctggaaagaaaggcaaaccgagacgaacataacgaaagaactacagagaaaatacaactacaacgaggcaaaagacacacccgacgaaaccaaccacaacccaagcaatcacacaggcacatctcacagaacaccacaacaggctacactataaacataaagacccgccactatcacgactgctacgcccgccccacgtaggcac

SEQ ID NO: 587273 - DNA, 395 bp, Homo sapiens
atggtcactgtgtggtagcaggtgcatatggggtaatagcctactagcccttattgagcggcaaacacatgggtgagtgctattatggggctgggaagtgggggcctggtgtcccctgtgatggctgtgctggcctctggctgcactggagaggggcacaggccaaggacatgacccccgtcaaacctgagccccctacagaaatttaaccagagcctgtacctcctttcttgcctgcccccaacatctcacattccctcctgtgatggccgatgtctccatctactctacagacacctgcaactatcattcccttgatccgtggtaattaggagggaactcctctgtgaagaactgcttctaccatcctcttatagaaactctttctccactgg

SEQ ID NO: 587274 - DNA, 699 bp, Homo sapiens
ggttttactgggatgataggacagagtgagtggattcgtcaccagcatgtttcctgtgactcttctctccacccttcttagggcgggaggagtggacatcatatctctaggatgactgtcccagaggagatgcacagtacttgggtctgccttactaggtgggacaggagagaggaagcccaatcagtctctatctagcattagagatgttcaactgtatccattccaccaccatcattcagaatctgtgggctctggaggcttgagctggcggggtggggatgcgtgaaggtcgcagtggatgtcgtcgtagggaggaagccagggggaaatcgcaagggcatcggggaaggggacaaggcacgtgaagtggtctccaaacaactcgaaacagatcacgtcatgggcaggtcccaaactacgcatgactgacgtcgagacgccaggtggtgtcgagagtcccctaggattggggggtcctcaacggggctgcacaacacaggcaacgcacgactacagactcgcataggcgagcggaaagaggacgagtggcgccgagtcgtggtgccttggcgcggtccaagcaggtcctcccctgagcgctctgatcccagctcacccgagggtcgggaccctgggcccaggggggcatcgaacagggggtgaatctctgagagtcgacgacgggaaagcgaaacg

SEQ ID NO: 587275 - DNA, 205 bp, Homo sapiens
ctggggagatagttcaagacggagttgcctcgagtagggaacgagtgcccctgctgacagccaggaaccacagcgtcgggctccgggtgcactgaacactccccacaaaagccaaaggcacaggcttgcagtgcaaaaggttctgattttccccactggcaaaaagcaaggctagcaacggcctctttcttcttcctttcttttc

SEQ ID NO: 587276 - DNA, 319 bp, Homo sapiens
gattcatcggagatgcatgcgaatgtgctcttggaatcaggtggaagtgatactggaattatggtcataggtgattccttatggatgatccatggtcaatcgagttcatgtagttatgtgggtatcgtacaagcctcattataaaacaactgcgcgcagtcggggtatcactgagatgttcctcgcaaccacttcccagaatgttacgtgacatggagcgtcgttataccttggatcatcatcaaaacaggagtcgcgaagcgaatctgtcagatcatccaaaattcatgcttcccgaacgctgatccccaattggcct

SEQ ID NO: 587277 - DNA, 744 bp, Homo sapiens
  misc_feature (231)..(231): n is a, c, g, or t
cacaggggctcatgcctgcaatcccagcactttaggaggccgaggcgggtggatcatgaggtcaggagatcgagaccatcctggccaacacggcgaaaccccgtctctactaaagataccaaaaacaaattagccaggcgtggtggtgggcgcctgcagtcccagccactcgggaggccgaggcaagagaatggtgtgaacccaggaggcggagctgcagtgagccgagantgcgccacggcactccagcctgggcaacagagcgagactccgtctcaaaaaaaaaaaaaaggaaaaaaaattggtagtatgcccagttggtttctacaagaggaggaactccgtggccgggggaaaacccagacacaggggccagaactccatatgagggaggtaaaagacaagatttgccttttattattccaaacgagaaaccatggggacgcgggaggtgggctacgtcaagcgttcataagaggaaagacggccactttggggaggcgccagggcagcggagggactcggttgttaggcccagagagctgaaagatcagccttggagcaagggtagcaaggatctccggcttggccataagtttttgctacgagaaggtttagaaatttagccggcacacaaaggcgtgggtgcagtggttcacgccttgtaatcccgagcacctgtgggaggccgaggcaggcagatcaccagggtcgggagtcccaagaccagcttggccaacatgg

SEQ ID NO: 587278 - DNA, 209 bp, Homo sapiens
agcctgggcgacagagtgagactctgtctcacgataaaagcaaaaacaaaaagaaggccaaatgtagatcccagcacttagggaggatgaggcgggcagatcacttgagatcaggagttcgagaccagtctggccagcatggcaaaaccccgtctctacaaaagaatacaaaaattagccaggagcggtggatcagccttgtggctacc

SEQ ID NO: 587279 - DNA, 1057 bp, Homo sapiens
cgcggtggctcacgcctgtaatcccagcactttaggaggccaaggtgggcggatcaggaggtcaggagatcgagaccatcctggccaacacggcgaaaccccgtctctactaaaaatacaaaaaattagccgggcgtggtggctcactttggaaggctgaggcaggcggattgcttgagcccagaagttcgagaccagcctgggcaacatagcaaaaccccatctcaatttaaagagaaagaattgttttttttccttttggagacagagtttcgatctttggcccaggctggagtgaagtggcgcgatctcggctcactgaacctctgcctcgccaggttcaagcgattctcctgtctcaacctcctgagtatctgggactacaggcacccaccagcatacccagccaatctctgtattttgagtagagacagggctccgcgtgccggccaaggctggtctcaaaactcccgacctcaacattgagccacctcaagtcaggagagtgaccaacttgggcaacacggtgaaaatcccattctctactaacaataccaaaaattggccgggcgcaggaggatcaacgcctgtaatccagcacttagggaggcccacggtgtgcgggatcaggagggtccggcgagatcgaagaacacagcctggaccaacattggtgaaaccacccatcctctactacagacctccacaactttagccacggcgtggtggcactgccggtcatcccagtcctataggaggcatcacggaggcagaactcgctaatcacgtgtgaaaccccagggagaggtggaaaggtaaccggcgtcgagctcaagaacgggccacccatggcaacccaggcgggggccaaaggacgagaacatttccgctgcaaaaagacaacccaacaacacgcacacaaaacacacaatgtgggcccgcatcactcacgaagtctatgacacaatgtgtgcaggggcgcccacaacgaaagacacgcagctcagtgaggccacacacagcaagaaagaaaagagcacaggaccccaacaacacc

SEQ ID NO: 587280 - DNA, 224 bp, Homo sapiens
cttcaaaggccagtttgggccttggccctgggggtttgaaactcacagagggaaactgggaccctctcccttccctggtgccttgcagggacccctttggaactcaggactcgattttaaggacccaggagggggggcaaaaaaaaggactgggggcctttaacgagagggggcctgcttcgggctataaagccaaagccattaaaaatagattttttttttga

SEQ ID NO: 587281 - DNA, 117 bp, Homo sapiens
  misc_feature (39)..(39): n is a, c, g, or t
aatatacaggaggctatcacacttgtgaaattctcttgnctaatctgaatttgcattcccatggtgttaacatggtatatgtattgttattaaagtaagtgcccatgtcaaaaaaaa

SEQ ID NO: 587282 - DNA, 742 bp, Homo sapiens
gctggcatctgtgcaggcgggctcatcagtgcgctaagctcgcactgattgtttagactgaataggacctaggaagtacaacagtgtcgtaggcttagatgccaggagctaagacagcggggaatccagcgctcgttccacagaagctgccatcaacgtatgagcccgtcacgcagcagtagcaatctgcctcgcataatcgcgttcgtaagtgaggcgtagtccgacgtgtgcgagacagagtatagctcgactcctggatcaagtggacaccgataagcccgattagcgaccggagtctcgaactactgcattatgtgattagactcagtaaagtggcttaatggcaagtagaaagataggacatgggcgcccgattgcgacttcgggaaggtcccaagacggttagcccaagggggagctcctctgagcagtccgggggcgtgcattcttgtcacggtgagaataaagcataggcgcgcaccgaatctcagatcgatatatcgcgaaaactctggctcgcgcgtgcacctcaagaacggtagaggccttgtctcgcgtgcatctcctctcaatacttatctcactcatacggcagggcacgttcgagggtggattaaacgcaaacccgagacgttacgcagaaatcttacgcatagcgtcctcaacttacccacggtaaggatgaactaatagcaggcgaccgtacaagcctagacataacccagtcttaatttaaggt

SEQ ID NO: 587283 - DNA, 223 bp, Homo sapiens
gcgagagaattgagctcggtaccgtcctgcctgctctccctatcgaggaatgccccgctacgcggcttttagcccaaatgggccattatcgaagaattcacaaaaagtcgaatagcctcatcatccccaccatcatagccacacatcaccctcctataacctcttacttctacctaacgccgtaatctactccaccgtcaatcagcactactccgccatactc

SEQ ID NO: 587284 - DNA, 109 bp, Homo sapiens
actgcgaacgcggttcttactgcgaaggcggcttcttactgcgaaggcggcttcttactgcgaaggcggttcttactgcgaaggcggttcttactgcgaagcggttctt

SEQ ID NO: 587285 - DNA, 872 bp, Homo sapiens
  misc_feature (56)..(56): n is a, c, g, or t
  misc_feature (67)..(67): n is a, c, g, or t
  misc_feature (305)..(305): n is a, c, g, or t
  misc_feature (500)..(500): n is a, c, g, or t
  misc_feature (872)..(872): n is a, c, g, or t
agcgcgcactctgcagtccggccccccgcgcactttggtccataaataatacaggntgtattttctncttactccaaaaggaggcgaactgagaggcaataaacatttcatcttaatcaaaacatcacctcacatctctataatttttaaagtaaaaccacaaaaaagcagtaagtcccccctcagcatccaccccataccaaacacacaccttcccacgcggcgcgaccgcgaggacgagaccccaacaactacatcaacataaatcatttttatatgaggtaacaaacttacttattataaanaataaaaaatttatcgccaatgttctttttctttatcttctatgatttctgatcgcagttttctatcatgtaatataataaatataaatgaatcgcacacgtgacgactggactatcgacgaataggtaagaatatttatgggttacacgactctcgcatgaagtttgacaaagagtgacatatattttctcttnattctattcttcgtgattggtatagatttctgtacacctacactctctaacactcaagtatacttaacttagtacagtgaatacgaccgagactaacaatgacacaccacacgtaaaataccgcgccccgtcgcctctgccttatggctgtgcggtcatccacgcagtatatagtcttaaatagcacacaaaagtgatagagatagtccgccgatccactcgttcatctacctcctcatctattccctaagtaatctattacctgcgcgcggtactcctatattaaatattcatacttcatctgtcttctctacccttctccatcccctactaacatttctccgcacacgactagataaacgagacgaaagn

SEQ ID NO: 587286 - DNA, 388 bp, Homo sapiens
aaggggttccaagtttccaaggcaaggattccagttatgtgctcaaggtgtatccacactgggccgggcgcggtgactcacgcctgtgggcccaggagtttgaaaggccgaggtgggcggatcacgaggtcaggagatcgagaccatcctggctaacacggtgaaactccatctctactaaagatgcaaaaaaaattagtcaggtgtggtggcgggcacctgtggtcccagctactcgggaggctgaggcaggagaatggcatgagcccaggaggcagagcttgcagtgagccgagattgcaccactgcactccagcctgggcaacagagcgagactcggtcaaaaaaaaaagagaaaggattcaaggcagtgtatggccggcctttg

SEQ ID NO: 587287 - DNA, 203 bp, Homo sapiens
ccgcgtcgactgtcatacatcaaagatatacatttattttaaatgactaagactagtttatattgtttctgaccagtgaaatgcatctgcaatttgaggaatgtgtgtgagtcactgcgtgcgtagattccagtcagacagaagttccaacctctcctttatcatcagatcagaggttaaagtggagctatccaggtcgacgc

SEQ ID NO: 587288 - DNA, 479 bp, Homo sapiens
gcatctgtctgaggacgacgagtcaggtgacgcgagtggagcgggcaagggatcgcttacacctgtagtactgatactacagaacagtcacgtaccagaggtggaagtccaagtcaatacgcatgaattgactgcctcactgactcaaccaagagtgtcagttgtacccgaggcgttactcagcatgcagccaagtacctgtggtaggatttccaggctgaactgattggcaggcattcttagacgtgagacctacgcaagaggttggttaaagccgatattgtgtagtagctgagtgaatcgtgattccaacgcgaaaaaacccaggcgtcacatcgtacagtctgttgcgaaggcgttctcgcccatgctgtgcattggtatctagggagaacccgcgttcatacactttatctatagccttcccctaggtcttcagaagtcatcaagttttagagctgtggacattggatatggtg

SEQ ID NO: 587289 - DNA, 1446 bp, Homo sapiens
  misc_feature (497)..(497): n is a, c, g, or t
  misc_feature (1384)..(1384): n is a, c, g, or t
  misc_feature (1446)..(1446): n is a, c, g, or t
tggaaatggatttccactcttgttggcccaggctggagtgcaagggcccgaactctctcagctctccactgtgcagcccactgtgcctctcccgaggttctcaagtgtgaattctccgtgcctcagcctctcccgaattagcgtgggaattcacgggctatgcgcttaacacacccaagctaattgtggttattttaagtataaaaagcgaaggtttctcctccaagtgttctcaaccgaggggctgtggtctctctcaaactctcccaccttcagcctctccacaaagcgtggcggggaatacacgggtgttgtgtgagcccacgcgggaaccaagccaaagtggtgccttctcttatattaggtggtcatactctcatgtgggctcttgtggttctctgtgcccagtgtgatttaacaatggggggaatataacgcgcgtggctatacacattcttctcattgtggtagaaacacctcttttcccccgtgtgtgncgtgaagaatttacaagtgagacactctcttaagaattttattctaaacattaggatatatttttttcccctgtgtgaaagacgcctaataagccgttttgagagctagactcttaaaaaagcgcgctgtttagttgtttttataatgtaaccccccaaagggggacagtgtaaacgcgagccccatataagtggggcctaaatgtgtgggccataaactctcctataattcatatgtcaggacacgtgcgcgcagcaacgcttttcacaaaaaaattttttcccccccgagggttctaacgtttttaaagagaattctccaaaccaccccatctctctttgtgtgagggccccctctaaccctttttgggtgtgtcccccaagagagtatgctacaacacaaacgaaggggtgtgcgtttccaaaatacaccccgtttttgtggtcgcctccaaatatcccccgggggagaaggggggccccgaaaaaatatctctcctccgcgcgcactttgtgggaacacccttcgtgtggggaaacgcctgcgtctctcccacaagggcgtgcaaacaaaaaacgtccctttgcggcaggagaaaaacccccccataaaaaagaagaggcccccctatagaaaaccgggcgagcaataataacattttttgcgcgcccctgagtgttatttttataacgcccccatttgttgtccctcccccgtgcggagacaaatagtggcggctctataaaattagtcgcgccgagctgttattaagaagcaccctccgcgcagcgttgtttagtataacccccccccctcgtcagagtggatcgaggtggacgcccgccagcagagcgtcgagtaaataaatcagccgatctatctgcgntagtcacttagtcgaggcacgcagcaggtatttaatctatccgcgcgactgactacataacn

SEQ ID NO: 587290 - DNA, 215 bp, Homo sapiens
gcgcgtacgacctcgcgagacacagagcctcgacttggtacgatccgacggcctcgtgcatcacccgacgtcgagctcaccatgggatgatgatatcgccgtagctcgtacgtcgataacggttctcggcgatgtgcacagacggacttcagcaggagcgacgaatgcctcgcccggggccgctactatcgcgcctcacattcgtgggagcgacc

SEQ ID NO: 587291 - DNA, 469 bp, Homo sapiens
taaggggggcccttttattcaaccgggctcaaatcaagggacagggaaaccctggctgcccccccccccccccaggggaaccaaaacccttcttaccttttaagttgggggaaaaaaaagggggaagggggtttgggtttcccccttatttttccccccccccccccctttaataaaaattttcctcatgggagggggtaatttcccggggggccccggggaaaaaggtgggagggttaatttcactaattgacccggtcaactggggccccttgtaatcaatgtttttaaaaaccacttatgggcgggtccgggggggaaaaagaaaccccctctcattgatatttaccggggggtgccccacccttgaattatgaggcattaaaacatgggccccccttaaaaagttccttaaaggggaaaacccccgggtgataaaaaaagccgccttaagggcaccataacccat

SEQ ID NO: 587292 - DNA, 194 bp, Homo sapiens
gccaaaacccgtctctaccaaaaatacaaaaaaaaaaaaatttagccaggcctggtggcgcgcacctctaattcccagctactcaggaggctgagacaggagaaaagcttgaacccgggagatgaaagttgcagtacgctgagatcatgctgctgcactccagctggggctgacagatgctgacactctgtctc

SEQ ID NO: 587293 - DNA, 436 bp, Homo sapiens
aactcactgtatcaaaaagtagaagcaaaatgtaaatgttataagtgactgaaatgtatttatgaatcttaagtcctacaaagaggtttgcaagttgatagaccactcaaagcacttaccatgacaatcactgtcactgtgctgggtattagggatgtggttatggatgtgttacaccggcttagtggacaaagggctcacagttggtgtgacagatacataacagataattgcaacatggtattagataaataatgataagaataagaagtatcagcagtagtatggaaaaagggaatcagtattttggtggaaaggagaggattgggaagacccgacagaacagataacacatttgttggtttttgagggtaactagaacctaagctggtagtggaagtcactgaagatggagcaaacagtacaaaaaaaaaaa

SEQ ID NO: 587294 - DNA, 970 bp, Homo sapiens
acacgtatacatgacaaactggagggccttcaaggctctcatcgctgctacagtacagcaggggctcaggtccgcgtgctcgtccgcgaccaccccacttccattgtggccaaaccaaccgcacccctgaatttctccggcaacatttccctgccaggccacaggtcccagccatctgcagggtgcatgcatggcattctgtgtgtttgcagcagcacacgccattgcctcactcatgtgagcaatgcaggcagctgcggggcaagtactccagaggcagcagcccaggtggtgcagctgggtgagcttagctgattccgatatagtgcccccagccagtacctgggtgttccccaccttgggcatcatgcacccacaaccacacaccaggcccactgcagcacatgcccacaggcaggcacagtgcaggcgcaattctggggctgcctggcatgctctacttgaagcacgaggcactcccctgcgtgggcgaacgagtgacatcggctgacatcaccagttgtctgcaccctgtcgtggctctataagcaggttctagagccttctttccgccaggcctttcccaatacaaccgctggttctcacctgcattaacagacccagtgcgggctgtcttgggggaagtgaaactgtgtgagacgatggcccacgtagatgctcagcacgttcgccagagacccacacctcacaacggaccacacccacggacaagcacaaagggtacccagagcaacagaagccacacgccacaggtgaaccgcacgcaggaccacacaggcggcatgcaccttgaatcacgaaggaagaagactgaccaaagtgccaccaccgcacgaaacgaagacaaggccaaggacccccgctacctgcccaaaaacaacaaggggagcataaaataacgaaagcaccaacacgcacaaaccacgacgaacacaagaacagaaccaca

SEQ ID NO: 587295 - DNA, 985 bp, Homo sapiens
  misc_feature (84)..(84): n is a, c, g, or t
  misc_feature (538)..(538): n is a, c, g, or t
  misc_feature (574)..(574): n is a, c, g, or t
  misc_feature (596)..(596): n is a, c, g, or t
  misc_feature (649)..(649): n is a, c, g, or t
  misc_feature (830)..(830): n is a, c, g, or t
  misc_feature (835)..(835): n is a, c, g, or t
  misc_feature (838)..(838): n is a, c, g, or t
  misc_feature (840)..(840): n is a, c, g, or t
  misc_feature (843)..(843): n is a, c, g, or t
  misc_feature (845)..(845): n is a, c, g, or t
  misc_feature (858)..(858): n is a, c, g, or t
ggcacgaagctgctgaaagctggtttgcgtcgacatggcggttaccctgagtctcttgctgggcgggcgcgtttccgccgccgncactcgctgtgggttcgcgacccggggggtggcgggcccaggccctattggccgggagccggaccccgattccgactgggagccggaggaacgggagctgcaggaggtggagaggtaccggcttctccccgggccctcagcttgaagcagggcctcgtgccccggcgctccaggccgcgcccccttggcgccgggtgtcctgccgctgcttgcgcagaggcccttgtttcttcttacccgttgttaggggcgcagcgtcaggtgttcagctccccgggaccactggtcccttcattagtgacgtatttcatcatcagtttagagagttcggcatgcttacaggcagttattgttctaggtgttagctttctgggtgtacggagcagctctaagccggcaacatggcccggttgcccttgcgatcaaagagaagagggctgggcgctccatgatntagacctgaggcgcttcaaaacatacattctgcttncacgcatggttctgtcattggntctcttcccccagcaccctgaaacgacagaaacaagcaatccgattccagaanattcggaggcaaatggaggcgcctggtggccccggccaggaccctgacgtgggaaagccaatggagcagatacggtatttacatgaggaatttccagagtcctggtcagttccaggttggtgaaggttgatgtcagcctgatgtgaccgaggagtttaaaagcaagttttaccacattggncagangcngngcngntaaatcttagagngggtgccacggaagcgtcgggcggaaacaagagccgggccagatagcgggacgggaactaaacggaagggtaggaggcgccgaacccggcggagaaacgcggggggaacaagaaacgagggggggaa

SEQ ID NO: 587296 - DNA, 134 bp, Homo sapiens
tgtgctttgggacggcggacactgaaggacgggatgttccacacctgcttgtggacctgatatggcgctggcggatcagcacgcgagcgttgtggatggacttgggcaaagccaggttgaagaactgggtcttg

SEQ ID NO: 587297 - DNA, 435 bp, Homo sapiens
  misc_feature (235)..(235): n is a, c, g, or t
gtgggtagtcaagatccctgttgtctgctctgtatctgacggactgtctaacacacgcgctgtgcacggtatctgacggtactgtctaacccacgccgctgtgcaccgtaatctgaacggtactgtctaaccgcacgccgctgtgtcaccgtagtctgaccgggtactgtctaaccccacgccgcctgtgtcaccgtaagacagagcacaaaggagcacccaggatgcacacctnacacacttcgcgggcgagccgcaagcctgaggagcgggagaccctcgcggttcagcggcgtgagggcagagcgacggagcccctccgcttctgtctgcgtgagcacattcgcatagaacaagagttctgacctggtcaaacacttgacacgcacataatggaggaaacttttggcatgctatcaaatgctttctcacatg

SEQ ID NO: 587298 - DNA, 772 bp, Homo sapiens
taataacaaaaggaaattattgggttaacggttctgcaaactgcacaggaagcacagtgccagcgtctgcttctggtgagggctttaggttaatcccatttatggcaaaaggaaaaggggacctggcttgtgcaaaaaccaaatgacaagaaagagagagggaagggagcttacaggttttggttttggtttttaaacaaccagctttctcaggaactaattgggagcaagaactcactcattaccacaaggaggacatcaagtcatccatgagggatccacctccatgacccaaattcctcccatcgggccccacttccaacatgggggatcaaatttcaacatgaggttggggggataaacattcgaactatggaaagttggtatggactatatctgggaagacggacacggatatgtgggaagtgtgccccttcgagtgtcacagggtggagtcagagaagcatccagacaaagcaggccaaggtggcagatcccaaggtcggagaccagcttgccaaccatggggaaaaccccatctctaacgaaactactatatatatatcgctggacactggtgggccagtgtctgtaatctccagctactccggacgatctgaggaggaaaaatcgtggaactcgggaggcggagttgaatgacgtggtatggccaatgcatcccagcctggtgaaacaccagaactttataggttgtccctccatgcagaatcgtcaaacaccctcgctcagtggttgctcaacccttaaggac

SEQ ID NO: 587299 - DNA, 1016 bp, Homo sapiens
caaagataaataaaacataggtccctgacttctaagcaaattcacaactttagcaataggaaactggactcatagatgctaaccttaacaacaacgtgacaaatgccagacaggacccatcagccaggcactgtgcagagcacagcagcagcggaggttaggagatcctgcctgcaggcagacctggtaagggaggcctcacaggaggcatgaccaggtctcagtcagcggggaggtggaaagctgcaggtgcatcacagggcgcaccctagacccgaggaaacacgctgccagacgagccatccactgctacaagtccacactaaggctcgacggtcacgtcaccctaaaccaacctgctccctctacagccacggcgcactgcagcttggagcatcccaccaacgcttcccctaacacagtcgcccagccccccagcgggcgcactccccgacgcctatcatcctcctgccacactgccctctagctgcacgacagacctacaccaaccactttcctacacgcacctctcgcagcactcctctactatctcgtccagctctcaaacccacttatgacaatcccacttatcaagtctcaaaccctccaagggcacactgccacgcagagagcttacgtcctcacgcttcaagaacccttgcccgaacacacccacaacagggaaccctaacacctctcctggctggctccaaccctcctaacctgaataggcttccaaacacaaaacccccacgcacctgcacttccgcaactgcaagcgccaagcggttcaaacaccaggctacaagcctggacacggctcacccgacgcttggcctacgccgcctttcacacacttttcctatacgctaaattatatccagggataccgatatctggaaacacgccaagctgcaagaccctactaaccccaacatcatcggccagcccccacacaacccccgtcgactccccatagcccctacgtccacatctaccttcccacattcacttcc

SEQ ID NO: 587300 - DNA, 405 bp, Homo sapiens
aaggatccccctaagtctattagtgtccgacaaaagtgtttgttaaaatagatcaaagactagatttctaaccattagggaagggaaagacattctcagagattcacaaatatacgtagttaatggaaccataacttttagaagtcagtgttcacaggacagatgggaatagctggaatgaagtgagctttgaatgctgattgctttattttatactagctaatgagtgaatgtgccacacatcctctaacctttctggaatggtgaacaaatggatagatgtgctgagtaagtgttggaaaacaactacatgaacccttaggcaactaggaggaatttaaagaaataaaccatgtgtttacaattaaactaggaaaagcctgtatatcaatccaattggtaaca

SEQ ID NO: 587301 - DNA, 145 bp, Homo sapiens
cttacacagcttttcgcaggtgtctggtctgtgtctaggtaatggagccctctggaactcccttagcaggagaatgctgcttccttcccagccccctgctgaactgagactggtctcttcctatgcatttggccaggaacactgt

SEQ ID NO: 587302 - DNA, 533 bp, Homo sapiens
gagagaactcgtctcgagtccctagtgttcatagtttagagttccacacgtctttaataagtcaataacggatccatgtagaatgttgcagtttgcttggtaaatcttaattgcgaaatttcttcttctttcggaactttgtttctgctgcatttgctggtttttcaggcatgagctatgagttctttcttcggctgtatcgtttgaattcagaatcagacagcagctcttccacaatagttgttttcctttgcttattgggaattcctgaatggtggaaatcccttggattggcaacaatggatccgatctggcattacttggggaagccatctctatcattcttcttgtgaaatctttttgggtacatgctggctctcatattcagtgctttgagatcatttttcaggtcatttgtcatttctggagctttcataccctagccattcgctgctgtgctttgaggttcctttctgcgcatgatctggctgatacctcgagtcactatatggagggacacgtgtggtgttttc

SEQ ID NO: 587303 - DNA, 215 bp, Homo sapiens
aatctgccatataaccgacatctaaaatcgtatcagaaaaacggatatacgcatctggcatgtgcttttatcctgtgtaaagatcaatatttttcaataattttaccatgattatacgggtcacagtatcatcattattcaaatacacacattgaataatttatctgcttaggcactgcctcctttttctaactaccctcattataattggtata

SEQ ID NO: 587304 - DNA, 391 bp, Homo sapiens
taccactcttgtctgcatctggtatagaatgctcaggatagtctggattctgctcctttctagctgcactcacttccttgggtaaagctcccatctgatttcatcataacttcactttacatacgcaaactcacaaatatcttccctgactgagactcctatcctgctgctgcttatcatctttacttgactatataacgaacatatcaaacataaactgaactgatagtctcctaacctgaaacctgcttctatagtcttccccaactaagttattggcaaatacgtccttgcattttctcaggccaaaatcacatcatgatccttggcatttctttctctggtaccccatgccctgtctgcagatctattggcaaaacctcccaacatt

SEQ ID NO: 587305 - DNA, 328 bp, Homo sapiens
tatatattcgtgtccgaccaaccagatgggactagaatcaagatctctgctttgttcctatgaaggacaaaattagagatttcatcatttggatccttttggaaatgttatttttacagaattatattgtagaaaagcagtgagtgttaacgaacaatactacttataagggaggccactggccatcagctttatataaagcagatcaggcttcctttggcttttttttttttttaaaatagcttaaaagctaattttcactaaaggtgtagtcaaagttataccacacttttccactgtctttcccctaagtggacacgattgtcca

SEQ ID NO: 587306 - DNA, 850 bp, Homo sapiens
  misc_feature (58)..(58): n is a, c, g, or t
  misc_feature (86)..(86): n is a, c, g, or t
  misc_feature (298)..(298): n is a, c, g, or t
  misc_feature (359)..(359): n is a, c, g, or t
  misc_feature (366)..(366): n is a, c, g, or t
gaagtcaagcatgtctgtcccaacgtgccatcatcctggtgggaataagaaggatctncggaatgatgagcacacaaggcgggagnatagccaagatgaagcaggagccggtgaaacctgaagaaggcagagatatggcaaacaggattggcgcttgtgggtacatggagtgttcagcaaagaccaaagatggagtgagagaggtttttgaaatggctacgagagctgctctgcaagctagacgtgggaagaaaaaatctgggtgccttgtcttgtgaaaccttgctgcaagcacagnccttatgcggttaattttgaagtgctgtttattaatcttagtgtatgattactggcgcttngtcattnatctataatttacctaagattacaaatcagaagtcatcttgctaccagtatttagaagccaactatgattattaacgatgtccaacccgtctggcccaccagggtccttttgacactgctctaacagccctcctctgcactcccacctgacacaccaggcgctaattcaaggaatttcttaacttcttgcttctttctagaaagagaaacagtggtaacttttggtgaattaggctgtaactactttataactaacatgtcctgcctattatctgtcagctgcaaggtactctggtgagtcaacacttcagggctttactccgtaacagattttggtggcatagctctgggggtgggcagtttttgaaatgggctcaaccagaaaagccaagttctggcgtgtggcaaagtaccaggccggggtcacgtaagggaccatagtccggtaatggcccttatgtgtcccaattaatttttcccgatg

SEQ ID NO: 587307 - DNA, 264 bp, Homo sapiens
  misc_feature (64)..(64): n is a, c, g, or t
  misc_feature (114)..(114): n is a, c, g, or t
  misc_feature (137)..(137): n is a, c, g, or t
  misc_feature (145)..(145): n is a, c, g, or t
  misc_feature (171)..(171): n is a, c, g, or t
  misc_feature (175)..(175): n is a, c, g, or t
  misc_feature (216)..(216): n is a, c, g, or t
  misc_feature (257)..(257): n is a, c, g, or t
gcacgagcaccagctgtattggacccccccccgaaaattcggccagggttttcgctcttgtggngtctgttcaaaccggcccggtttgatccggaaatatggccccaatatgtncccccagtgtttccgtcagtacncgaagganatcggtttcattaagttggactaaangctnttccttcaaaggattatccggggcatttactcaatgaaaanccatgataattttttgtatataaaataaacatttgaaaaancccttca

SEQ ID NO: 587308 - DNA, 1013 bp, Homo sapiens
  misc_feature (58)..(58): n is a, c, g, or t
  misc_feature (86)..(86): n is a, c, g, or t
  misc_feature (298)..(298): n is a, c, g, or t
  misc_feature (359)..(359): n is a, c, g, or t
  misc_feature (366)..(366): n is a, c, g, or t
gaagtcaagcatgtctgtcccaacgtgccatcatcctggtgggaataagaaggatctncggaatgatgagcacacaaggcgggagnatagccaagatgaagcaggagccggtgaaacctgaagaaggcagagatatggcaaacaggattggcgcttgtgggtacatggagtgttcagcaaagaccaaagatggagtgagagaggtttttgaaatggctacgagagctgctctgcaagctagacgtgggaagaaaaaatctgggtgccttgtcttgtgaaaccttgctgcaagcacagnccttatgcggttaattttgaagtgctgtttattaatcttagtgtatgattactggcgcttngtcattnatctataatttacctaagattacaaatcagaagtcatcttgctaccagtatttagaagccaactatgattattaacgatgtccaacccgtctggcccaccagggtccttttgacactgctctaacagccctcctctgcactcccacctgacacaccaggcgctaattcaaggaatttcttaacttcttgcttctttctagaaagagaaacagtggtaacttttggtgaattaggctgtaactactttataactaacatgtcctgcctattatctgtcagctgcaaggtactctggtgagtcaacacttcagggctttactccgtaacagattttggtggcatagctctgggggtgggcagtttttgaaatgggctcaaccagaaaagcccaagttcattgcaagctgttggcagagtttacagttctgtggtctcatgttagttacctttataaggttaccctgtgggtaacttcagtggccactttaatcgtgctgtggttccccaaacatttaattttagtttttaccccgagatctagctctgtgggatatattaggggacataaggggattgcctaacaaactgtgtatccttcaaagacacagtgtaatgggcttaagaacagaacaagctgtttggggaaa

SEQ ID NO: 587309 - DNA, 1063 bp, Homo sapiens
tcccgtgtggctgctctatctgtcgtgtagtattcgcattccctctgaattgctatgcgtgacacatggttcgtttcgcgttaaagtttctgtgtgcaatggtagtatttctagcatacatgtatgatgctacacagattttgtcaggtatgacggtgccatgtagccaggaatatcaagggtttcgcatctagcgtggactaatgactgtggtgctacatgtctctgtgattccatgttgcgtctagtcaaactttgctacatctttctcacacgccttaagcccatgtgagtagtccttctagtgtcgccaccagtagtcttggttgacttgatttgcatgagtctgtcatgtgatcacaagtgcagggtgcctctatggaatgagcagagcttgataacctagacactggaaataccgatgtcctggctgcacacactcatgacgactggaatgcagggagagcttccatctctactttcagtgttccgaccatctgcatagtcctcgatttctcgggtggtatatccatgatcttttcactttacgaatccctgactgctagcggacgtttgactaataagtacgtttatcagttatgtactatgcccctgtggactataaagcgagtagataatcggatggcgatagtgccaacttgatccatacaccatagtgcttccacagcattgatgcactgtaaattatataaccagcccccagtcagtgatggtggatatgttggctacttacagctattttgctgttacaatctgcggagtggccaggtacatgtggctcatgcctataatccctagcattttcgggagacacaaagagaagatggattgcttgagctccaggagttcaagaccagcctgggcagcatagtgagaccttgtcatttacaaccaaatttctcaataacttagactggcaggatagtacatgcctgtagtcccagctacttgggagggtgagccgagatgaagatcgctagagccggtgagtcgagacaatcaacgcggaatttgccactgccgaacatgcctctctctccca

SEQ ID NO: 587310 - DNA, 178 bp, Homo sapiens
acgtattgtcacaggtagatacagtcatgaaattgcagcaagtctctataccaaccatgacagtggacaaatcccatagtgaaaagtccaggaacacccatccccaggtcatgatcacgggatcttcaacagctcacggagtgctccaacagctccaaaataaccctcagttttatcc

SEQ ID NO: 587311 - DNA, 325 bp, Homo sapiens
tcccttatctttatgtttatttttatttcttgacgcttgggtcctgtctgtcaccccaggctgacgggctgtggtgtgctctcagctcactgcagcctctgcctctcaggttcacgtgattctcctgcctcacgccccccacgtagctgggactacaggcgcgtgcctccccatccctgataactttttttgtatttttattagagccggggtttcaccatactgaacaggctggattagaactcctgacctcaggtgatccacctgcctcagactcccaaagtgctgagattaccggtgtgagccaacgaacacggactgacaa

SEQ ID NO: 587312 - DNA, 281 bp, Homo sapiens
cagggccccctttatgcagggtggaatgttatccctggggggggcttggaccccccctggtttttttttttccggcccccccccaactctcactggaatttaaggaccctgccccccggggggttgggggtatgtcccggcccttttcccccaattgtttgggggtgggaggggggggtttttcccttaaaagggggggcccccaaaagctttttttatgttcaatcaatcaggcccggggtcccaaacattttcaataaacccagattggggccccccca

SEQ ID NO: 587313 - DNA, 228 bp, Homo sapiens
ccccgggttcaggcgattctcctacctcagcctcctgagtaactaggactacaggcgtgacgcagcacaccctgctaatttttgtactttttagtagagatgggtgccgagaccagctccgtgtgcggaggccagctcggttgtggagatcctaacccagcgttgctagaggaattaaagacacacacacagaaatataaagtgtggagtgggaaatcaggggactag

SEQ ID NO: 587314 - DNA, 1763 bp, Homo sapiens
  misc_feature (671)..(671): n is a, c, g, or t
tgcgggcggtcgactactcctggggggggtcggtcgttgtgttttcctcttaggtcactatgttgagtgtggcggttgtcctacaggtcctgtgtggtgtcattcatatcttgcgggcgtctgcgtccgttgtgtgcctgtcctgtatacagttaagttaaccggtgcgtgttgtcttgtatcgctttctgcgacagcctagttgttccccccccagagagggcacccgaggggttggttctcccccacgcgcgatcttgatggaggggcgaatattgggcgcgccagctggttcgtttcgcccgcccccctgtctggacgtgttccggtgttgtagcagtgtattacatagatgcgtgcgtgctctcctcaagaagagtgttcgcgcccccttgtgtgtgtgtacggcggcccgccccccgcccgttgtggtgagtacgatgtgggagaacaggggggcgccctagtgtgtgttgttgttcccctgcggtggtgtgttgccaccgaggtgctgatccacgtgtggtgtgtttcggcccccacccttgcggccgctgttgttttttggtggccagcacaatgactgtccctcccgctgggggtttggaggacgcaacttgtggtggggtggcgctaccgcaccgccgacacccccctctccggcgaggcgnccccaacggcatggttggttgtttctcttttccggcggggggcgccccttctttcccccgcccttgtggttggaggatggattttcttctcgagatgcggttgtgtctccccgcgtctgtggagtgtccccccccggggggcggtgaatgattgggaaagactttattgagggggagaccaccctctcttctgggccgccgctctccccccgcgggggttttctccccacgggggcagccgcttcgtgtttggtggagcaagaggtgggcgagtttggcgccccacggtgtcctcacgacgagtctctcggcgccccccactgtgagcctgtctatactttgttcgttattacagcgtgtgtggtttgtttcgcggcctctttttccaccactgttctaacacactgtgcgggaaaactttctctcctctctctgtgctctttctgtgcgcacacagacacactctgtgttcgccacactcttgtctctgtgtgtgtgaccactctgtgttagagagagaggcgacagagagtgtcgccacaccgtcctccacagcagagagcacactctgtttttgtggggccgccacgccactatagggcgtggtgtgtggtatatgtgataggggacccgcatgtgtggcgccactctataacacactgtgaatctgtgtaccgcggtgttataagcccccacgcttctatgtgtgtgacacctctatattggaggctcacgccccctcgaagcctcgctttgtctcttttcacggcgctttgtgagatatacacacaggctctttataattgtgagattttatgaaatctctgtgaccacctcttttatatgtagaatgtaaattcgcgcgctggagaaacacactcgcttgttctgaagaatcccactccccacgctgtttttctgtaatgtaaaatctgtggtaatacccccaccaccgttatccacctccactgagcttccttttgccaccacgagccacgcctggcgatctgggccactgaggaccgcctgttcacaaaaccacacacccaagggtttgggattttttccattaaaagaaaatttttcccctta

SEQ ID NO: 587315 - DNA, 145 bp, Homo sapiens
acaggttcattctaaacatttcttagagaatgactctcccattttttgcaggcgttcattcatctctgcagctcttcttttcccctctttccagaactagttgtaatgtcttcatctgtcaactcactctctttagataggcaaa

SEQ ID NO: 587316 - DNA, 972 bp, Homo sapiens
gtcggctgcccaggcctccccgggcccgggaacaggagtcccagctcactgcattcttcatctgcttccctgcgacgcattggctggacatcgaaacccctgccatcctggagccctggacatttcagtgcacctgacctcagtgtcgcctcagatcctgtcccgggaccgcaagactcttaggtgcccctctctttgtgccatctgcctctaggtcccatcctggggcctgaagcgctatgtactctgcgctgggaaaaggggaacgatggagcgatccagcacccaaacttaccctgtccaggtggcccacgaagctacccaagacatctctgcacatgcccatagccattatatggcttcacccacatccgtatcgggagttgggagaaccgggctcatatatactcactcataaggaagaatacctgcatgcatccagtggtctgagagtcaacttgtacgcataccaaaaagtcatcatggtggccctggaagagagcccagaagctcctggtgtggagcccacgaagagcggtagacttcagagcctccagtgcctgtggcggctggaaggtgacgttgggggaccccttgatgatacgacgttcgcatggtgagaaacaccacacccttcatgcaacgccatggggaggcaccaaaacatagtagtagatagagcagcacggaccaagtgaaagctacaccaatagaagggcacagaagaccgagccaagaaacgccctgaaacaaaactaagcgaggaaccggcgggcgacgcagactaagtgggaaaaaattggtagtcctatagaacttgtttgacatggtaactgggtggcataaaatgaggcctgtaaaacatttgaaggtaaagagacaaattacaattggaacaataaacctgggaccagggaatactggactggtgtggcaagacaacttgttaaaggagaaaggcgcactttggtg

SEQ ID NO: 587317 - DNA, 1585 bp, Homo sapiens
tgctggcgtggtgcctggtgttgatgtggagcgctgggttgtggtcgtccccgtgaggcgcgacagggtgagcctgagggggatgattttgttcgcctgctgtggccgggaaagcggcggcgtgtgaggtgttggaaggtgggtgtggttgacgaggtcgcgcgggggacacgcaccagtaggtagagtgtgttggggtgggcaggattgcctcggtggagccgtgtggggggtgtgatccacggggagggtttgtgtggtgcggcggggcgcacggagttcgcgttgtttgggtaggtgcgcaggggatgggcccctctgttgtcgctcgcggaagttttcccctggggagtcccccacagggtagtgtttggagaggagggttgccttttccgggggggagacccacgttgtgcaggaaggggaaccggtggtcggccaccaggtgatagtgtggtggggaagtggtgtctcccgccagggggcacgcaaatgtaaagttgggccccgaaaatgttgtgccccatggagctcgtttgggggaaattaaggagggggacgccgaccttgttatagggggtggcgcccagctggtagaagtcccacaggttggggttctcgcccgaaagatgcgtaaagtgcccagggaggtcagcccccacagggggtgtgttgcccccctcccccttgggggaagaaagaggaggtgtggtggccacgggaagtgtcttcgccctcgggtggttggttgttgctcttgtgtcttgtagatgtgagagttgccaccagcctgttgaggccactgtccccacggggtgccgcccgccacatgtgttgtatatgggtgttccccaccgcacatgtggcgtgggaaaagttgtggagaaacagggtgttctgtttttgggtgtaaaagaaataagtggcccccagataaatacccgcgttggtgttctgctgagagaaaaagggttgaaaaggcctctttgttgaaaaagagaggcggaccagctatagagagagatttggggggagaattgagcctggtgtctctttgttgggggaaaaaagggttaatagattctaggctttacccacagagaaaaagtgataaattgaggaccacatatagagatatagagagattagaaggtcaccacccgagacacatgtttttgtgagaggagaatttgaagaaattaagtggctctaaagccgcctgagaaaatggtatatgtggataggagatattgtgtggaagaatgtggttgtataagaatgcactaatgggataaagatgtctttgtacttaaaaagtgggctgtgttgttagtagaagccactcttgactctgttgtgtctgaaaaaaatgtgtttaagaaagaaaaaagatagtgaacttaactttgtaaagtgagctcctcttggaagaggaggattgatagatagtggaaagattatagcctgatagtggtcttggccagatgtgccagataattttgacccatgccagccatgtgttacctgtgcaccattaaaaaaatatttccaaatgccatgcatattaaatataagacacccgaga

SEQ ID NO: 587318 - DNA, 80 bp, Homo sapiens
catttgacagctgcagaaacctgaagcccacggagggaaagggcttgcccaaaagtcacacagcaagttaagggcaaagg

SEQ ID NO: 587319 - DNA, 395 bp, Homo sapiens
gaaactccatacacactaaagaaagctactggcaatatataactaaaataaacctctgaattctaccactgaaatggtgcatcatgaagcttcaaggaagattttgattggatctctttagtaggtcacctgccaatccctggaccaatcatgggcattgagccatacctgtagtaggggactgggtaccaccattggcagccccagaggaatctcacaaaattagaaatagttcctcaaaaggacattcatccagcaggagttcgagaccagccttaccaacatggagaaatcctatctctactaaaaatgcaaaaagtagctgggcgtggtagcacatgcctgtaaccccagatactcgggaggctgaggcaggataattgcttgaacccagg

SEQ ID NO: 587320 - DNA, 145 bp, Homo sapiens
gcactcttcagggacaacacacgacagccccttcgaatcttccaaaataagcgtgttccatcaaagctgagcggcagcttgtgaactcatttctcttagataagctgcatgtgattttctctacatatcctgtgggaccacactc

SEQ ID NO: 587321 - DNA, 804 bp, Homo sapiens
ggggagggtcatgacgcagcgagtttcagtcgtgacttttctgggggcatcgcggcgtcccctttttttggcctttaaagtaataacgtcgccccgacgcaccccccgggtatttcggggggcggaggctggcgggccaacggtcgtcgaagaggggcggtgcgtgacagccttggccggtcccgtgtggcgtgttgtgggggggaggggcgccgtcgcgcggtcggttccgggcggttgggtagcgcgcgagctagcgaggcggagtaggcagtcgtgcccgccgccgccccttgctctgtatgccgtctgctctcccggacgcggtcggcgtcgatcacagctgccaggagtccaaccgacgccgcggtgtgatgtggtatgggccggaggctgaggagggtccagcaagatagccgacagtccaagtcccgggaagatcggcgatcctgggctaccggtctgtgggggaaatcctcattgacgattcgatttgttgaaggccaatgtgtgggctccgtagatccataccatagaatgacacttttggcatgttggagtcgcagtaaaatggacaagaagtatcactcttgcaacttgtagacacagccgggcaagatgaatatgctatcgtttcctcagacatactccatagatattaatggctagtattcctggtgtattcgtgttagatcaagtcacaaggttttgaagtgattaaaagttatcagtgggcaaagttgttggatatgggtggggaacgtccaaatacctataatgtggggtgggaataaagaaaggacg

SEQ ID NO: 587322 - DNA, 370 bp, Homo sapiens
gacgaagtttacatgaggaaacatctaatactctgatggcgtgtgtcatatgatcggttgtgtagaagtaatgagggatttacgctcagagctaatggctcaattccctctcttcagtagttatatatctttttttttgagacagagtctcgctctgcctcccaggttcaagcaattgtcctgcctcagcctctcgagtagctgggactgcgggcgcacactaccatgcccgtctaatttttgtaattttagcagagacggagttttaccatattggtcaggctgggctcgaactcctgacctcaggagatccacccgccttgcctcccaaagtgttgagattacaggcgtgagccacggcacccggcca

SEQ ID NO: 587323 - DNA, 231 bp, Homo sapiens
cgcaggaggcagagcgagatagcgcactgcactccagcctgggtgacaggtgagactctgtctcaaaaaaaaaaaaggaaggacagggacaagagaaaaggtcctcgtagaaattaaaaataccaattatgtaagtatcggcccactccagggagataagtaatagtacccagatcggtggtccctcatatactcctagggcgggaaagttaatccaatgattccatgtgt

SEQ ID NO: 587324 - DNA, 224 bp, Homo sapiens
catgcgaacggactgatcgaggcggcagcgttcctgcccatcgaccccagccccggcgctacgagttgctccagacctgcctggtgcagacctccgatttcgccttcacgcggcccctggtcggctttgaaagctttgccgagggcgagctgatcgcccgcgatggcccgcacgagatccgggccctgtgcgacgactgcacgggatcagtccgttcgcatgtt

SEQ ID NO: 587325 - DNA, 415 bp, Homo sapiens
  misc_feature (76)..(76): n is a, c, g, or t
  misc_feature (96)..(96): n is a, c, g, or t
  misc_feature (253)..(253): n is a, c, g, or t
ctttcctccacccaagacccacatggccagactctaggaatcttagcttctacaagccaaggtgaccatgggagtntgacagaggaccatgggggngaaagggggacccaaaagtccttcgatcagcagtgctaaggtggggcagagccaaggaggtagtggggctggttctgaaagcttttgggggcttcatctgctctgaaggggtgggactaagagaggaggtgatgttctggttgggcccagggttttnttttaatcttaagtcttctgggcattcatgggcccagtctttttttctgtttgagagtatcattctgttgcccaggttagagtgcagtggtgcaaatcttggctcacttgcatgcagcctctgcctccctgggttcaaagtgatactttgctgataagccca

SEQ ID NO: 587326 - DNA, 687 bp, Homo sapiens
gtgaactcactggataatgtgcggtaaggggtccctacgaagacagagtgatgtggcgggtgatatgctctgcatataggatggtaattgttgaatgtggcgctaagtgtcatgcgatggaagaagtgcaaaacagaagggtggggaaagtggtcatccctaagagcatcagaccataagtaaatggagttatagtctacggattgccccctatttgacttaaagcctaagcacatagtgctgacaggctaatccgctaagtggaagtggccggctgtgttattcaataagactattccccaaagtgttattcttcctaatagttgcagtttctcgcctggagctcatgtttcgtgccaaaccgccatagatcactggtgttggcaagctgtacaatcctgtagacacttcgccaatccatcacacgaatgtgaagtctgttgaactagattccatataatgcactatgattcgtttaacagtatgagagaaatccaattgatccatcctatataggtgaatgatggatgaggggctatcattgttacgagaaatagatccgagaatctagggtgtgatgggatgccgagcgtaaggtagacagggagactccggagtagatagctactctgagtctccttagggaagacagtggtgttaaccgaatgtgttacaagctgtacgcaa

SEQ ID NO: 587327 - DNA, 202 bp, Homo sapiens
ggcgtgctgtggtgctctagcggctcccccttcgcccagccgccttcccagcgccccagccagctccttctggccgtggctctcacacgcgcccgggccggcgcccgtccggcggctcacgcgggggctccccctccggccatctccccactgggcggctccggtcgggctcgtcgggggggtcccgcgctcgccttcgtcc

SEQ ID NO: 587328 - DNA, 1363 bp, Homo sapiens
ggtctgctgctttccatacggtcggctccgcagctggctggctccgcgagtaccgacacgaccgatcgccgagaggttcgcgcgtgaggggtgcacctgacggcatgggagtcgctgcgatcgtaggcggggccggcactatgcgaccgaagcttatcgacacgaagctgagctacgtgttgcatgggagcacgacagtgtcttctgagacatcggtctcacgggagtcacgctgaaaacaccatgttcttgagcacgttgccatggtatcacagaattgcagaggacagcgcgaatggtgttgcaaggctgcacggcgcacaggttgtagttgaggacgtcgttcgcactcgggcacgccatggcgactcgccgattttcagatgagaatcgccaagatgcgttgagacgcgttagtcgtatcggtttgagtgacagtggtcagacggtctaatgacttataaagagacttgtgcaacaggcgttacggttcataaaggcttctcgggaagcttcacaggcctattgaggagaagggtatcaagtgcttgcgttggcaatttctcctcaccattttctgggctcattgcacttggactagacctccgaccgctagcgccgttgaaggcctgcagagggaatttacacgcttgataggaaggcccatctttgcacaccatggcaatagtgccaggggcccatgggagacacctattcctttccctacgtacgagcccctttttgaccgtgctaccggggagggcacgggttgagcgcgtgaaaacgagctcaacttgtacatgtgcattagcacgtgcgaacccggggggcattctatgtaccccaatcagaggccgtggctctaccattggcatcggttgggcacatccaaccccgttagggcccacttggattcttttggcgctttgacggccattttgccagttctggggcaggccttcggggtaaggacacccccgtgtttgtgtggcgtaggcctagaggttgggtcggcttctggacgttggatcccttcggtcagagggggggtacaggtccagttgggacccctgtccttagcgttctccctagtggatgcacgagagccttggttgagttcactttggacacaataccttccagattttgattgacattttgactgccctttcattgggagaatgaccttttcatagacttgtattaggccattaaagtcatatacttccttagatacaacgccaggttatgaggcgatgggcggaccgaacttaacgtttgccacgtggcagtatgaggccccatgtggaccaaggccactaattcagggagtcgcatacacaagaaggggtggtatgaggtc

SEQ ID NO: 587329 - DNA, 390 bp, Homo sapiens
  misc_feature (16)..(16): n is a, c, g, or t
  misc_feature (382)..(382): n is a, c, g, or t
  misc_feature (385)..(385): n is a, c, g, or t
ttaaatatacagttcnctggattttgaaaaatgtatacgtgtacataatcatggatcccaccacccccagttaagatatagaacattcccgggcccggttcagtggatcatgccttgtaatcgcagcatgttgggaggctgaggagggtggacccacttgaggcccaggagtttgagatcagtctgggcaacagggtgaaaccccgcctccactaaaaatacaaaaaaaagaaaaaaaaaaagaaaaaaatagctggccattgtgacatatacctgtaaccgtagctactctggtggctgaggcttgagtatcgcctgggaggcagaggttgcagtgagccaagatggcactgctgcactctagcctgggtgacagtaaaantgncttta

SEQ ID NO: 587330 - DNA, 965 bp, Homo sapiens
aaacttcggctaggtacgaggcctgggtggtgctttttcagtccttcccccaagaccaggcgccagggcgaggtggtgcagcggctgacgcggatggtggggaagaacgtgaagctgtacgacatggtgctgcagtttctgcgcacgctcttcctgcgcacgcggaatgtgcactactgcacgctgcgggctgagctgctcatgtccctgcacgacctggacgtgggtgaaatctgcaccgtggacccgtgccacaagttcacctggtgcctggacgcctgcatccgagagcggttcgtggacagcaagagggcgcgggagctgcaggggtttctcgatggcgtcaagaagggccaggagcaggtgctgggggacctgtccatgatcctgtgtgaccccttcgccatcaacacgctggcactgagcacagtcaggcacctgcaggagctggtcggccaggagacactgcccagggacagccccgacctcctgctgctgctccggctgctggcgctgggccagggagcctgggacatgatcgacagccaggtcttcaaggagcccaagatggaggtagagctcatcaccaggttcctcccgatgctcatgtccttcctggtggatgactacactttcaatgtggatcagaaacttccggctgaggagaaagccccagtctcatatccaaacacacttcccgaaagcttcactaagtttctgcaggagcagcgcatggcctgcgaggtggggctgtactacgtcctgcacatcaccaagcagaggaacaagaacgcgctcctccgcctgctgcccgggctggtggagacctttggcgacttggccttggggaatcttcctccacctgttcccgggcacttgggctgtggcgagaatggcctgaggttcgggggccttcggaggtttcccccgcctccagggaggaggccgggacgcgggcccaaccg

SEQ ID NO: 587331 - DNA, 109 bp, Homo sapiens
ccgcgtacagttgcgaaacaacaaaatagaacgcggtctatccattattcctagctgcggctgagctgtgcctggccctggcttcttggaggcctttgccaactgcggc

SEQ ID NO: 587332 - DNA, 497 bp, Homo sapiens
caccctccagtcctgtgaaaatgccccacgatcaccccctgatggagcaacatgcttctttgttgaaagacaggacagtggatgctgtgagacctgacaccgtcacaggataccctcctccagcaagttccttggtgccaaatgttgaaagccacatgctgagctgaaagacagtgatccaaataagagaagactctcaaactgtgtgttgaatgataattcctcaagccactgtttttattatactcatatgcatgaagatagaacagagaatcatctaagctcttcttttgcttaacatcaaaaccttataaatactcatgccgtttaggaaaacagattcatcagtttaaatattattgccatagcagcagataatcaagttaaacaactaattagggttactatttacagaatttagcatcaatctatgaagtccagatatctttaaagactcctttgtacaaaacaaaacaaaatgttgttttaaaaaaaaa

SEQ ID NO: 587333 - DNA, 2616 bp, Homo sapiens
ggcgtttccctgggggcctggttggcgtggcggacctgggcggtgcggggcggaagtgggcggctgcgggacgcgcgcggagtcgcgcggcgggcgggacctggccgagctggagggcgccggggagcggggctcgggcggtccccgaggcccggcggagcgggcttctggggtgtctgcggcggcgccgggggaacgggctggggatggggcgcctagccgggcggtggccggggcctcggccatgttcgcggggctgcaggacctgggcgtggccaacggcgaggacctgaaggagaccctgaccaactgcacggagccgctcaaggccatcgagcagttccagacagagaatggtgtgctgctgccatctcttcagtcagccctccccttcttggacctgcacgggacgccgcggctggagttccaccagtcggtattcgatgagctgcgggacaagctgctggagcgagtgtcagccatcgcttcggaggggaaggctgaggaaaggtacaagaagctggaagaccttctggagaagagcttttctctggtgaagatgccgtccctgcagcccgtggtgatgtgcgtcatgaagcacctgcccaaggttccggagaaaaaactgaagctggttatggctgacaaggagctgtatcgagcctgcgccgtggaggtgaagcggcagatctggcaagacaaccaggccctcttcggggacgaggtttccccactcctgaagcagtacatcctggagaaggagagcgctctcttcagtacagagctctctgtcctgcacaactttttcagtccttcccccaagaccaggcgccagggcgaggtggtgcagcggctgacgcggatggtggggaagaacgtgaagctgtacgacatggtgctgcagtttctgcgcacgctcttcctgcgcacgcggaatgtgcactactgcacgctgcgggctgagctgctcatgtccctgcacgacctggacgtgggtgaaatctgcaccgtggacccgtgccacaagttcacctggtgcctggacgcctgcatccgagagcggttcgtggacagcaagagggcgcgggagctgcaggggtttctcgatggcgtcaagaagggccaggagcaggtgctgggggacctgtccatgatcctgtgtgaccccttcgccatcaacacgctggcactgagcacagtcaggcacctgcaggagctggtcggccaggagacactgcccagggacagccccgacctcctgctgctgctccggctgctggcgctgggccagggagcctgggacatgatcgacagccaggtcttcaaggagcccaagatggaggtagagctcatcaccaggttcctcccgatgctcatgtccttcctggtggatgactacactttcaatgtggatcagaaacttccggctgaggagaaagccccagtctcatatccaaacacacttcccgaaagcttcactaagtttctgcaggagcagcgcatggcctgcgaggtggggctgtactacgtcctgcacatcaccaagcagaggaacaagaacgcgctcctccgcctgctgcccgggctggtggagacctttggcgacttggcctttggcgacatcttcctccacctgctcacgggcaaccttgcgctgctggccgacgaatttgcccttgaggacttctgcagcagcctcttcgatggcttcttcctcaccgcctctccaaggaaggagaacgtgcaccggcacgcgctgcggctcctcattcacctgcaccccagggtggccccatctaagctggaggcgttgcagaaggccctggagcctacaggccagagcggagaggcagtgaaggagctttactcccagctcggcgagaagctggaacagctggatcaccggaagcccagcccggcacaggctgcggagacgccggccctggagctgcccctccccagcgtgcccgcccctgccccgctctgagggccctccagacctgctcgggtgctggggccatgccgagtcgcggccctgctcagccggaagaggctcccggacctggatgtacagggcagtctctcttcccggggctatggctgggcctgtcctgccgtcatggccccctgcttcctgctccttggagctggctcccggaccttgcccaccatccatgcagtggctcccagggcagagcctctccttgtactttggcagccatagaaagcgtgctcattttctgttttcctgtgttaggaaaaaaccacctgttttccaaggggagagggcggggcctgagggtgggggcggggcctcttcattggcccagcttggcgaaagcgaggcacactgcttactgccttggggttgtggagatggacccgtgacctcgtggaggccgtgtgggggcagcagcctggcctgtgccatggtgggtgtcctggggcctgtgcggagggagccacctcaccctgcagcccaggttgcaggtgtggccttgtttctccttgcccagcagtgctgccttcagcggccgtgacggggccagctggacacacggtgagattttctcgtatgtaaataaaaggcaatttggtaaacgtgaaaaaaaaaaa

SEQ ID NO: 587334 - DNA, 2667 bp, Homo sapiens
ggcgtttccctgggggcctggttggcgtggcggacctgggcggtgcggggcggaagtgggcggctgcgggacgcgcgcggagtcgcgcggcgggcgggacctggccgagctggagggcgccggggagcggggctcgggcggtccccgaggcccggcggagcgggcttctggggtgtctgcggcggcgccggctgcgggacgcgcgcggagtcgcgcggcgggcgggacctggccgagctggagggaacgggctggggatggggcgcctagccgggcggtggccggggcctcggccatgttcgcggggctgcaggacctgggcgtggccaacggcgaggacctgaaggagaccctgaccaactgcacggagccgctcaaggccatcgagcagttccagacagagaatggtgtgctgctgccatctcttcagtcagccctccccttcttggacctgcacgggacgccgcggctggagttccaccagtcggtattcgatgagctgcgggacaagctgctggagcgagtgtcagccatcgcttcggaggggaaggctgaggaaaggtacaagaagctggaagaccttctggagaagagcttttctctggtgaagatgccgtccctgcagcccgtggtgatgtgcgtcatgaagcacctgcccaaggttccggagaaaaaactgaagctggttatggctgacaaggagctgtatcgagcctgcgccgtggaggtgaagcggcagatctggcaagacaaccaggccctcttcggggacgaggtttccccactcctgaagcagtacatcctggagaaggagagcgctctcttcagtacagagctctctgtcctgcacaactttttcagtccttcccccaagaccaggcgccagggcgaggtggtgcagcggctgacgcggatggtggggaagaacgtgaagctgtacgacatggtgctgcagtttctgcgcacgctcttcctgcgcacgcggaatgtgcactactgcacgctgcgggctgagctgctcatgtccctgcacgacctggacgtgggtgaaatctgcaccgtggacccgtgccacaagttcacctggtgcctggacgcctgcatccgagagcggttcgtggacagcaagagggcgcgggagctgcaggggtttctcgatggcgtcaagaagggccaggagcaggtgctgggggacctgtccatgatcctgtgtgaccccttcgccatcaacacgctggcactgagcacagtcaggcacctgcaggagctggtcggccaggagacactgcccagggacagccccgacctcctgctgctgctccggctgctggcgctgggccagggagcctgggacatgatcgacagccaggtcttcaaggagcccaagatggaggtagagctcatcaccaggttcctcccgatgctcatgtccttcctggtggatgactacactttcaatgtggatcagaaacttccggctgaggagaaagccccagtctcatatccaaacacacttcccgaaagcttcactaagtttctgcaggagcagcgcatggcctgcgaggtggggctgtactacgtcctgcacatcaccaagcagaggaacaagaacgcgctcctccgcctgctgcccgggctggtggagacctttggcgacttggcctttggcgacatcttcctccacctgctcacgggcaaccttgcgctgctggccgacgaatttgcccttgaggacttctgcagcagcctcttcgatggcttcttcctcaccgcctctccaaggaaggagaacgtgcaccggcacgcgctgcggctcctcattcacctgcaccccagggtggccccatctaagctggaggcgttgcagaaggccctggagcctacaggccagagcggagaggcagtgaaggagctttactcccagctcggcgagaagctggaacagctggatcaccggaagcccagcccggcacaggctgcggagacgccggccctggagctgcccctccccagcgtgcccgcccctgccccgctctgagggccctccagacctgctcgggtgctggggccatgccgagtcgcggccctgctcagccggaagaggctcccggacctggatgtacagggcagtctctcttcccggggctatggctgggcctgtcctgccgtcatggccccctgcttcctgctccttggagctggctcccggaccttgcccaccatccatgcagtggctcccagggcagagcctctccttgtactttggcagccatagaaagcgtgctcattttctgttttcctgtgttaggaaaaaaccacctgttttccaaggggagagggcggggcctgagggtgggggcggggcctcttcattggcccagcttggcgaaagcgaggcacactgcttactgccttggggttgtggagatggacccgtgacctcgtggaggccgtgtgggggcagcagcctggcctgtgccatggtgggtgtcctggggcctgtgcggagggagccacctcaccctgcagcccaggttgcaggtgtggccttgtttctccttgcccagcagtgctgccttcagcggccgtgacggggccagctggacacacggtgagattttctcgtatgtaaataaaaggcaatttggtaaacgtgaaaaaaaaaaa

SEQ ID NO: 587335 - DNA, 2481 bp, Homo sapiens
acttacggctagtacgaggcccgggtgttcttctggggtgtctgcggcggcgccgggggaacgggctggggatggggcgcctagccgggcggtggccggggcctcggccatgttcgcggggctgcaggacctgggcgtggccaacggcgaggacctgaaggagaccctgaccaactgcacggagccgctcaaggccatcgagcagttccagacagagaatggtgtgctgctgccatctcttcagtcagccctccccttcttggacctgcacgggacgccgcggctggagttccaccagtcggtattcgatgagctgcgggacaagctgctggagcgagtgtcagccatcgcttcggaggggaaggctgaggaaaggtacaagaagctggaagaccttctggagaagagcttttctctggtgaagatgccgtccctgcagcccgtggtgatgtgcgtcatgaagcacctgcccaaggttccggagaaaaaactgaagctggttatggctgacaaggagctgtatcgagcctgcgccgtggaggtgaagcggcagatctggcaagacaaccaggccctcttcggggacgaggtttccccactcctgaagcagtacatcctggagaaggagagcgctctcttcagtacagagctctctgtcctgcacaactttttcagtccttcccccaagaccaggcgccagggcgaggtggtgcagcggctgacgcggatggtggggaagaacgtgaagctgtacgacatggtgctgcagtttctgcgcacgctcttcctgcgcacgcggaatgtgcactactgcacgctgcgggctgagctgctcatgtccctgcacgacctggacgtgggtgaaatctgcaccgtggacccgtgccacaagttcacctggtgcctggacgcctgcatccgagagcggttcgtggacagcaagagggcgcgggagctgcaggggtttctcgatggcgtcaagaagggccaggagcaggtgctgggggacctgtccatgatcctgtgtgaccccttcgccatcaacacgctggcactgagcacagtcaggcacctgcaggagctggtcggccaggagacactgcccagggacagccccgacctcctgctgctgctccggctgctggcgctgggccagggagcctgggacatgatcgacagccaggtcttcaaggagcccaagatggaggtagagctcatcaccaggttcctcccgatgctcatgtccttcctggtggatgactacactttcaatgtggatcagaaacttccggctgaggagaaagccccagtctcatatccaaacacacttcccgaaagcttcactaagtttctgcaggagcagcgcatggcctgcgaggtggggctgtactacgtcctgcacatcaccaagcagaggaacaagaacgcgctcctccgcctgctgcccgggctggtggagacctttggcgacttggcctttggcgacatcttcctccacctgctcacgggcaaccttgcgctgctggccgacgaatttgcccttgaggacttctgcagcagcctcttcgatggcttcttcctcaccgcctctccaaggaaggagaacgtgcaccggcacgcgctgcggctcctcattcacctgcaccccagggtggccccatctaagctggaggcgttgcagaaggccctggagcctacaggccagagcggagaggcagtgaaggagctttactcccagctcggcgagaagctggaacagctggatcaccggaagcccagcccggcacaggctgcggagacgccggccctggagctgcccctccccagcgtgcccgcccctgccccgctctgagggccctccagacctgctcgggtgctggggccatgccgagtcgcggccctgctcagccggaagaggctcccggacctggatgtacagggcagtctctcttcccggggctatggctgggcctgtcctgccgtcatggccccctgcttcctgctccttggagctggctcccggaccttgcccaccatccatgcagtggctcccagggcagagcctctccttgtactttggcagccatagaaagcgtgctcattttctgttttcctgtgttaggaaaaaaccacctgttttccaaggggagagggcggggcctgagggtgggggcggggcctcttcattggcccagcttggcgaaagcgaggcacactgcttactgccttggggttgtggagatggacccgtgacctcgtggaggccgtgtgggggcagcagcctggcctgtgccatggtgggtgtcctggggcctgtgcggagggagccacctcaccctgcagcccaggttgcaggtgtggccttgtttctccttgcccagcagtgctgccttcagcggccgtgacggggccagctggacacacggtgagattttctcgtatgtaaataaaaggcaatttggtaaacgtgaaaaaaaaaaa

SEQ ID NO: 587336 - DNA, 371 bp, Homo sapiens
ggcgccctttattttttctctttgttgatgtgacaaacagcttttattccagattccagtgtccgcagcatgatggggtggggcggaggtagcggcgggggcagcattgggacccgggcggggtgaggggggggcagtccagctgtcagatctctgctgcaagaccgtcaggtgcgtgggaacctgacgtggaggcgggaggtaactatagctcctggccagcctgatccctgcggagtcctttgatcccatggcggtggcctttgtgtcgttgggtccaggtagcatattgctggggcctgggagaagtcacgattcacctggaaggtgaaggccctgtaatatgatacgcgaggacgctacgtgactat

SEQ ID NO: 587337 - DNA, 165 bp, Homo sapiens
tgcgaggttgttctcttccatcttcgtcatacgggccgctgttttaaatgaggatgcggtcaggtccacgcctggggcagcgtccatctccacattgatctcaccacccaccaggcgccacaccacgagccacacgaagagccacaccaagagccccacaatgag

SEQ ID NO: 587338 - DNA, 2618 bp, Homo sapiens
  misc_feature (355)..(355): n is a, c, g, or t
  misc_feature (358)..(358): n is a, c, g, or t
  misc_feature (360)..(360): n is a, c, g, or t
  misc_feature (363)..(363): n is a, c, g, or t
  misc_feature (366)..(366): n is a, c, g, or t
  misc_feature (368)..(368): n is a, c, g, or t
  misc_feature (372)..(372): n is a, c, g, or t
  misc_feature (407)..(409): n is a, c, g, or t
  misc_feature (411)..(415): n is a, c, g, or t
  misc_feature (417)..(418): n is a, c, g, or t
  misc_feature (420)..(420): n is a, c, g, or t
  misc_feature (422)..(422): n is a, c, g, or t
  misc_feature (425)..(426): n is a, c, g, or t
  misc_feature (436)..(436): n is a, c, g, or t
  misc_feature (440)..(443): n is a, c, g, or t
  misc_feature (445)..(445): n is a, c, g, or t
  misc_feature (449)..(450): n is a, c, g, or t
  misc_feature (452)..(455): n is a, c, g, or t
  misc_feature (461)..(462): n is a, c, g, or t
  misc_feature (465)..(465): n is a, c, g, or t
  misc_feature (476)..(476): n is a, c, g, or t
  misc_feature (483)..(483): n is a, c, g, or t
  misc_feature (487)..(488): n is a, c, g, or t
  misc_feature (495)..(495): n is a, c, g, or t
  misc_feature (500)..(501): n is a, c, g, or t
  misc_feature (506)..(506): n is a, c, g, or t
  misc_feature (510)..(512): n is a, c, g, or t
  misc_feature (514)..(514): n is a, c, g, or t
  misc_feature (521)..(522): n is a, c, g, or t
  misc_feature (531)..(531): n is a, c, g, or t
  misc_feature (533)..(533): n is a, c, g, or t
  misc_feature (545)..(547): n is a, c, g, or t
  misc_feature (586)..(586): n is a, c, g, or t
  misc_feature (588)..(588): n is a, c, g, or t
  misc_feature (596)..(596): n is a, c, g, or t
  misc_feature (612)..(612): n is a, c, g, or t
  misc_feature (621)..(621): n is a, c, g, or t
  misc_feature (633)..(633): n is a, c, g, or t
  misc_feature (637)..(637): n is a, c, g, or t
  misc_feature (642)..(642): n is a, c, g, or t
  misc_feature (645)..(646): n is a, c, g, or t
  misc_feature (657)..(657): n is a, c, g, or t
  misc_feature (667)..(668): n is a, c, g, or t
  misc_feature (678)..(678): n is a, c, g, or t
  misc_feature (681)..(681): n is a, c, g, or t
ggcgtttccctgggggcctggttggcgtggcggacctgggcggtgcggggcggaagtgggcggctgcgggacgcgcgcggagtcgcgcggcgggcgggacctggccgagctggagggcgccggggagcggggctcgggcggtccccgaggcccggcggagcgggcttctggggtgtctgcggcggcgccgggggaacgggctggggatggggcgcctagccgggcggtggccggggcctcggccatgttcgcggggctgcaggacctgggcgtggccaacggcgaggacctgaaggagaccctgaccaactgcacggagccgctcaaggccatcgagcagttccagaaaaaaaanggngngangangnaagngaggaacgaacaaagaaaaggagggcaaaggaaannnannnnncnncngnagnnaaaaaagtanctannnnangagnngnnnnaaaagnnganggagagagggnaagaaanagannagcaccncaacnntgacnaaannnanaagaagnngcaacaaangnggcacaaaagcnnngcgcgggggaagaggccggcccggcaccccgcggcggangngcgcgcangaagcacctgcccaancggccccanaaaaaacggaancggnggagnccnnacaaccaccgngagccacccnnccccctgcanctnaacccccagatctggcaagacaaccaggccctcttcggggacgaggtttccccactcctgaagcagtacatcctggagaaggagagcgctctcttcagtacagagctctctgtcctgcacaactttttcagtccttcccccaagaccaggcgccagggcgaggtggtgcagcggctgacgcggatggtggggaagaacgtgaagctgtacgacatggtgctgcagtttctgcgcacgctcttcctgcgcacgcggaatgtgcactactgcacgctgcgggctgagctgctcatgtccctgcacgacctggacgtgggtgaaatctgcaccgtggacccgtgccacaagttcacctggtgcctggacgcctgcatccgagagcggttcgtggacagcaagagggcgcgggagctgcaggggtttctcgatggcgtcaagaagggccaggagcaggtgctgggggacctgtccatgatcctgtgtgaccccttcgccatcaacacgctggcactgagcacagtcaggcacctgcaggagctggtcggccaggagacactgcccagggacagccccgacctcctgctgctgctccggctgctggcgctgggccagggagcctgggacatgatcgacagccaggtcttcaaggagcccaagatggaggtagagctcatcaccaggttcctcccgatgctcatgtccttcctggtggatgactacactttcaatgtggatcagaaacttccggctgaggagaaagccccagtctcatatccaaacacacttcccgaaagcttcactaagtttctgcaggagcagcgcatggcctgcgaggtggggctgtactacgtcctgcacatcaccaagcagaggaacaagaacgcgctcctccgcctgctgcccgggctggtggagacctttggcgacttggcctttggcgacatcttcctccacctgctcacgggcaaccttgcgctgctggccgacgaatttgcccttgaggacttctgcagcagcctcttcgatggcttcttcctcaccgcctctccaaggaaggagaacgtgcaccggcacgcgctgcggctcctcattcacctgcaccccagggtggccccatctaagctggaggcgttgcagaaggccctggagcctacaggccagagcggagaggcagtgaaggagctttactcccagctcggcgagaagctggaacagctggatcaccggaagcccagcccggcacaggctgcggagacgccggccctggagctgcccctccccagcgtgcccgcccctgccccgctctgagggccctccagacctgctcgggtgctggggccatgccgagtcgcggccctgctcagccggaagaggctcccggacctggatgtacagggcagtctctcttcccggggctatggctgggcctgtcctgccgtcatggccccctgcttcctgctccttggagctggctcccggaccttgcccaccatccatgcagtggctcccagggcagagcctctccttgtactttggcagccatagaaagcgtgctcattttctgttttcctgtgttaggaaaaaaccacctgttttccaaggggagagggcggggcctgagggtgggggcggggcctcttcattggcccagcttggcgaaagcgaggcacactgcttactgccttggggttgtggagatggacccgtgacctcgtggaggccgtgtgggggcagcagcctggcctgtgccatggtgggtgtcctggggcctgtgcggagggagccacctcaccctgcagcccaggttgcaggtgtggccttgtttctccttgcccagcagtgctgccttcagcggccgtgacggggccagctggacacacggtgagattttctcgtatgtaaataaaaggcaatttggtaaacgtgaaaaaaaaaaa

SEQ ID NO: 587339 - DNA, 567 bp, Homo sapiens
  misc_feature (255)..(255): n is a, c, g, or t
  misc_feature (413)..(413): n is a, c, g, or t
  misc_feature (429)..(429): n is a, c, g, or t
  misc_feature (489)..(489): n is a, c, g, or t
  misc_feature (522)..(522): n is a, c, g, or t
  misc_feature (544)..(544): n is a, c, g, or t
aaatggcacttcaggaacaagtctacacctctatatattttttgaagcagggtctcactctttcgcccaggctggagtacagtggtgcaatcatggcccactacagccttggctcctgggctcaggtgatcctcccaccacagcctgcagagtagctgggactacaggcttgtgctaccatgcccagctaacttttttttttttttttggtatttttagtagagatagggtttcactatgttggccagctggctncgaactcctggcctcaagtaatcttcagcctcccaaagggctgggaattacaggcaagagccaccgcgcccagcctaacatctctgtattttaaagtctatgccatatggtattacttgtcttttttttgggagagcgtcttgctctgtcacccaggntggagtgcggtggcgntacctcggctcactggaaacctctgcctcacaggtttcaagcaattcttctgccttcggnctcccaagtagctgggattatagggttgggtancacgccagctaatttttttggnatttttagtaggagacgggtttc

SEQ ID NO: 587340 - DNA, 313 bp, Homo sapiens
tagacaacctagggtcagttttgcaggtgtaaagccatttaccaagatagttgtaggtaaagaagggcagatttattagagaaattgtgtaaatatgttgcagtgggcagctcagcagagaaggggctacctgcaaagaggcaagggctggaggaaagttttatagggtcctgctgaagggtgctacgtgtggaatgaggtcattgtgcccgcaggttgtttgtgattagctgtctctaacaattgttcatacaataattgttcattattgttctcaacttggggctctccccaacctggggacccttcctta

SEQ ID NO: 587341 - DNA, 2596 bp, Homo sapiens
ggcgtttccctgggggcctggttggcgtggcggacctgggcggtgcggggcggaagtgggcggctgcgggacgcgcgcggagtcgcgcggcgggcgggacctggccgagctggagggcgccggggagcggggctcgggcggtccccgaggcccggcggagcgggcttctggggtgtctgcggcggcgccgggggaacgggctggggatggggcgcctagccgggcggtggccggggcctcggccatgttcgcggggctgcaggacctgggcgtggccaacggcgaggacctgaaggagaccctgaccaactgcacggagccgctcaaggccatcgagcagttccagacagagaatggtgtgctgctgccatctcttcagtcagccctccccttcttggacctgcacgggacgccgcggctggagttccaccagtcggtattcgatgagctgcgggacaagctgctggagcgagtgtcagccatcgcttcggaggggaaggctgaggaaaggtacaagaagctggaagaccttctggagaagagcttttctctggtgaagatgccgtccctgcagcccgtggtgatgtgcgtcatgaagcacctgcccaaggttccggagaaaaaactgaagctggttatggctgacaaggagctgtatcgagcctgcgccgtggaggtgaagcggcagatctggcaagacaaccaggccctcttcggggacgaggtttccccactcctgaagcagtacatcctggagaaggagagcgctctcttcagtacagagctctctgtcctgcacaactttttcagtccttcccccaagaccaggcgccagggcgaggtggtgcagcggctgacgcggatggtggggaagaacgtgaagctgtacgacatggtgctgcagtttctgcgcacgctcttcctgcgcacgcggaatgtgcactactgcacgctgcgggctgagctgctcatgtccctgcacgacctggacgtgggtgaaatctgcaccgtggacccgtgccacaagttcacctggtgcctggacgcctgcatccgagagcggttcgtggacagcaagagggcgcgggagctgcaggggtttctcgatggcgtcaagaagggccaggagcaggtgctgggggacctgtccatgatcctgtgtgaccccttcgccatcaacacgctggcactgagcacagtcaggcacctgcaggagctggtcggccaggagacactgcccagggacagccccgacctcctgctgctgctccggctgctggcgctgggccagggagcctgggacatgatcgacagccaggtcttcaaggagcccaagatggaggtagagctcatcaccaggttcctcccgatgctcatgtccttcctggtggatgactacactttcaatgtggatcagaaacttccggctgaggagaaagccccagtctcatatccaaacacacttcccgaaagcttcactaagtttctgcaggagcagcgcatggcctgcgaggtggggctgtactacgtcctgcacatcaccaagcagaggaacaagaacgcgctcctccgcctgctgcccgggctggtggagacctttggcgacttggcctttggcgacatcttcctccacctgctcacgggcaaccttgcgctgctggccgacgaatttgcccttgaggacttctgcagcagcctcttcgatggcttcttcctcaccgcctctccaaggaaggagaacgtgcaccggcacgcgctgcggctcctcattcacctgcaccccagggtggccccatctaagctggaggcgttgcagaaggccctggagcctacaggccagagcggagaggcagtgaaggagctttactcccagctcggcgagaagctggaacagctggatcaccggaagcccagcccggcacaggctgcggagacgccggccctggagctgcccctccccagcgtgcccgcccctgccccgctctgagggccctccagacctgctcgggtgctggggccatgccgagtcgcggccctgctcagccggaagaggctcccggacctggatgtacagggcagtctctcttcccggggctatggctgggcctgtcctgccgtcatggccccctgcttcctgctccttggagctggctcccggaccttgcccaccatccatgcagtggctcccagggcagagcctctccttgtactttggcagccatagaaagcgtgctcattttctgttttcctgtgttaggaaaaaaccacctgttttccaaggggagagggcggggcctgagggtgggggcggggcctcttcattggcccagcttggcgaaagcgaggcacactgcttactgccttggggttgtggagatggacccgtgacctcgtggaggccgtgtgggggcagcagcctggcctgtgccatggtgggtgtcctggggcctgtgcggagggagccacctcaccctgcagcccaggttgcaggtgtggccttgtttctccttgcccagcagtgctgccttcagcggccgtgacggggccagctggacacacggtgagattttctcgtatgtaaataaaaggcaatttg

SEQ ID NO: 587342 - DNA, 84 bp, Homo sapiens
  misc_feature (84)..(84): n is a, c, g, or t
tgctgggattacaggtgtgggtcaccacgcctggccgcttaattgttatttctacatgaactttagaatcagcttgtctaattn

SEQ ID NO: 587343 - DNA, 2568 bp, Homo sapiens
ggcgtttccctgggggcctggttggcgtggcggacctgggcggtgcggggcggaagtgggcggctgcgggacgcgcgcggagtcgcgcggcgggcgggacctggccgagctggagggcgccggggagcggggctcgggcggtccccgaggcccggcggagcgggcttctggggtgtctgcggcggcgccgggggaacgggctggggatggggcgcctagccgggcggtggccggggcctcggccatgttcgcggggctgcaggacctgggcgtggccaacggcgaggacctgaaggagaccctgaccaactgcacggagccgctcaaggccatcgagcagttccagacagagaatggtgtgctgctgccatctcttcagtcagccctccccttcttggacctgcacgggacgccgcggctggagttccaccagtcggtattcgatgagctgcgggacaagctgctggagcgagtgtcagccatcgcttcggaggggaaggctgaggaaaggtacaagaagctggaagaccttctggagaagagcttttctctggtgaagatgccgtccctgcagcccgtggtgatgtgcgtcatgaagcacctgcccaaggttccggagaaaaaactgaagctggttatggctgacaaggagctgtatcgagcctgcgccgtggaggtgaagcggcagatctggcaagacaaccaggccctcttcggggacgaggtttccccactcctgaagcagtacatcctggagaaggagagcgctctcttcagtacagagctctctgtcctgcacaactttttcagtccttcccccaagaccaggcgccagggcgaggtggtgcagcggctgacgcggatggtggggaagaacgtgaagctgtacgacatggtgctgcagtttctgcgcacgctcttcctgcgcacgcggaatgtgcactactgcacgctgcgggctgagctgctcatgtccctgcacgacctggacgtgggtgaaatctgcaccgtggacccgtgccacaagttcacctggtgcctggacgcctgcatccgagagcggttcgtggacagcaagagggcgcgggagctgcaggggtttctcgatggcgtcaagaagggccaggagcaggtgctgggggacctgtccatgatcctgtgtgaccccttcgccatcaacacgctggcactgagcacagtcaggcacctgcaggagctggtcggccaggagacactgcccagggacagccccgacctcctgctgctgctccggctgctggcgctgggccagggagcctgggacatgatcgacagccaggtcttcaaggagcccaagatggaggtagagctcatcaccaggttcctcccgatgctcatgtccttcctggtggatgactacactttcaatgtggatcagaaacttccggctgaggagaaagccccagtctcatatccaaacacacttcccgaaagcttcactaagtttctgcaggagcagcgcatggcctgcgaggtggggctgtactacgtcctgcacatcaccaagcagaggaacaagaacgcgctcctccgcctgctgcccgggctggtggagacctttggcgacttggcctttggcgacatcttcctccacctgctcacgggcaaccttgcgctgctggccgacgaatttgcccttgaggacttctgcagcagcctcttcgatggcttcttcctcaccgcctctccaaggaaggagaacgtgcaccggcacgcgctgcggctcctcattcacctgcaccccagggtggccccatctaagctggaggcgttgcagaaggccctggagcctacaggccagagcggagaggcagtgaaggagctttactcccagctcggcgagaagctggaacagctggatcaccggaagcccagcccggcacaggctgcggagacgccggccctggagctgcccctccccagcgtgccgccatgccgagtcgcggccctgctcagccggaagaggctcccggacctggatgtacagggcagtctctcttcccggggctatggctgggcctgtcctgccgtcatggccccctgcttcctgctccttggagctggctcccggaccttgcccaccatccatgcagtggctcccagggcagagcctctccttgtactttggcagccatagaaagcgtgctcattttctgttttcctgtgttaggaaaaaaccacctgttttccaaggggagagggcggggcctgagggtgggggcggggcctcttcattggcccagcttggcgaaagcgaggcacactgcttactgccttggggttgtggagatggacccgtgacctcgtggaggccgtgtgggggcagcagcctggcctgtgccatggtgggtgtcctggggcctgtgcggagggagccacctcaccctgcagcccaggttgcaggtgtggccttgtttctccttgcccagcagtgctgccttcagcggccgtgacggggccagctggacacacggtgagattttctcgtatgtaaataaaaggcaatttggtaaacgtgaaaaaaaaaaa

SEQ ID NO: 587344 - DNA, 1847 bp, Homo sapiens
aaacttcggctaggtacgaggcctgggtggtgctttttcagtccttcccccaagaccaggcgccagggcgaggtggtgcagcggctgacgcggatggtggggaagaacgtgaagctgtacgacatggtgctgcagtttctgcgcacgctcttcctgcgcacgcggaatgtgcactactgcacgctgcgggctgagctgctcatgtccctgcacgacctggacgtgggtgaaatctgcaccgtggacccgtgccacaagttcacctggtgcctggacgcctgcatccgagagcggttcgtggacagcaagagggcgcgggagctgcaggggtttctcgatggcgtcaagaagggccaggagcaggtgctgggggacctgtccatgatcctgtgtgaccccttcgccatcaacacgctggcactgagcacagtcaggcacctgcaggagctggtcggccaggagacactgcccagggacagccccgacctcctgctgctgctccggctgctggcgctgggccagggagcctgggacatgatcgacagccaggtcttcaaggagcccaagatggaggtagagctcatcaccaggttcctcccgatgctcatgtccttcctggtggatgactacactttcaatgtggatcagaaacttccggctgaggagaaagccccagtctcatatccaaacacacttcccgaaagcttcactaagtttctgcaggagcagcgcatggcctgcgaggtggggctgtactacgtcctgcacatcaccaagcagaggaacaagaacgcgctcctccgcctgctgcccgggctggtggagacctttggcgacttggcctttggcgacatcttcctccacctgctcacgggcaaccttgcgctgctggccgacgaatttgcccttgaggacttctgcagcagcctcttcgatggcttcttcctcaccgcctctccaaggaaggagaacgtgcaccggcacgcgctgcggctcctcattcacctgcaccccagggtggccccatctaagctggaggcgttgcagaaggccctggagcctacaggccagagcggagaggcagtgaaggagctttactcccagctcggcgagaagctggaacagctggatcaccggaagcccagcccggcacaggctgcggagacgccggccctggagctgcccctccccagcgtgcccgcccctgccccgctctgagggccctccagacctgctcgggtgctggggccatgccgagtcgcggccctgctcagccggaagaggctcccggacctggatgtacagggcagtctctcttcccggggctatggctgggcctgtcctgccgtcatggccccctgcttcctgctccttggagctggctcccggaccttgcccaccatccatgcagtggctcccagggcagagcctctccttgtactttggcagccatagaaagcgtgctcattttctgttttcctgtgttaggaaaaaaccacctgttttccaaggggagagggcggggcctgagggtgggggcggggcctcttcattggcccagcttggcgaaagcgaggcacactgcttactgccttggggttgtggagatggacccgtgacctcgtggaggccgtgtgggggcagcagcctggcctgtgccatggtgggtgtcctggggcctgtgcggagggagccacctcaccctgcagcccaggttgcaggtgtggccttgtttctccttgcccagcagtgctgccttcagcggccgtgacggggccagctggacacacggtgagattttctcgtatgtaaataaaaggcaatttggtaaacgtgaaaaaaaaaaa

SEQ ID NO: 587345 - DNA, 1935 bp, Homo sapiens
ggcactttgggagtacgaggcagatgcctgagctcaggagttcgagaccagcctgggcaacaccgtgaaacctcgtctctactaaaatacaaaaaaaaaaaattagctgggcgtggcggtgtgcacttgtagtcccagctacgggggaggctgaggcgaggtggtgcagcggctgacgcggatggtggggaagaacgtgaagctgtacgacatggtgctgcagtttctgcgcacgctcttcctgcgcacgcggaatgtgcactactgcacgctgcgggctgagctgctcatgtccctgcacgacctggacgtgggtgaaatctgcaccgtggacccgtgccacaagttcacctggtgcctggacgcctgcatccgagagcggttcgtggacagcaagagggcgcgggagctgcaggggtttctcgatggcgtcaagaagggccaggagcaggtgctgggggacctgtccatgatcctgtgtgaccccttcgccatcaacacgctggcactgagcacagtcaggcacctgcaggagctggtcggccaggagacactgcccagggacagccccgacctcctgctgctgctccggctgctggcgctgggccagggagcctgggacatgatcgacagccaggtcttcaaggagcccaagatggaggtagagctcatcaccaggttcctcccgatgctcatgtccttcctggtggatgactacactttcaatgtggatcagaaacttccggctgaggagaaagccccagtctcatatccaaacacacttcccgaaagcttcactaagtttctgcaggagcagcgcatggcctgcgaggtggggctgtactacgtcctgcacatcaccaagcagaggaacaagaacgcgctcctccgcctgctgcccgggctggtggagacctttggcgacttggcctttggcgacatcttcctccacctgctcacgggcaaccttgcgctgctggccgacgaatttgcccttgaggacttctgcagcagcctcttcgatggcttcttcctcaccgcctctccaaggaaggagaacgtgcaccggcacgcgctgcggctcctcattcacctgcaccccagggtggccccatctaagctggaggcgttgcagaaggccctggagcctacaggccagagcggagaggcagtgaaggagctttactcccagctcggcgagaagctggaacagctggatcaccggaagcccagcccggcacaggctgcggagacgccggccctggagctgcccctccccagcgtgcccgcccctgccccgctctgagggccctccagacctgctcgggtgctggggccatgccgagtcgcggccctgctcagccggaagaggctcccggacctggatgtacagggcagtctctcttcccggggctatggctgggcctgtcctgccgtcatggccccctgcttcctgctccttggagctggctcccggaccttgcccaccatccatgcagtggctcccagggcagagcctctccttgtactttggcagccatagaaagcgtgctcattttctgttttcctgtgttaggaaaaaaccacctgttttccaaggggagagggcggggcctgagggtgggggcggggcctcttcattggcccagcttggcgaaagcgaggcacactgcttactgccttggggttgtggagatggacccgtgacctcgtggaggccgtgtgggggcagcagcctggcctgtgccatggtgggtgtcctggggcctgtgcggagggagccacctcaccctgcagcccaggttgcaggtgtggccttgtttctccttgcccagcagtgctgccttcagcggccgtgacggggccagctggacacacggtgagattttctcgtatgtaaataaaaggcaatttggtaaacgtgaaaaaaaaaaa

SEQ ID NO: 587346 - DNA, 712 bp, Homo sapiens
agagctgagccggtccaacaccctcatctgccacattgacatggtcttccgaccagcgctcaacgtcacgtggctgtgcatcggcgagctggtcactgctggtgtcgctgagagcctcttcctgcccagaacagattacagcattcacatgttccattacctgacctttgtgcctttactggaggacttatatgactgcagggaggagcactgcggcttggaccagtcgctcctcaagcactgggcggcccaagagccaatccagatgcctgggacatcggatactgtgctttgagccctgtgcctggtgctgggcctagtcggcgatcatcgagggcaccgtgctcatcataaagtctctgtgtgctgcacatgaccctcggtgccagtggaccctgtcatatactgtaaaggagacacagtatgtgaactgattaggacgtacgagagatctgaactccagcttgcctacaaactccatctgagctgttcttcgcacttgatgtggctacttcagtggctgactcgaatgctgacctgtaagctctgtcttatcattacctcatagcagtcatccttaggagagtttcgacaatcgagttcatgacactgtgtagcactatatggagatatccttcatgagcctttaacctctgactctttgagaaccctactgtacctaccagactcctgagacattctcagtttcgcc

SEQ ID NO: 587347 - DNA, 2622 bp, Homo sapiens
  misc_feature (2068)..(2069): n is a, c, g, or t
  misc_feature (2074)..(2074): n is a, c, g, or t
  misc_feature (2090)..(2090): n is a, c, g, or t
  misc_feature (2126)..(2126): n is a, c, g, or t
  misc_feature (2128)..(2128): n is a, c, g, or t
  misc_feature (2142)..(2142): n is a, c, g, or t
  misc_feature (2157)..(2157): n is a, c, g, or t
  misc_feature (2165)..(2165): n is a, c, g, or t
  misc_feature (2170)..(2171): n is a, c, g, or t
  misc_feature (2174)..(2174): n is a, c, g, or t
  misc_feature (2176)..(2177): n is a, c, g, or t
  misc_feature (2179)..(2179): n is a, c, g, or t
  misc_feature (2181)..(2181): n is a, c, g, or t
ggcgtttccctgggggcctggttggcgtggcggacctgggcggtgcggggcggaagtgggcggctgcgggacgcgcgcggagtcgcgcggcgggcgggacctggccgagctggagggcgccggggagcggggctcgggcggtccccgaggcccggcggagcgggcttctggggtgtctgcggcggcgccgggggaacgggctggggatggggcgcctagccgggcggtggccggggcctcggccatgttcgcggggctgcaggacctgggcgtggccaacggcgaggacctgaaggagaccctgaccaactgcacggagccgctcaaggccatcgagcagttccagacagagaatggtgtgctgctgccatctcttcagtcagccctccccttcttggacctgcacgggacgccgcggctggagttccaccagtcggtattcgatgagctgcgggacaagctgctggagcgagtgtcagccatcgcttcggaggggaaggctgaggaaaggtacaagaagctggaagaccttctggagaagagcttttctctggtgaagatgccgtccctgcagcccgtggtgatgtgcgtcatgaagcacctgcccaaggttccggagaaaaaactgaagctggttatggctgacaaggagctgtatcgagcctgcgccgtggaggtgaagcggcagatctggcaagacaaccaggccctcttcggggacgaggtttccccactcctgaagcagtacatcctggagaaggagagcgctctcttcagtacagagctctctgtcctgcacaactttttcagtccttcccccaagaccaggcgccagggcgaggtggtgcagcggctgacgcggatggtggggaagaacgtgaagctgtacgacatggtgctgcagtttctgcgcacgctcttcctgcgcacgcggaatgtgcactactgcacgctgcgggctgagctgctcatgtccctgcacgacctggacgtgggtgaaatctgcaccgtggacccgtgccacaagttcacctggtgcctggacgcctgcatccgagagcggttcgtggacagcaagagggcgcgggagctgcaggggtttctcgatggcgtcaagaagggccaggagcaggtgctgggggacctgtccatgatcctgtgtgaccccttcgccatcaacacgctggcactgagcacagtcaggcacctgcaggagctggtcggccaggagacactgcccagggacagccccgacctcctgctgctgctccggctgctggcgctgggccagggagcctgggacatgatcgacagccaggtcttcaaggagcccaagatggaggtagagctcatcaccaggttcctcccgatgctcatgtccttcctggtggatgactacactttcaatgtggatcagaaacttccggctgaggagaaagccccagtctcatatccaaacacacttcccgaaagcttcactaagtttctgcaggagcagcgcatggcctgcgaggtggggctgtactacgtcctgcacatcaccaagcagaggaacaagaacgcgctcctccgcctgctgcccgggctggtggagacctttggcgacttggcctttggcgacatcttcctccacctgctcacgggcaaccttgcgctgctggccgacgaatttgcccttgaggacttctgcagcagcctcttcgatggcttcttcctcaccgcctctccaaggaaggagaacgtgcaccggcacgcgctgcggctcctcattcacctgcaccccagggtggccccatctaagctggaggcgttgcagaaggccctggagcctacaggccagagcggagaggcagtgaaggagctttactcccagctcggcgagaagctggaacagctggatcaccggaagcccagcccggcacaggctgcggagacgccggccctggagctgcccctccccagcgtgcccgcccctgccccgctctgagggccctccagacctgctcgggtgctggggccatgccgagtcgcggccctgctcagccggaagaggctcccggactggganncatantttattttttttttcntggtttttatgttttttttttctcttcttttttttncntttgtttctttttnttttttttttgtttnttgttatnttttnnttntnntntntgcagtggctcccagggcagagcctctccttgtactttggcagccatagaaagcgtgctcattttctgttttcctgtgttaggaaaaaaccacctgttttccaaggggagagggcggggcctgagggtgggggcggggcctcttcattggcccagcttggcgaaagcgaggcacactgcttactgccttggggttgtggagatggacccgtgacctcgtggaggccgtgtgggggcagcagcctggcctgtgccatggtgggtgtcctggggcctgtgcggagggagccacctcaccctgcagcccaggttgcaggtgtggccttgtttctccttgcccagcagtgctgccttcagcggccgtgacggggccagctggacacacggtgagattttctcgtatgtaaataaaaggcaatttggtaaacgtgaaaaaaaaaaa

SEQ ID NO: 587348 - DNA, 424 bp, Homo sapiens
ggagctattgagggtctgtgatacatgaagttaaaataggcacagtaagtgattaaaacaaaataataaaatagaacaattatataattacagtatactgtaaaaaagttatatgaatgtggattatctccctctctctcaaaatatttattgtgctgtaaccacccttcttctggtgatgatgtgagatgataaaatgcctacatgatgagatagtgaggtgagtgacataggccttgtgacatagccttaggctactactgaccttttaaccatatgccagtaggagaataatctgctgtgaatgatcctagatcagtgagccataataatgtccatggttagacgtcaagagcagacaatgccgatgactaacgggcaggtagtatatacagtgtggatgtgctggacaaatagaggattt

SEQ ID NO: 587349 - DNA, 216 bp, Homo sapiens
  misc_feature (6)..(6): n is a, c, g, or t
  misc_feature (102)..(102): n is a, c, g, or t
  misc_feature (177)..(178): n is a, c, g, or t
  misc_feature (198)..(198): n is a, c, g, or t
ttcatntctgggacactcgcatgttgatgttgcaatcaactgatgccagcagaaagctattttagatttgtgaacatgactgccttatttaaagggtcctgnattgccttgatattcctaagcacattcattaaactagaaaccaggaaaacacttttgcaaataacagcataaggnnacttcactgtctctgctcantaaaatacctgtaactgg

SEQ ID NO: 587350 - DNA, 155 bp, Homo sapiens
tctcgttcggaagccccaagttaggtaacaccaatggggagtattggcgatcgtgtataccacgtcgatctgctgactgaagttccccttcgctcatccacaacgtgcggccttgctgcaccacgataccggcttgggctcagtacgctgcttac

SEQ ID NO: 587351 - DNA, 964 bp, Homo sapiens
taaaaacacttttgacccccaaaaaaaaggttttattttgggggcgggtaaaaaaaagggggggaaacttgggggggggggggaggaaatggcgatgtggtggcacgggaggcgcgtcaacgggttatctgcgtggagcaaaacccagagtagggggcccacgaggtatggaaattacaaaccgtggggtggccccagtgtttgtggcataatggtcaaaagacaacaagaaacacctctctcaggaaggacaagagtttgtgggtggggcgaaatagctcggtggacacacgtggtaactttaacaacacaatgaattatttccgcaggtggttcctctcccagaaaacaagggtggcctaaaaaattcgtgggtggtatacaccaaacacaatcatatatgggcgcggcgggtgaaaacaaacagggggggcgcccaacaaactactgggtggcgccacgacccacaacaaaaaaataatgttacattacatacaatggtggtggaccatctccggcgaagaaaaggggtgaccacccaccacaggagttgttacaaagaagtggagaagttgggtcgctcaaaaaacagacctccttttgtgggtggcaaaacggctgtgtagtcaccccgtggggggaacccagcaggatgaaatggggtcgaacggggtaccgaggaagaaatagaatcaacccaccctattattgttacccaaccatttcaaccaccccaatctgtgggtgtccggcgtgcacagcacaaacaacattcaggcgaggagatgcacacataatcgttcacaacaacagacacattattatgagcaagcggcgctactaaccaaagtgggccccctataaggaggagcagtagactacgcggcgcaaaagggagggaacagcacgcgtatggtcccaagtaaacaaaaacatattaccgcgtgcaactagcaacaacaaa

SEQ ID NO: 587352 - DNA, 190 bp, Homo sapiens
ctgtatgcctgtgagggatgcacatcatgaagacacctcgggatttgctgctgacacattaggacgcccatactctggcttgaagaagccctgttgcacccaccaagggtaccaggcagcctccacaataccgagggctgtaggagtcgggcatggggccactgacatctttcttctccccgggatacag

SEQ ID NO: 587353 - DNA, 349 bp, Homo sapiens
  misc_feature (47)..(47): n is a, c, g, or t
  misc_feature (88)..(88): n is a, c, g, or t
  misc_feature (98)..(98): n is a, c, g, or t
  misc_feature (103)..(104): n is a, c, g, or t
  misc_feature (106)..(106): n is a, c, g, or t
  misc_feature (197)..(197): n is a, c, g, or t
  misc_feature (205)..(205): n is a, c, g, or t
tccctccctttccttccctaccctctcaccatcttttttggcctctntgagggtctctctgtgcatctttttaggaatctcgctctcnctctttaagnagccnntntccttcccccatttttgggtccacccctgaactcctgagggacagaagccccaggcctcccccagccttgaacccttgcaaaggggcaggncaaggggncccctttcactcctgctgctgcccatgctttgccctcccttttggttgctttgagggttcggagcttccctttgggactaaaggagtgtcctttaccctcccagcctccagggtttggcagaaataaactcccacccggctgga

SEQ ID NO: 587354 - DNA, 262 bp, Homo sapiens
gacattacggggcttgccacattagacctttttgttctgcagttaatattcacctattttacaactcattgtggactcatgaaaaacacacaccaccttttggcttacttcgagtatttgaattgactggatccacttgcagtgcaacagtgcatagtggccataacttaagatggggaaaacacacatgggtttggggcaataggaacatcatcataattcttgtggttctatttcaggtataggattataaaataattgg

SEQ ID NO: 587355 - DNA, 300 bp, Homo sapiens
tgcgcgagtacttggctgcgtgtcagcttggttgccggcattcagctctagtcgatgctgctggtgacctggcgccactccccgcgagttcacccctgtcggtgccgcctcctggacaagtttctggcttctgtgagcaccgtgctgatctccaaataccgttaagctggagcctctgtagccgttcctcctgcccgctgggcctcccaacggggcctccttccctccttgaatcgggccttactggtctttgaatcaagtctgagtgggcggccgcaaggtgctcggcgggcgcaagga

SEQ ID NO: 587356 - DNA, 946 bp, Homo sapiens
  misc_feature (165)..(165): n is a, c, g, or t
ggatcgcacatgctgaccttcctgcagcaactgcgggtggcagtggcccgtgcctcggagagagcttcctcccacagcctgaggagccacgccttgaagaattacctctgctattgacggggaggacattgtccccgtgacattcctaggcagactggttgtctngaacgcgaagcttggttggagagaacagggccgcatagtgggtatagacccaaacttgacaactgttcttgtgactgagggatctccttctcttgtgctggttgagtttgcagaagaaggttctaattgggattgccccgaggaacaggccacccaggcctggttggggcctcagatactggtacagggcggctcgctttggttgtggaccatggtgggtagctggtgaagagaggaatgtcccagcaaaacatgaggttggacgctgcttgtgcagaagaggtgggttcagcgaaagggttccatccagacgagaaacgacctacattctggtgggcccgtgggtgaaaggtactgggggcacctgggactcttgattgattgcccttgagtacacacggagttcggggcatccccaagggtgttgcaagggctcagactttgaacagcatgcggggaatctggcaaagagaccaaggcttggaaaagagaatcttgtgtacctcttctggggcgcccatccatgtttggtatgtgagaaggccccaaagagcaggtttcctggctctggctgcacgcgttgttccagaagggaccagatgggcctttgcatgatatgcgcccgttgcaattttggagttcagttttcgggccctctttgccattccttgggagctggctacggagagagggggtggggcaccgaacccctggcgtgcggaggggaggccggccatttcggggatcgcggaggtcaacacggccccttgctcaggtggca

SEQ ID NO: 587357 - DNA, 1674 bp, Homo sapiens
ttatgtggtagaggtggagtggtaagatgaagtgtaggtgtaggatgagatgatagtgagtagtagaagtattgttgatcagtaggagagtacagtacgttggtatatgaagtatattgtgttaatgttgttggtaagagatgagttggtaatgagtaacgagtggtggtgtgagtagtacatataaaggtgttaagtaagtagagtatagttggatatcgtgtaaagtagttatgtcaagaagatgttgtctgatagtacggtggatgagaattggaagtggtgagctataaagtattggaatatactagttttgtatggatgaagattgtcttgtaatatataattgtggtatgattagtggtgatgattggggattgaagagattagttagtaggtaggtattgtaatcgggtgggtaaagtgtatgtgtgggggataagggtgtgtttgatgggatagtgtgcaagtgttagataaagtttgatgtttggtgtgtgttatcgacgtaaagtaggtttaaggtgtgttagggtagaagtttgcgtatgtagagtgagttggtgtgttgtatgggttatatgttattggggtgatggtatatagggtgggtgtgtgtaagtatatgtatgttattgtggtatgatggtgaggatgtgaagatttggtgtagaagaggggtgttgatagaggtgtgttccgtgtgtgattgtagtagtatatatgggtgtatggtgtttgtgttagtggagaggatgtgagtgtggtggtgagtgagggagggtggtggtatgtaaggagtggacttctgtgccgatggggggtatgttgttaggtgggtgtggtaagtatatgtgactgtaagattgggtgtatagggtgggagtggtggtaaggtggtgtggtaggcgatagattgttgtagagacgtttggcattgggagttattggtggtggatggggtgtgtgtgatggtaggtgtgaggatagtgttgtgtagtgtatgagagggttcaagttgtgtgcaggtagaagtggtgagggtttgagtaggaaagtgaagagaatggtttgtggtgattggggtttaaggctagggtaggctgtcggctgtgtctcgagagagttagtgtgagggttggtggtctctgtgtgtggctgtgtgagaagtttggaatgttgtgagcattgtaagatggaagtagtggatacagctgtggaggatggcctgtgggaattgatagcagcatggctgtggtgaatagttgtggcattgatactgtgttggtaagcgtcgtcttctgtccattgtacaagtggtgtgttgttgcaatggacatgggttcagtgtttgtgttgtagcccagcgtttgtgaatcttccagttgtgcttttgttctggtgcttttatcgcaagttgactacctaatgatctaatcgagaacatataatgaatgcacttgttgctgcacttagtgtaactgtggtgtggcttttgcagcttaaaacgaggtacttcatatgctctagttgtaaatgtgtcatgaaaatccacttctctactagtcgaactgctgttagtgtctcaccagtggttttacatctgcagagttttgagggctgtgctgacctttgagaggatttgaaattgctttaaattcgagtcctaaagtt

SEQ ID NO: 587358 - DNA, 805 bp, Homo sapiens
ggttggttcctgaattcgctgcggctgtgggaaatgctggcgcgcgctgtgcggtataatgtggcccttttgctgaggatctctctactgacttctgtcctgcgtctccgcgcctggcttcctctggattgccccgaaacaccgtgatattgtgcgtgccgcagctatggaggcctgcgtgatgagaacagaatggcgccgagtatccaccggatcctggagcctggtttgaacatcctcatccctgtttttatacctggattacagatatgtgcagcagtctcaagggaaacttttgtcatcatgcagtgctcgtgagacacgtcgcgcatgtgatggtctcgacaatgtaatctctgtaaattaatggagtcctttacctgtatatcatggacccttacaaggtaagctacggtgtggaggaccctgagtatgcctgtcgatcctcagcctagctacaaacgagacctatagagatacaccagcatcgagtgagaactctctcgtggcaccaaaggtcattccgaggcaagcgcgaagatccctgaatgccagcattgttggatgcctatcagaccaagctgctgactgcgtgggttatccgctgcctccgttatgcagcatcaaggatctccattggtgtcaccccggggattgaataggagtctatgcagatgcatgtggcacggcatgagcgccggaaggcgggccagagtgctagaagtctgaagggaccccggaaagttcggcatcaatgtgggcagaagtgaagaaacaggccagactcctggcctctcgaagcgaa

SEQ ID NO: 587359 - DNA, 921 bp, Homo sapiens
gctccgcggcggcgtggtgtgcaagggaggtgccgctgcggttcaggtgttgaacttgcagggggccgtgttaagcccatgcagatcgccgtggacccccaggaagagccgcataatgcacctgatgtcaactacgtggtggagaacccagactggatctggaacagtacgcggcagctacagggttgctgatgcgcatcgaacgggtgcagttcattgctgatcagctgtcccacgctgcgggtgtgatgtgccctgaagatggccctctccttcgtgcatgagaacctttaaccgtggacatgtactgaggaggatccaccgcaatgctctcagaggcaccagggagctgcagaatgcaccctgacgccatccctgagagctggtgtggagcccccagcctggacacagctgggtggaggccactgcggacagaaggcggctgctgaagctggagaagctggagccacagacctgaatgaactacaaggtgctaaatccatcaaagagagcatccggctgcggcacgacgacctgtggtgaccactacctggagtgtggggacctcagcaacgccctcaagtgctattcccgggccgggactactggaccagtgccaaacacgtcatcaacatgttgcctcaattgtcattccacggtcaagcgtctactctgcagacattggtctcatgttggtcagactaccgtacaggcaaggcgttgagtcaaccccaagaagattgccgagctgactgagagcgttgacaggcaaagccagggcatacttcacaggttcagttgtgcgcagccttggaaagttgccgccaggaattcaaggaggctgccaaagcccccgtgggtcattgagcccttggactcctgagtgtgtccccaaagtggcctcaggggccgcgcctggcg

SEQ ID NO: 587360 - DNA, 287 bp, Homo sapiens
ctgcagaatagaaaaaatacaaaaaaaaggaaaaccttatatattttaggaaataatgcttgcactttttcagactttttcacattattgagtacactattctataaaagcatggctatattttagtaacccttgaatattgttaatagtgtaatgtatgctaccatgggtgaataaattagaattttcagactatgcctttattctggcattcagaataatatctctatgggaatatcaccactgttgaaggtttatttgttagattcctgcgttagttgtctccg

SEQ ID NO: 587361 - DNA, 123 bp, Homo sapiens
attttttaattttttggaaagggggggcccccccattttgcccctcccgggggcccacctggggcaaaaaaggaaaggcccccaatttttaagttttttttaaattcaaaaaaaattaattga

SEQ ID NO: 587362 - DNA, 289 bp, Homo sapiens
cgaggtggaatcaaacaggagaaagagggaggagaggagggaggagagagtgtaggaaaaaagcaggaggaaagagccgggcacggtggctcacgcctgtaatcccagcactttgggaggccaaggcaggcagatcacgaggtgaggagatcgagaccgtcctggctaacacggtgaaaccctgtctctactaaaaatacaaaaaaaaaattagcagggcatggtggcaggcgcctgtagtcccagctactcgggaggctgaggcaggagaatggcgtgaaccctggag

SEQ ID NO: 587363 - DNA, 399 bp, Homo sapiens
caaatttcacattcatgcaattggaattgggaagtgtaaaagaaggattgttaaatgtgggaagcttcacaaaaaggggcgcaaactctgtgtttatgctttcaaaggagaaaccatcaaggatgctctgtgcaaggatggcagatttctttcctttctggagaatgatgattggaaactcattgggcccaatgaccccatttaagagagcacccagccagtttatgaagtagaagccagaagcttccaggtggaggttgagaaaagaatggtccccagtgcagcagcttggcagaatcctgagtcagagaaaagaagcacctgtgtgttgagaggacaaatcgtggctcagcaccccagtttgaaaagcgcaagtgaaacaatcattggaatcttcca

SEQ ID NO: 587364 - DNA, 118 bp, Homo sapiens
aagagattcgtttatggaggctgattgggcaacaagaacaactaccttctggaagaagagtgcattctagcctgtcggggtgtgcaaggaccctccacggaatagccttagttgatag

SEQ ID NO: 587365 - DNA, 221 bp, Homo sapiens
  misc_feature (157)..(157): n is a, c, g, or t
ttcatatggcaaggcaaggcaggcgggggtcagggcatagaggaaggaggctgccgcccatctttccctcccgcccctacccaggcacacacagggactgctggcaccacgctggctgggctcccacctgtactcaccacgcaaaattgccaagtgnggcattcggttcagacctagtctgtggccttgcctatatgcaagggtcaccgagctcgcacatt

SEQ ID NO: 587366 - DNA, 322 bp, Homo sapiens
tatggtggtgggcacctgtaatcccaactactcaggaggctgaggcaggagaattgcttgaacgcaggaggtggaggttgcagtgagccaagatcatgccactgcactccagactgggtgacagagcgagactctgtcgcctggactggagtacattggcatgatcatggctcaccgcaagccttgaccatcccgggctcacagtgatccttaccaccgtcagacctccaacatagctgggaccacaggcatagcatcatgcatgcgtcagcgtaatacggaaaatactacatgagcacggtagagaacagcgtctatgact

SEQ ID NO: 587367 - DNA, 847 bp, Homo sapiens
catattccatctccggagtcttcttcctcaaactgtgattcatccactctgaaaaagtacgatctaacagcaagggagccttagacccatgctatcacattattactattagatgaaacagaaaatacagcaaggctcagcaagcctagtcatggaagtgaacgtcctatcgcacaatcgatagtgtggttggtcatggaccttgggcgatcaacggtccatgtgtctccagatacgtcatgtgggtcgacttatctcccatctcgagtaacccgtgagtgcctagagcatctgtatacagatgcgtgcagaagaaggatctgacatactactctttgtgtcgtagatttccagatatcgttctatgaggcacatatatggtcacccggaattgttatgctagatctggggtcacgggggtctggcaagtaacttgcgtaaggatggatcgtcgagatcatgacaccctgtattgtattctcaaaaagcacgagatctcaatgaagacaatctcgtatgctagaagaggttgatccaggatatagctgtatgcattgaaggtaatccgctcttgaatgattcagtccatgatgcgtaatgtgctatcaattctcccggtgaaatatgccattaaccagttgcggataccaaacaggcttatatctaaggttgtcgagcctgtgggactggctatacgtgctgatcacgggacgtacggggcgccccgcctgggggttgaaacacctcagaatgtattgtatccattgaaccacgctacgaccagtagacggaacctggcaagctatagaaccaaagggtggaccatgttggacggctcaagcacgaa

SEQ ID NO: 587368 - DNA, 354 bp, Homo sapiens
  misc_feature (29)..(29): n is a, c, g, or t
  misc_feature (96)..(96): n is a, c, g, or t
tggatcctatccttaaattgggagctaancagaccctgggattctgtactgaatcttatacatgaataagtaatttactcttcataaagtcgcttnccccagctgggcgcagtggctcatggctgtaatcccaacactttggaaggctgaggcaggtggatcacctgaggtgaaaccccgtctctactaaaaataaaaaaaaagtagccaggcatggtggtgggtgcctgtaatcccggctactcgggaggctgaggcaggagaattgctcgaaaccaagaggcagaggtcgcagtgagctgagatggtgctattgcactccagcctgggcgacaaatgcaataactgcatcta

SEQ ID NO: 587369 - DNA, 871 bp, Homo sapiens
  misc_feature (567)..(567): n is a, c, g, or t
tagaaaaaaagaatcctaaaattcatatggaatctcaaaggacaatgatgaaatgatcttctacaaaggcaccaaggctatataagagagaaaagacagtctcttcagcgaatgatgttgggaaaaccgtgtatctatatccaaaagaatgaaattcaacccctaccttatgccatatacaaaacttaaaatggattaaagacctaaatgtaagatctaaaactataaaactcctaaaagaaaacacaggaaaaaatcttcatggcatcggatttggcaatgatttcttggatttgacactgaaagcacaagcaacaatagcaaaaacagacaaatcggactaatgtaacttgaaaacttctgcacagcaaataaaacaatcaacagagtgaaaaggtaacttatgaaataggagaaaatatttgccaactatatatcttataaggggtaaatatccagaatgcataaaaaactactaaaactcaacaagaaaaagaaaagcaaccaatttaaaaaatgggcaaaagacttgaatagatatttctccaaagaagatgtagaaatagncaacaagcctatgagaagaatgctaacatcagtaatcattagggaaatgcaaatcaaatccacagtaagatatcacctcacaccagttaagatggcccttgtcaaacatatcagaaaataacaagtgttggtgacggccatggagaaactaaggacaactgtacactattgggtgagaatgtcaaccagtacagaaatttctcaacacaactcacaataggattttcacatgacccagcatcccaactctagtacatacaaaaacacaaaacaaaaacacacacaacaccaacttcggcccccc

SEQ ID NO: 587370 - DNA, 624 bp, Homo sapiens
  misc_feature (417)..(417): n is a, c, g, or t
  misc_feature (432)..(432): n is a, c, g, or t
  misc_feature (451)..(451): n is a, c, g, or t
  misc_feature (466)..(466): n is a, c, g, or t
  misc_feature (470)..(470): n is a, c, g, or t
  misc_feature (479)..(479): n is a, c, g, or t
  misc_feature (496)..(496): n is a, c, g, or t
  misc_feature (499)..(499): n is a, c, g, or t
  misc_feature (502)..(502): n is a, c, g, or t
  misc_feature (504)..(504): n is a, c, g, or t
  misc_feature (516)..(517): n is a, c, g, or t
  misc_feature (521)..(521): n is a, c, g, or t
  misc_feature (525)..(525): n is a, c, g, or t
  misc_feature (527)..(528): n is a, c, g, or t
  misc_feature (537)..(537): n is a, c, g, or t
  misc_feature (539)..(539): n is a, c, g, or t
  misc_feature (550)..(550): n is a, c, g, or t
  misc_feature (552)..(552): n is a, c, g, or t
  misc_feature (554)..(554): n is a, c, g, or t
  misc_feature (558)..(558): n is a, c, g, or t
  misc_feature (560)..(560): n is a, c, g, or t
  misc_feature (563)..(563): n is a, c, g, or t
tcttccactgaggtcattgttgtcctcactcgaccctgagcctatcaacaactagaattctgtgcgatgcatgagtcggtgtaggttcaggacaacaagtgaccatcagatgggcaagaccagaggtcgaagttccagctttgttccgttttgaaagccactaggctcactgtgtgcttggcactgtgctctagggatgttacagcctggggctcactagaccctccccacacctctgaggaggtacctgtagtctctccattttataggtagaagaactatgctcagagcttgagtaatttacacatattcgagctggcagcaccaggtgtttgtcccaaggctgcctgcctcttgaccctgtgctcctgactaccacactgtcctgccagtgtgcctagaagaatgaagccacantcatattggcttttnttttttttgggaaagggantctcactctgtcgcngggntgaattgcnggggtgcaatctcggcncanggnantctcggcccccnnggtncatngnntctcttacntnagcctcttgantngntggncnccngggcttgcccaacaagcccagttaatttctgggtatttaagaagagaggggttcccccatt

SEQ ID NO: 587371 - DNA, 108 bp, Homo sapiens
gtgacccgggacgaggagtcgacccggaagcgaggaggtgaccagggaggaaatggcggcagtggggctcaccgtgactgtcacccacagcaatagaagcacgacctt

SEQ ID NO: 587372 - DNA, 698 bp, Homo sapiens
tatctgggcgcgttaaggcccaggttcccagagctaacgggcctgccaggttcaacacttgatgaagcgagagaaggatctatctgtcttctctgaaacctcccaagtgcttcacacgacatctacaggagcctgacacccacctgagactaccaccgtcgattcttccttttcgtggaccaccaccacctgtttgatcacacaggaatacattatgagtttcctcaaaccccctagccctataaaggctcctattgcacacattgtgacggcagacacccacaacgggctaaggctcgcagtataggaccgaatctgcagagggcgctactgaagatccagccttagccaacaccacctcattggatgaatgatacagggctcaacacagagaccacactctcattagtcagacaggatcttgcacaaagctttgagcatcttgtaggttgggctagcggcactcaatgatgaacttgtgctgtggtcaaacagcatgaagttactgcatcacgagagctataggagcctgtggtggtctccctgtccaagcgggaccgctttgctgtgccgcccgcctatcgaggcttgtgcttgatatgccattgttgcagcttaggccgaattatttgccgactggtctttctccacactcgccgtgtggattgcgaccctatgaccaaataagccactggtct

SEQ ID NO: 587373 - DNA, 558 bp, Homo sapiens
  misc_feature (351)..(351): n is a, c, g, or t
  misc_feature (366)..(366): n is a, c, g, or t
  misc_feature (385)..(385): n is a, c, g, or t
  misc_feature (400)..(400): n is a, c, g, or t
  misc_feature (404)..(404): n is a, c, g, or t
  misc_feature (413)..(413): n is a, c, g, or t
  misc_feature (430)..(430): n is a, c, g, or t
  misc_feature (433)..(433): n is a, c, g, or t
  misc_feature (436)..(436): n is a, c, g, or t
  misc_feature (438)..(438): n is a, c, g, or t
  misc_feature (450)..(451): n is a, c, g, or t
  misc_feature (455)..(455): n is a, c, g, or t
  misc_feature (459)..(459): n is a, c, g, or t
  misc_feature (461)..(462): n is a, c, g, or t
  misc_feature (471)..(471): n is a, c, g, or t
  misc_feature (473)..(473): n is a, c, g, or t
  misc_feature (484)..(484): n is a, c, g, or t
  misc_feature (486)..(486): n is a, c, g, or t
  misc_feature (488)..(488): n is a, c, g, or t
  misc_feature (492)..(492): n is a, c, g, or t
  misc_feature (494)..(494): n is a, c, g, or t
  misc_feature (497)..(497): n is a, c, g, or t
ataatcgtggggtgaagagtcgtgcagcgtaggacaataatgactccgtgccagatccagaggtatagtcatagctgtttctgctgtaaagccactaggctcactgtgtgcttggcactgtgctctagggatgttacagcctggggctcactagaccctccccacacctctgaggaggtacctgtagtctctccattttataggtagaagaactatgctcagagcttgagtaatttacacatattcgagctggcagcaccaggtgtttgtcccaaggctgcctgcctcttgaccctgtgctcctgactaccacactgtcctgccagtgtgcctagaagaatgaagccacantcatattggcttttnttttttttgggaaagggantctcactctgtcgcngggntgaattgcnggggtgcaatctcggcncanggnantctcggcccccnnggtncatngnntctcttacntnagcctcttgantngntggncnccngggcttgcccaacaagcccagttaatttctgggtatttaagaagagaggggttcccccatt

SEQ ID NO: 587374 - DNA, 844 bp, Homo sapiens
  misc_feature (654)..(654): n is a, c, g, or t
gcaccaatctcatgtcatgcgtccaccgtcacttgttcaagttccgacatgcgatccgggtgcttcagagtaatgtgccttggactcaatttctgtcatgattgtcgaatctgtatctgcgctgccttgtataagtccttttgtggaattttagaacgcccatcgttacgaaaaactatgtgatggtatcaacaaaatgttggatcgcatgcagcaacatatgagcacactgagttaagattgtgagcgtgatcatgattgtattgtgaaggatggagcgactgtctgaatttatgaaggaactaaagatagtaagttgttactaagggacttacatcattatttgcagaatagactttacccaattcagtagtcagacagtaagtgactttatttgaatggcttgtgttctttgaagataaacgcatgattgcctaaacagattctggtctaaatagcattacctaacagtggctaacgatgacgcatgcggaagatgaatatagtaggctataggggtagatgctacacacttgtacgtttatacaaatgatagaatcactagatgtctccagacctgaggactttttaatagggcaggtgcttgtgtcggtggcacgttggatatttctaacatgtacaaagctatgtatnttgatttactttcatttcttgctatgtatatgtactttttcttaaaatgccaagaactttctcttgctatcattgcctccttttgaaaccaattcaattttcatgtcctacagctgactggtttgttacgcattgagtccatcgacattcacgatttcaagtctgaaggtagtcaaccctcagaaaacag

SEQ ID NO: 587375 - DNA, 509 bp, Homo sapiens
tcgaggttctcgattgcattgtcttcctatataaagttgattagcacagagggaagaaagaagatagctatctgcaaaccaaggaaaggctcagaagaaactaatcctgctgacaccttcgccttggattttcgagcctcgtggaaatgtgaagaaataaatttctgctgtttaagccacccagtgtgtgatactttcttatgaaagccttagcaggccaggcacagtggcaggcgcctgtaatctcagctacttgggaggctgaggcaggatagtcgcttgaacctgggaagcaggggttgcagagaggcaagatgacgccgttgcagtccaatcagggcagcaagagtgaaactctgtcccccccaaaaaaaaaagaaagaaaatggggtggggtgcagtgactcacacctataatcccaccacttgggaaggccggggtggatgcatcacctgagttcagaagtttgagaccagcctgggcaacaaggtaagaccccatctctaca

SEQ ID NO: 587376 - DNA, 189 bp, Homo sapiens
ctcgataggcgaccatgaagaagtttagcagctggcaaagcgagctgcacagaaattggaacagtttgtctccatttcgttatggccagcattccactccctgacaaagccagttgacctggctgtgagtcgtctggcatctcccacacaagacccaggtagctgctaccttcttcggcccttatcgag

SEQ ID NO: 587377 - DNA, 559 bp, Homo sapiens
accgctgagtgtgcgttcttgagcagatcgcccagaagctcggcttgccgcaactggaagaacagcgctgggcccggcatccgttggtgtacctgatggaggcggccgacgatatctgctacgcgttgatcgacctcgaagacggactggaaatggagctgctggaatacgccgaggtcgagtccctgctgctggacctggtgggcgatgatttaccgcaaacctaccggcagctcggcccgcaggattcccggcgacgcaaactggcgatactgcggggcaaggccatcgaacacctgaccaacgctgctgcccgggcgtacgtcgaacaacaggaagcgttgctggccggcaccctgccgggggacctggtggaacatatgcacggccccgccaagcgttgcgtaactggatgccaaggacattggcgcgcaagaagatcttccaggacaagcgcaagacccttgcttgaaatcggcggctacaccaccctggaaatcctcttgaacgccttctgcggcgcggacctgaaacagcatggcggtcgcacccccgtcgt

SEQ ID NO: 587378 - DNA, 389 bp, Homo sapiens
taggataccccccagccttactgccggtggtgcaggcagaattcatgaattcatcgttcaacaaggcgagttacagcagaggctccgggagatgggcacaatgtccgaatcccacagacagacggcaggggactggcagagaaagcccatctctgcacggaggcccgggtaggagggggtggtggggccggttcgccaagatgaaggctttccccttctactgtccccagggtggagatcctgggtagggtggcccaatccctaggccagagctgtttggtccatagtcaagctcccagagcttggcatctgtggctctggccagcagggcctggggcccagcttttaaggcatcagaaggggagggggctgcggcagggaccccgggc

SEQ ID NO: 587379 - DNA, 365 bp, Homo sapiens
ttgcgcaagaaagttgtgcccgtgcgccaggatctgtcccactcccgggcggtgttgtcccaataccaggcccagcagggggccttgtgaggttgccccacttccccacgggggggagttttccccccccttgttaaaaataacgccctgttcccttcttgccttgtggcccaggggcgggccaattggggcccccaggggggttttaatgcaaataaatccttttttttttttaaaaaaaaggggcccccccccctcccttggggggggggggggggttttttgtgggggtcccgggcaggtaagggcccctttcctccccccgccccggttaaccggttcttgaataatttttgggaccccca

SEQ ID NO: 587380 - DNA, 695 bp, Homo sapiens
  misc_feature (423)..(423): n is a, c, g, or t
  misc_feature (539)..(539): n is a, c, g, or t
  misc_feature (679)..(679): n is a, c, g, or t
agctttaagatttaatgactacctgctgggtttcagacttgcatgggtccagtagcccctttcttttggccaatttctcacttttggaatgggagtgtttacccaattcctgtacccccaatgtatgttggaagtaactaactgtttttttattttgtaagctcacaggtgggagagacttgccttgtctcaggttgagactctggactttggacttttgaattaatgctggaatgagttaagactttgagggactgttgggaagatataactgtattttgcagtatgagaaggacatgagatttgggagacaccagaggtggaataatatgatttggatctgcacccccaccaaaatctcatgttcaattgtaatcctaaattttggaggttgagcctggtggaagaggattggataatggngggtggtttctcatggtttaacaccatccccctgggtgctgttctcgtgacagtgagtgagttattgtgagatctgattgtttgcttgcctccccttcaccttttgtcatgattgnaagtgttctgaggcctccccagccatgcttcctgtacagcctgcagaactgtgagccaattaaacctcttttgtgtatatattacccagtctcgggcttttctttatagcagggcaagaatagactaatacaggtttcanctcagcatgaggattt

SEQ ID NO: 587381 - DNA, 293 bp, Homo sapiens
ctccctgtcactagtggcaggttctgttgatgtgtgacaacttcttagagggccgagaatcttggcacagtggaaatataagttgtagtaacctctttgcaaacagttcacggacatgttgctaagaagcagggagacaaagccccctggcggttgtggttattcttctgagatttctggcagtgtgggatgggtgaatgaagtggaatgtgaactttgggcaaattcaatgggacagccttccatgttcatctgtctacctcttaactgaataaaaagcctacagtttttag

SEQ ID NO: 587382 - DNA, 176 bp, Homo sapiens
ctcggtcctgtatgagcctgctgagtatgttttttcttgttttatttaaaaacaagtgcagtattgagaagggaaaagagtagaacaaggggtttggcctgtaactgactgaacacatcaggtgatataactcactacctttggaccagccttgtgttgttttcttttaatcgagc

SEQ ID NO: 587383 - DNA, 420 bp, Homo sapiens
gcataaatctgcctcccagttgtctcagaatctgtaagagttgccagacaaagcagaagctccatagagctccattatactgtccgaatagagctgccgaggcttaaatagctagtctagcaccaggaagtttcatccttatagttagagtttgggtctggacaggcaagggttcaagaaggctccgataaaccgtgctcaatgtggcctacacgtgtttctggcaggttgaatcccaggccctccaggctcagaccttaggtgatagcttggcccccgatagatagcagggacatcttggtggaaatgctcacagacgagactaagatgtcagcgtgtgtgtatcctcacagctctttatacagacgcatcacaagtttggtaatggcgggtgtgactttgttgtagacatcgactgat

SEQ ID NO: 587384 - DNA, 719 bp, Homo sapiens
ctcagagctccagcgactgtacccgaatggggtcccctttaaggtgataatgctgctccatgaattaaacacacctttggcggatgtgaagggagtggggatacacatgctccccagacacctctccattctgaggggaagccgctgcggctccctgggggaccccatgtctgatgccctccaggaggataatgtctgaagctcgggctgggaatgggagcggagaggcccgagaagcgagacggcagcaggcaagggccctcatgctggcaccctggagacggtctcggctgcggggcccctgctcttctagatcctccccagcttttcgaggacactcttgtacaacccatggggtccctgcagaagtggctcccgggcgtgtcccccctaagtctccatgaaagcgtatctgggtagaggtgggaggcagtgcatgtgtagctcggcgaaatgctagagatggcacaaggggaccagactgttgggacctcaaagagacgactgaggtaagagcctggccccaatgggctaaggtgccaccaccagagcccactggaggcgtgtcgaggtactacaaggtgggtgcgggttaggtgccgcgctgagggcgtgctccgggaggcgagcatgtgtcacccagtggcctcaggacaatcagcattgagttcatgaacgcggggggttgtttaaagggcattcgtgccactagccggggg

SEQ ID NO: 587385 - DNA, 1316 bp, Homo sapiens
taaaaattttaaaacccctgttccccggttttttttctgggaaaaggggtaaagggagaaaagggagaaaatatattctcccttgtaatatttggaggggcgacctcataacgggagaaccaacccttttcggcgcctctctatagggtcccctctgtgtctctccacatagggagaattgctagaaatctctccgtgggtggggagatctctcaaagagagtttaatttttctctcccctacgagcaagagaactcaaaaatttctcaagcgtgggaatataaaaaaatataaaaacacaaactctcaatatagaccccagagtgggggtgtttaaacacaaaaaaaaagaggcgccacactctctctttataaacatgtgcaaatttttacacatatataaaaatatgtgtttaatcataaatctcatataaatagtgtgtgtttcccctctctttgatatttcaaatattttctctcccctccccataagagggagacccctaaaaaccgcgtaagaaaacagttgttaacatttaatataacaaaaatatttaacactcccagccccaccgttgtgtaaagaggtggaattgcgtgattaacatagtggggacaatacacctcgaggggtgtgtcccccccagggggcatgttgcgacagcacggaaaaaataagcgctaccccagggggcaaaagagggggttaacaatggcgagatgtgccccccacagcaccaaaaacacacacacaaagaccggggcgacacgggggcaccaccagaaacatacttgtggcaccaccaccgggtttcaccgtgtccgacaagtcttccccgacccaaccagttgccacgggtgacaatttcgttgagacacaccaaagtttcacataccgaagtaattcccgagttggtcgcacgagccccctattgtgctctgctcacacaccaggcataatatagttcccccatagaaaacctcggcacccacaccagcaacctatcggggggtggggaccccacgcagaagcgcgaacccaccctggtctcggaagggcgacaacactactcatgtacaaacaagaggctggcacctccctggcacagctctctaacaccacggggacggcgttctgaacacagaggtgctaccccccgtggtccgtgtttgcacaacttttggtgcaaaaatatttgtgtcttctagctcgaggtggttactgatcacggcgatacgcagttcaccacgagcgttttatgatgaacagcgccagacgcagcatgcatacaggcacacgttatacgtcaacgaac

SEQ ID NO: 587386 - DNA, 191 bp, Homo sapiens
gaaggacaccagttaggctatttctattcctccctgttctttgtactaccgtgtgcgctgtagtcccagctactcgggaggctgagacaggagaactgcttgaacatagaaggcggaggttgcagtgacgccgtgatcacaccacgtgccctccagcctggtgcgacagagtgtagactctgtctcagcag

SEQ ID NO: 587387 - DNA, 134 bp, Homo sapiens
tgggcgatctacacttagagagcttgagcgctatgtccatttcctgcctacggtaagaaaccccgtgaagccctacaccattaaggaagcctgtgggaaagacaaaggaggaactggcagatgtgttgcttggt

SEQ ID NO: 587388 - DNA, 328 bp, Homo sapiens
agctgggattacaggcattgtccaccacacctggctaatttttgtatttttagtagtagacgtggatttcgtccattgttggcctaggctgttctcgaactcctgacctcaagcgatatacccaccttgacctcccaaagtgctaggattacaggcatgatccactgcacctggccctcatgatgtctttgctaaaatagattcgtgtccttgagcttctaagcctctatgaacagttagacctcactgtgggtgcagatagtgagatgatgcccactgctgatagaccgactttccagagggagtaccttggcaaaagatccacagt

SEQ ID NO: 587389 - DNA, 646 bp, Homo sapiens
cagaagatgcagctgggctatcggctccagcagattgcagctgctgtggaaaacaaggtcacagatctataggaacccaggagccacggcctgctgttgcttcagcctggcctgggcagccctggaagctcggaggagaggccaccttcttaggtgcctgtagtgactgacaagcagagttagtggaaggtgactcccagtctcctggtggctctggcctcggccctgctggatccacctcctaaacccggggcctcaaggctcatggggtagtacccagcctgctccccgagtccagcgaccctgtgacaccggtctgcaaggagttggggactaagggcttccagagagtggctggaagagactccaagcccctggggagactgtactgttcctgaaaactggccttggccacactggggattcggaaagaaagagggaaagtcccctgcttcctggttggcattctccaacatcactggacctaaattggagcttgcctttggcccttggatgctggtgcccacatactcaaggtctaaaagaagaaacgccttttcttaggcccattacaaaatggacccctttagaaggggatggtagacacaaggaacgcccctgcctaaaaggaaggcctggggggggg

SEQ ID NO: 587390 - DNA, 174 bp, Homo sapiens
cgagcttggacccccttctacgtatgatcactgctactagtgcgtcagacctagaccacttggttccaagggttgtgacaaattttgttaggaccaggattcaaacccaggtcgcctgattccaaccccatgcttttccacagtcctacttgaggcagaaaagaaagcagcacg

SEQ ID NO: 587391 - DNA, 1236 bp, Homo sapiens
  misc_feature (468)..(468): n is a, c, g, or t
gctcaaaaaaaaaaaaagatgctacccagttttttccattaagccctcggctgattgagggaaaccccagtgactgtctgaccctgctacgggttaacttcacccttatggacctctcggcgccaccttcgtgggctattggttaacccagcatcgtgggggctttccttccaatgccccgtgatcattccggtcacttgtcccccgcgctgtatctcccaggagcgcagctttcacccttggtggggtagcggcctggtgaggcacccgcgagtgcgagacgtactggccgtccaagcgacactcttggttgctaattgtcacagggggacaaccaaaacatgtgtccattgtatatctaataactagtgaggactatatttttctaccctacaaacaggccacctggctctggtttctccatctcctttcccttacaagtcgcaagtgggtctccatagattctgngagaatagacactataatacgcagcgtggcgtgcgtgaaagtgtgtcatacacccgggaaaacgtttcttcccaatcttaaattattgagcaggcagactattaagcctgagtgtgtacttaactatgcgcaagatatacaacaaaaaataaataaaatatatatactatccacgagagaggcgcaattccttagtgtgcgcgagtattgtcgcgcgtcgcagagagagtaagagcgcgtgacaaagtcgtagcagattttcgtgccgcacaactagtcgcgtggtcccacatacaaccacgtcgttgccgtatctctccgcctgtgaatcgacgccaccactctcgttgtgtctcttgttgtcgtcacctcacctagggccgtgggtcgccaggcttccttcgcgcgcgcggtggtatccttcacctcttgtttaggggagggggggcctcgccctatgatcctaacatcttggcccgtcgtattggacacgccaagttggtggtgttaatcatccacacgtcttcaggattttttgaacgacaccttatctgcagctgcgcacacacgcacacactgtggcgcggccttgtccggtgcactttcggggcacacattctaaccggtcccctctggcggcacaccaccccctttggagctagcgggggggggagagccattcgccaatttgtcgggcggcaacgtacggggcccctccgcggggcgagagtgctctctccccctgtgcgagacccccaccccccagcg

SEQ ID NO: 587392 - DNA, 819 bp, Homo sapiens
  misc_feature (341)..(341): n is a, c, g, or t
  misc_feature (749)..(749): n is a, c, g, or t
tggacggatgagtctttaaataaaaaaacacacgtgcaccagttatcaacacacatctctcgcaatcctgacaagcgctgaacttcagtccttcacctggggggggtggccgtgttacactctcccacgaccagcggcatgtggttcctcttttctcattatgtgggcctcaaggggctcaacgtgctctccgtggccggctttcatgtgtttcctcctgtgtgtggcatcttttttctcacttctcggagtggacaaacagcggccctcgagcgtgaaggcgtggtggagtctcaagtgtgcgagttgttggccttatagatgtggaaaatctcacacanagagtgtgtctcctctcacatatatagcgcacgaggaagaggtgtgtgtggtgccatctctcgaggggcccaacaaatctcgcgaggtactcgtggtctcgtggcgcgtggtgccccacattcagcccaagagtattcacatctcacaccacatgtggcagaagagaggacatgtggcgagaaacatcgtggagtgagtgagggtgtgtcagagagacatctccctctcagacatcaacaggagaactgtgagaagtgtgtggcggctccatacttactcgtgtggccaccagaggttacaaagtgagagctctacaagcgggaccgagaagagcgcggcggggggggagaaacaccttgcgacagcgcgggcattaagacacctaagaaaaccacatcgcgggaacncaaaagcgaagtgtttcgagaaaacaccttgtgggggacacacccggggggttggcccccggaaggccaa

SEQ ID NO: 587393 - DNA, 1468 bp, Homo sapiens
  misc_feature (307)..(307): n is a, c, g, or t
ctaagaagctaggcacacaagttaatcaaacgcgttcaagctcgacacccactaccctaaaaaaatccgcagaacactagtagagctcgagactccgtgccacgacccaagtatgtgcacccagaatcgtgatcgacccctagtaggatagcagacgtcacagtgctgtgaggtcactaagctataccacctgcacaacaccaattctccgtcgcgccactagagcgctagcgatcaagtactttagaatacgagctgacatcttgcaccacatcttaccaggccgcgagaatactcatagcatacntacaagcgcaagtcaatggatcatttgagtgtatacccatcagcatgagtacagacacctcagatcgacatgtgcacactgtgctacacctaagcggagacacggcttaccacagagggagagactaatacacgtgataccgtacgagccatacagtactgtagccccgagcgctgattactagctcgacagagagaaccagtctagcactactttagaccattaccagccccaagttgaattcatgaacgttgctaacacaggcccctggcccctcagggtagaacgagggaatgatgttacatcgagtgcccccgtcgtggtaacacacctttagaacccgaatagtccaagaagagttaaggaccactaaactggcaccgttaggtttgcgcttttcaaactatgaggacgcgcagcgcgtggctaacttgcaaaattggggccctgcccgacccgagatgcggcggtttcccatgggcgtttgggtacttccgtttgagctctatatgaggaccactacgggtcggaccaaactatggaaaccctggtcgcacggctagggaccaggcagagcccggtgcgaattggagctagcaccgaccgaacggaacctgcaagtacatgccaacacgccttgaattgtgacagtggccatgatcgacagagtgctcctagtttgaagatcgcctaagaaaaccagaggtgaaccccattaaatcgaaaaaaccaccgagcgaagtggttccccttaagggaagttggacccaacaaatcccgtgaccattttttaaacataaaactctttgtcgggggattgggagggggtctggcacccctttcggtgtcacggcgaagaaacgagcgcccataatgccccatttcccggatagggtcactgttgtaacacgtttgcccttagcagagaatgcctttccatgcccacagcgactgcaaaagagagccgggaaaaacggttaaccttattttcctgtcgaatttcggcatacccacaaatttaacttcggggagccccccccgggcgatatcccacgtgtttaccccccttccgcgcggtgtagtccagtcgcgccaaaatctcgcctaatatctctcaggagggtccacaatattcaacacgaagatgggggggatacaacg

SEQ ID NO: 587394 - DNA, 246 bp, Homo sapiens
ctaaacctatgtcactgtggccctgttttgatagcgccatactatgcaaatcacgtgaatctgagtgtatgcgagggtaatagcgaatcactatcatagcagctcggtaagaaactatcggagacctggacttgcgaatggtttctaagctatcttgtgaggccaagctctcaacctgtgaagcaagtcattccaggcagttagtatccaaattgagttaaattgcacaatacccggagtccacag

SEQ ID NO: 587395 - DNA, 370 bp, Homo sapiens
ttcgcgcaggcgacggcggtcaaggcgcctgacgtgctggtgaaggacgtgaccgaagaggtgctcaccacgctgcgtaccgatccggccatcaaggcaggcgacgcgaacaagaccgctgaactggtggaaacgccgcgtgtgccgcatttcaacttcacccgcatgaaccgctggcgcttggcaaggaatggcgcgccaccacgccggaacagaagaagcagctgaccgacgagttccgtaccctgctggtgcgcacctattcgaacgcgctgaccagatacaagagccagaccatcgagtacaagccgttcaagatggcgatgccgataccgacatgaccgtgcgcacccagatcaatcagcccaac

SEQ ID NO: 587396 - DNA, 130 bp, Homo sapiens
actagtcacggtttggctcccgctgagatcccagcacgtggggaggctgaggcaagaggattgcttgaactcaggactttgaggctgcagtgagctatgactgcaccactgcagccaaccgtggactagt

SEQ ID NO: 587397 - DNA, 154 bp, Homo sapiens
taacggtagatccagctggtgtgaccaggagtggcaatgttgctgacctcgccgttcctaaagccctctgcagttagtagtgtgacatcgtctacctcctttcaaaaggagcacgtaggactgtgctgctggccggctcctctttgatggctca

SEQ ID NO: 587398 - DNA, 1281 bp, Homo sapiens
tggaaagggagtcttgccctgttatggggggaactcacccccagttatttcaatgtaggtcctttctattttccgaaagtgtcggccggttgaaaaataatgggacacagtataacagagagcgaattgttacacgttgggcgccaccaggggtgacaatcactttttcagtaggacctgtggatgcccatcactgagcctcaaaccagcaagttttttattaaagggtgtttcaaaaggggaggggggttgtaaaaacaaggggatgtagtgtcacaagagatccactatggctctcaagagggcaaaagagccagcactctacataatagagggtctaacacaagatatccactatactttgggagggcaaccaggaacaagagggcaccaaagccagaaatctcacgtgatcaagggggtctatgctcacaggcgggtgccccgttatggatcctctgattaaagcactctttattctttacagcgaagagaacaccaggcgttgtgggacaagcgagcagaaaacgcggtcgtgacccagagaattttaaccagggattgggacagtttttctcccccacatcatagtataagaccatgaggggataacatgcgaggaacaaaccaagggggcgtatctcttacagtaccctttaaatctccaacggccggagtataaacacagagaccttttccccaacagaggcgcattgtctatataaagaacccttccacccccagagaaacgtgcaattcaccttttccccccaaggggtaatttaacatcatcacaactaatacccttatgcctacagagaaaaaaagacatatttaacggacgaataattctccccccaataactgtagacaacagctcagtggtttaacaaatcagagccgatcacttctggtcataagcaacggtcacaaacaacatgacggcggcatccctaattgtgtcgcccaaaacccccccaaagtgaccaggagcaaagaaccccatttaagtggagtatgtataatccaccctgttgtttccgctctaaaagacatcaaccgtgtttacacctctggtgtaccttattcacaagagggggcacagtgggtttcaccatatagtcgtgaccaaagacacagtgttttcagcacaccacacactgtgctacacagagtatacaaccacaaagtgattacgacgagtcgacccggtccaacagagaagttacaaattcctagaggagttattaggaaacataaccagggatatacaaacattgc

SEQ ID NO: 587399 - DNA, 230 bp, Homo sapiens
agtgatcaccctatttgacatgatgagaacattgaggcacagtgcacatgactattatactgttattttgtaaaaaaaaaaaaaaacaaaaaagttccatatacccatttgtgtgattgaagccacagccaaaatttggggatttcccaaccacaatccatagttgtttaccactcaaaataagtcatgccttgttgataagcccgtgaaaggttcagcagggggagata

SEQ ID NO: 587400 - DNA, 762 bp, Homo sapiens
agcatcttcggcaacgtgtctggccatcatccagcggcgtgtactcgtggcacagccccggtaccacacacagatgctgcgcgtgctgcagggagttcatccgcttccaccagatccccaatcccctggcgccagcgcctcgaggagtacattccagcacgccgggtcctacaccaacggcaatcgacatgaacgcggctgctgaagggcattcccgtgagtgcctgccaggcgtgacatctgcctggcgagctgaacggcattcactgctgcagcacgtgcaagacccttccgaggggccagcaagggctgccttcgggcccatggccatgaagttcaagaccacacatgcaccgtcaggggacacacgtgcgtgctttgcattgtggtgaccatgctcacccgacctgtacttcagtctccctggggctccatctgagatccatgctgtgggcgacgtcgatcggtgtgccatcccttgggggaaagaattgacatctttggggaagccttcttgaaacctgtcttgcaatggccttggcaaagatcggagcgggggatcgtgcgggccctcacctacttgggacctacacaagatccatcgcgtgaagaccttgctggagcgtgcttggacatgtaccctgagttctccgagcacgttcttggtccattgcatggaggatcatccttccgacctgctagataaccgagcgtgatcccggggctcccccgggctagtacggacgttgagagcggtgcctc

SEQ ID NO: 587401 - DNA, 1245 bp, Homo sapiens
  misc_feature (716)..(716): n is a, c, g, or t
ggggcgaacgcgtagagcacgcctttagattgacctcgggtcacgcctatgacgcagctagcagggtagtggcggtcagctgcctgcccggccccaaatgctacatgttgcccctctacacgccatgggaatccttctagctgcctcttcactcgctagtccgctctgacgagatcgatccctgcttcgtggtacgtttcgtagtcgtcacgtataagacgacatatgagatcgaagtcctatcagtgggacgagtggtctagctgttgggcgatgcgttgtatgaccaagattcccccccctgcggggatgaagaactatcagagcgagttctcggtcatgccgcgttgtggtacatccgctggatccagggatccctagcaaacattgtactgggcgtagatatgcggggaggagcattgtaccaacgctgcagagggtctgctaaccaccagctgctcaccagagcaccacttggcggtgccacggccaatcgtcgcccagacgccccaggtccaagtccacgaactcaatgcaacggggtgtggatggagcacctctgcgcgccacagtcaccacggtgactgaacgcgtgacgcgacatgataacacagcaggtctatggcacctggacctctgacacgttggtcacaagatgtgccctgtctagtccccaagcggaggatctctgcggctggatgatgggagaagaaagnccaactggtttccacccaggcaagaagaaaggcctcaaaaaagacctctactgtccttaccgcgggcgacgtggggcacccttcccgtaccggggggttggtggtccttctcccaattacttaacaacgtccaagggaactccaggccgctccggggattaaaagaagccaaggggtttggtggcaaagccaagaggggaaaacaggtcatttacttccattggcttccccgttggaattggccggtggagcgcggccttccttggcagacagaggcgcggtctctatagcaaccggccggggacacgaaggccgtccttcacccttggtttcttcccgcgcgggctacacccttgacatgtttgtctgtactcggggcccggggcgggaggcccccccctgtcttcgcccccggggggcctccttcagacgggggtgccgggcgcccggaagggaatttggcttgggcaaaccggttaccgccgcccttggctacaagtacatacgagcgggggggggcgcccgcacc

SEQ ID NO: 587402 - DNA, 1079 bp, Homo sapiens
gagaaaactgtcgacattactctgaagggacgcactagattatcgtgaagggccccagtaggaaccctgtggtaaggagtgtcaagtcacatcaatgtacgaactcagccttctctgtggatagcgaagagaagaatacgaggctccgggtctgacaaactggtgcgcggtaacaagaatagggaacgttgtgacttgaccagtgccgtgcacgtattaagtcaggatactatcgtacgagagacatagatcagagggttgttacacttggagctgccgtatacaaggatgaaggtctgtgtactagctacacattgctccccatgcaagcgcttgattactccagagacgaagtaggagtctctgtagctttgaaattcccgaaaatcttactgtgcggttgacatagaataccctatccggcacggtggcttgcggattgaggaccaagcgtgtgagcgtttgttccagtaatcatcaaagcgcgcgagcacacagcatgcaattacaatcctttgcaagcgcaagattgcacgatatgcagcatatgtgtttcgaagattcgcagcgggcgttctgattccaagtcataggcgcaaaaaccgaggttaaaaaacaaggaatatcacggacaatctttgggactggtcatctatgtctctgacaaacaggaactggttcaggcaggcttgatgcaatcaacgatctaacgagttaccttggctaccagaaagaagatgccagatgacacttaagaccgtactttgtgaattatttagaatgcatgcgagtaacaaggacgctattgagttagggacgcattctttcgtttagaaaagaacaaaaaaaaaaaaaagttcaaaggcaatttaattgtgagggttggcggcaacacacggacggtaactggcaaatggcgcgcaacgaggtgcacatacactggtatcataggaaccccagagtttcactggacccacacaggggggtaaacacctcggccggagataccacgataaggagagagcagaatcacttcccagaaacgcgcaggtacacctgggattaaagaagggggcaac

SEQ ID NO: 587403 - DNA, 375 bp, Homo sapiens
tttttttgaagacggaatgtcactctgtcaccccaggctggagtgcagtggtgtgatctctgctcactacaacctctgcctctcgggagttcaagtgattctcctacctcaggcccctgagtagctgggattacaggcgtatgccaccatgaccagctaatttttgtattttcagtggagacagggtttcaccatgtttgccaggctggtctcaaactcctgacctcaagtgatccgccctcctcgtcctcccaaagtactgggattacaggcgtgagccaccatgccccgcctatccctggagctcttatttcaagaatacactagattctatagccagaaatggttaagttctaatatgcaaactggatctat

SEQ ID NO: 587404 - DNA, 205 bp, Homo sapiens
aaacggcactacactcccatctatcctccctctacccctcagacgagggctgctcttccaagcatcaaccctccagccccttctacgcacgtctccatttcttcacgctggttcccatgtttatgccctgttctactgttttcctttttccgtgttaaggctgctctgctcggctggctactagcggccggctactgcacggcta

SEQ ID NO: 587405 - DNA, 803 bp, Homo sapiens
  misc_feature (6)..(6): n is a, c, g, or t
cttatnatgcaccacaagaacatctcagacacctgaccagctggcaataaagaatgctggcaagcaggaccccaaacgtcatttggaggaacatgtggatgtacttatgacctcaaatattgagcagtgcttagcagctatgaaggatactgacccatttaaataaagcagagaaaaacgctattaatgatgccttcactgaatattcctctgttgatcctatgctcataatcaagggacctctgaaggagaacttggataaaagtaaaacatttgaaataattagacaaattgatacaactaaaaaatcagacgtaaatctactaatattaatctaaaacatgaactctgaaaatagtaaagcaacacctgactatctcctttctcacacaacgctgctcacacaccccccccacgctaaatcacacctgaccttctcacaagcccccctccttggaaccctcttctcctccctctttcacgccatccctgacaatacagacaccacgcaccatgacgaagtatttaatgttattacggcaaactctattagccagtttatgaaacttccatcaccctacacccaccacttggtgtcactcatctaccgcaatcgtctcacgcactaccccgtcacccctaccgaccttgtgcagtactcttacgatcttagatctagatgataacaaaaaatacctcctattcctccacactattaaccccacaattttccacaggccccactccacctcctccatcccacacactaatcactacacccctactactggctatcctagtcg

SEQ ID NO: 587406 - DNA, 920 bp, Homo sapiens
  misc_feature (24)..(24): n is a, c, g, or t
cgaatatgcgcgtgtctactgaangtgaccatgataagacatcgtgtatgcgctttgtgaaatccctgtggcctaatcttcctggaaaaggtgtttttgccacaagggggtttttttaacgcacaggcctggggcgcaagacaaatggtgcctccattaggcaaaagtgcgtcctggattccaaaggagtgtggaaaccccctgtcctctattgttggtcccccgggtccgtccaatgggactccaaggggctttaatattcacaggaaagcgaaggggaaaaaacaccccccccctcggggttcggtaaaagggaaaagccatttccgggggccaaaaacacagattggcagggctagggccgacccaagggcaccaccatgggactcgggcgccacctgcggcccctggatttacaaacgcccagtcgacagacgaccccgccgccagagatggccctcgcgcgttgccctcaccccagggtcctaataacatcggcatagggacgccacctagacttgtggagccccgccagtccgatagcatgcctatgtagcaatacaaggatgtaaccagacagtttgtgttgccccggggatataaaaacaggagtcacccgcggtacaggcccacctcacaagtgccaccccgctcagcgagagaagggtagaagatttttctctgtatgatcctaatctgttttcttatgtttaaatgccgcccacgagaagttttcccattgaagatcatgaccttgtactttctgcgtcgattgtcttccagcaggctcccaaaatatcctacatagggaggaatagatcgccccaaatcactgccgcctgtggaaacaatgagagaacattagtacccaaccttcatccaaaaaaaaatattaccaattaaaaacccccaacatgaca

SEQ ID NO: 587407 - DNA, 999 bp, Homo sapiens
  misc_feature (714)..(714): n is a, c, g, or t
gggttgtccgcgtagcggggtgggtacgtcgtgttgttgtcggtcggtggaggcttgtgtgggtgagtaagtgctggtcgtcggttgggtggatggtttggtgcgtctgggtgggtgggtggtgtaggagggtggcggtgtgtgatgtggtgtgtgtcgggggcggtctacgctgggggtgtgtagtaggtcggtggttgtgttggaagaaggcgtgtgggtcggtgtcaaagcatgtcgcgttacgccgtcttcgggggacgccctctcgcgcctttcgggtgttcgcacccccccgcgatgggttttaccccccctcatatggccccttctgttccccgccacgccgaatatgccggtgggctccccggaagtcccttgggcgggggaacccggccccgcaaatctttctgggttggcgagagccctttttcgaatgttttccgttggtctgtgtttccccgagaataatttctccccggattctcgccccatttctggcgccgggtacgacgacggggtccacgcccgctggggaatgttgttccccccgacagcgcccggctatggaaataggctctgtctttataagagaaggagtaatatagggagacaggaccaatatcgtttttcaaagagcggcacactgcgtcaagtatctcgtgtggaattgccccaagaatatcgcgcggagtgtttacaaggtccgggaangaaggaggactcaccgtgtggtgatataaaatagaatgatttgacacaccacaccagttgtggccaaaaaaatcgttaaatattgagagagaaaggcatctctgtctctccttggtacaaagagagtgtccaggctggtaaagtgataaacacgaccaaggatgcactcggggaatttttgaaacagaacaaataaatgtcaacacccctttttttttttaaaaaaaaaaaagttccaaaaggggacacaaaaaacccggtgctggaaaaattgaaaaaaaaaaa

SEQ ID NO: 587408 - DNA, 142 bp, Homo sapiens
acgtgcaggacagtgtgagagggatgtcccacttcacaatataacagcaatgaccagagatccaatagaggtcttctcatgttctctacccatcttcatagtgagtccagttggtcctagagtgcaggcatctggaatctgg

SEQ ID NO: 587409 - DNA, 299 bp, Homo sapiens
  misc_feature (66)..(66): n is a, c, g, or t
  misc_feature (82)..(82): n is a, c, g, or t
  misc_feature (113)..(113): n is a, c, g, or t
  misc_feature (136)..(137): n is a, c, g, or t
  misc_feature (145)..(145): n is a, c, g, or t
  misc_feature (147)..(147): n is a, c, g, or t
  misc_feature (189)..(189): n is a, c, g, or t
  misc_feature (199)..(199): n is a, c, g, or t
  misc_feature (217)..(217): n is a, c, g, or t
  misc_feature (222)..(223): n is a, c, g, or t
  misc_feature (237)..(237): n is a, c, g, or t
  misc_feature (283)..(283): n is a, c, g, or t
  misc_feature (293)..(293): n is a, c, g, or t
  misc_feature (298)..(298): n is a, c, g, or t
ggaagaggctgtttcggggtgggaaagggttgcttttcctttggggttaaggctgtgcagcacgtnttacagcagtcctggnacagggctgtttttatattcttgtgaatganactgctcttgctaaatgattttnntttttttngngggggggtgcactttcattttcaattgactttattaaatggnaatccaaatnttccactcctccccctcnggtgnncctccccaccacanaccttccttcttgtccttgtgttgaagagggtatcttggggaatgngtttattatnttctnc

SEQ ID NO: 587410 - DNA, 201 bp, Homo sapiens
atcatgtcgcgcacagccagcatgagcctgattcaggcgcctagttacggttcagacccccagccactccttactcggggcctctccccagtccatggtatagttgggcaacagtgaccggaagaagagagcaatggtgttttcatggctgataggacttagctctctcgcctgacgtaggagtagattgtgtccgaaggg

SEQ ID NO: 587411 - DNA, 368 bp, Homo sapiens
tggcagtttctttctttcagcactttgaatatttcaatccatcaccatgtggcctctgttttttctgataaaaatattctattattcttattgggaattccttggacaaaatgagttgcttctcttttgtttcttttgagattcttcctttgcctttgtcttatggcagtgtgcttatcatgtttctatgaatgtatctctttgtgtttaccatacttggagctcaaagcacttcttgggtctgaaaatggatgtgttttgaaattaaattagcttgtgtgaatcctgaaaaaaaaaaatcccatgaagctatgaaaccaactatctgtatggttcctagagacttcacacttttattctactttaaa

SEQ ID NO: 587412 - DNA, 296 bp, Homo sapiens
  misc_feature (50)..(50): n is a, c, g, or t
  misc_feature (93)..(93): n is a, c, g, or t
caatctcaagtacaatatatacaccaacaaacaatgttcaaccagtaacnactactaatcaacgcccataatcatacaaagcccccgcaccantaggatcctcccgaatcaaccctgacccctctccttcataaattattcagcttcctacactcgcgagggggttctcacacacgacaccatgataatcgttgacccagcagcaccaatccaaccttgctcgttaactccagagaaacacttactcaagacctcgacgcaagacccccagtgcttcagtatactactcgacagaa

SEQ ID NO: 587413 - DNA, 145 bp, Homo sapiens
ctcagactgaactcactaagcagggggtgaagaccaccaggcatggtagcagtgctggccattggaggaaatgtcttggccaggcttctgagaaccttaacacgccactgggtcctttgtcacagtgacaagaaggagtgtggct

SEQ ID NO: 587414 - DNA, 295 bp, Homo sapiens
  misc_feature (50)..(50): n is a, c, g, or t
  misc_feature (93)..(93): n is a, c, g, or t
caatctcaagtacaatatatacaccaacaaacaatgttcaaccagtaacnactactaatcaacgcccataatcatacaaagcccccgcaccantaggatcctcccgaatcaaccctgacccctctccttcataaattattcagcttcctacactattaagtttaccacaccaccaccccatcatactctgtcaccacagcaccatctactcatcgctacccactaaacactcacagactcaccctgaccccatgctcaggtactctcatagcatcgctgtgtatatcagcaccat

SEQ ID NO: 587415 - DNA, 413 bp, Homo sapiens
gacagagaaatactgggtagaagagggcagttccctggcaaaggtcccaatttcaagcctggaaacctctggccctaactgagaacatgcattcctgttttcacacacaaaagttgccttttggctctccacacgcccctctcctgtactcatataaatctgagacctcaggttccagaagcagatgaaaaggagatgaacagaagagcagaagaatggcataatggtgtggcagagagatgagaaggagagtctgaacaccaagaggagttcagctgggggcgattggagaggagatcagccactggatggctgaactccaggaagaccatcttcccattccgtctcctttccagctccccatgcatcccatccccaccactcaataaaacccccacattcaccatcaaaaa

SEQ ID NO: 587416 - DNA, 205 bp, Homo sapiens
acagagcaaaagaaacggcagcagaaaagaaggaatacaggctacaagtcagtaggaggcaccatatacagcctagcgggactagggtaggggagcaaacaggccagcggtggaggtctaggacagtaacaagtagtagatagcagctagtaggacaaggaagaaatacctataccgcctactaggggcctacagagactagcct

SEQ ID NO: 587417 - DNA, 604 bp, Homo sapiens
  misc_feature (186)..(186): n is a, c, g, or t
  misc_feature (191)..(191): n is a, c, g, or t
  misc_feature (316)..(316): n is a, c, g, or t
  misc_feature (320)..(320): n is a, c, g, or t
  misc_feature (327)..(327): n is a, c, g, or t
  misc_feature (533)..(533): n is a, c, g, or t
gcacccggcaaacacttacgaacagcaaactaacaccaagctgcatagtcctggatgtgcaattggtttaagtgtcatgtactagatgaacacagcttgtgcaggaacagaacactagaacgatgtgagtagaggctgctggtcaccttttgtgacctgaggaatcccaggcctgtgtgaaattcnaaacngcaattgcagcacatgatgccagaaatagcactgaatcaagaaaatagccattgcggagctgccctcttgagtctttctgtccatcccattctattctgtactgtgacttcagttcaggaagttnggtnaggtgtntaaaataaaaggaaagagcaagtttgctcagtcaagtgatcagatcccgaatctagattcccagttctaaggccttatcacctcccctgcccataggccaacaaccatagttcctcacattagtgattagcagactctttgtggacgagtgaatttcacaaacagcacaatttcagaagaaatcgagggcacaggccctcactttncttcttttgacgcatcatcctgtgatgttgaaatgtcacttgcaggatgctgatgttgtgcacgtcaatca

SEQ ID NO: 587418 - DNA, 394 bp, Homo sapiens
aaacgatgcccagactccagatggtcaagaaaatggtgaatgtccaggctggcgtcatggcatccttagatatggggtgtttggtgggtaatgaccccgagcaggttaggagacagctagttatgccaagcccatattttctggttatataaaggacacttctattctgactggtaattcctagagctgtttcggtcactggtcttcttcctgtttatgtggtagcgtcagaaccgtgtacggagcagggtgagcgttcacattctcgcatagcttatgggctgcctttagtgctgccgggagtggggagacttgatgcattccctgtgactggtttctttctcggctagcgctagaaggacactgatgttcgcatgtgtggctaatctggaga

SEQ ID NO: 587419 - DNA, 400 bp, Homo sapiens
caaaactattatcataactcaacaaataatatacgaaatatatttcaattccataagccaattacgaagaggcagtagagagaaagggaaacaaagtggggatgaggaaggtagaggacaagagaaagcggccaaacaatggtttggttgggctgtgttacagagtataccacccatttaaaattctgatcacatactcttgacccataaacccttagcccttgttctgatggggtagccacaggagtccaccagctgggaatcatccactgagctctgaatcagagcattctagaggctggaatgtcgggggagttttaggggtagttttccggtcatacctgaaaccatccgtcctaactcccaggcaggtttaaatagtgaaaactcttaggcagag

SEQ ID NO: 587420 - DNA, 963 bp, Homo sapiens
  misc_feature (23)..(23): n is a, c, g, or t
  misc_feature (312)..(312): n is a, c, g, or t
ttgggaagccctggtttacagcncctacgtcggacatgtagatgttgtgacgtccttcttccatgtgcccacggaatgtggcacttgtcgcaagcgcctgtgaacgcaatggcacttagacactggggcgcacagaatatgtgtggggccaaaaacaacaactggggccggggtagccccccgccgcatgccgtgtgaccgtgcgggcccaatacatgtagcccccctgttccccacataatctgagcgtttgtgccggcaaaacaagggtgctgctctcgctctgttccaccagttgtttacacccccttnttaaccagaggaggtctgtataaagcctcgcctgttcggccccacaacgtaacattaatgttccccgtcgtgtcccaacaccccccttcttaaattcggatataattgtgcgtcactgcagcacccggcccaaaatattcgtgtggcaacgcccccgtctcgctcccggaatacattggccaacaaaagtctgtcccctccgcttggtcttatctcacacaaagccgcacttagagaatatacctgtgggaaaccctcccagactccctgcacaaacattctttggagcccccctcccgcccttatttcttctttcaaaacataccacccaatcgttgttacgggtgacaacacccacactcccatcatgttacccctgatattttgagatacccacactgttccgtatacataaaatatcttgctattcccaccaccctcaaaggcagctcgggctcccctccataaacaagatctagatcccccccgccatcgttaaccttatgtagtgaaaaaagttttagaatgttggcaaagaccttctatgttaccctggcggcatactcccccttactgtatattaccaagtttagtcgcccattttacgggagtcccacaaaaaacaaaataaaaaaccacaagacaataaca

SEQ ID NO: 587421 - DNA, 183 bp, Homo sapiens
tattggccccagcgtccaagtgaacttctcatggagtgcagaatctcaactggaccaaatactttgtctttttaaatactgaaaatctaattattagtactatgactgacaagattcttcatggcataaaaagctctgcatcaaactcaattcaggaggccttccctccctacatgcatcact

SEQ ID NO: 587422 - DNA, 177 bp, Homo sapiens
agctccatcttaaacgagtaattcggagtgtcagcacggtgctcacgtgtcgacggaacttgtacaggagaggcatgcaccgcatggtgaatacacgtcgaccaggctccatctttgcgatattgaggacgtcaggacggttctcacgtatcaaaggaactatgtccaggaaggcat

SEQ ID NO: 587423 - DNA, 454 bp, Homo sapiens
cagtcctgagtaactgcatccaacaggggcaaaaagtacttggtgggcctctgaagccatcacctcttggttcagggccacccggtcttacttccaggctgccgacttcttcaacaggcatcctatgggtctctggtaatactggtgataggcgacccagggcgggatgaggaatcgtccggggtgggggccctcggctttaagagagatgggccacatcttcagggtcggatgacttaaaccgattccacgttgccgagcttctccctgtaaaatggggccatacttctggaaattctggccatgttgaagttggcctttgtgtgtgcccgtctccctccagaattggtacaggttaagccagccattgtcaccaggagagggatctcattgaggggcgaggattggggtgagatgcctctaatggggggttctgagcagcaccttgcccagt

SEQ ID NO: 587424 - DNA, 185 bp, Homo sapiens
tcactaaggtgcatggctgagatcattaagctctggtacttttaattttatgtatttctctctgatttcattcagtgcatttgcacctgaagaacttcaggtagaagaaatttgtagtaagaaaaaactcttttctattttcccgtggtcaataccccctccataatgtctatgctggtgggaag

SEQ ID NO: 587425 - DNA, 694 bp, Homo sapiens
accttcctgctgactgctctgctgaccgcttcccgcactctgccctctcgcgccgcacagtgcccgctgccgggcgcggcgcctcagacaactacactggtgggtgaacgagacagatgctctctaacgcacacaccggctgctcatacgtccacggcaaaatcctgagcgaagatgaagaccagagcaaaccctgcgaaggagtccctagagacacctagtaatggtcgaattgacataaaacagttgatagcttgagaagataaggttgatcagcagtaggcggaggaattgaagccagttttttatgaaggaagttgggcagtcgctttggatgacttttgtgaccagagtcgtcagttgaagaagtcagcatcattagataactggtgggtgcagctctcacataccttattctgttcttgcacggagcacaaaaacacaccatagagcgaacggatttgcagagcacctccagaacaaggaaagactttttagttgcaaggcgctctctcttagatgaactgcttgaagtggaccacatcagaacagtatatcacatgtgtattgccctccgtcattctctttatcctcagcacacttgtagtagattacattgatgaaggaaggctggtgctgagttcagctcctgtcttatgctttaggcaaatattctaccgcagcttggacctgg

SEQ ID NO: 587426 - DNA, 1135 bp, Homo sapiens
gaatcatggctagtacgttgcctggttgtttaatcggccgatgtggggagtggctggagtgtagctggctgggctgtgctgtgctgcgctgtgctgtgctgtgcgtgcagtgccgtgctgtgacgcagagaccagttctggctgcatgtcttggacaatgaatgtcgtagtggtggtgagtggtggaatgctggtgaaacccacagtgagtgcaaccacactagtttagatcttctggtgaccccacttctctgctgctcatgcctgctgtgtgacttggtgtgctgtgcagtgaaaacatgtgctgccccctctcagtgggaaaattgagtgagtgcttgagccagtgcctgtgtgaagtgtgcttggtgctgtggtgtgcgagccagtggcctctgtgtgctgtgagtgttgtgggtctggtgtgtgagccccacaaaaaatggagcttggacacacacgagtcgcatacccaactcaaaagttcacatgagaaagagcacactaagaacatcaagatagtgtcacaaacaaacaaacaagaacgcatatgaggccaaaaaaatggagaaaagtaacactacgattgggccaatgaaaatcaatatagtagaacatagccaacacaaacccaagacacaaagagaaaggctaagaaatgaaggaaaagagaataagaccatgagagaacaaataactaggcatagcaaaatatatagaaaagaaaaggaagaggaagaaggaagaaagcacaataggaaacactacacacaagcaaaaagatgaaacgaatagcaaacgaaatgagaacactagaagcagcaccacaaaaatgagaatacagaagaacagcgaagagtcacacaaataacagaacaaaaaaagtaaaaagtggaggaacagcaaggactgagcagagagtagaaaaagtagaaacaagaagcaaagatagatcagacaagcaagaaaaacacaacaacaaagcaaaagagagaaaaagaagcaggaaaacgagcaaaaccacaaaaagagataatgaaaataaaaacgcaagcagaccagaaaacacaagcagaggagcgcagcagcgagtccaaaagcagaagaagaacataagaaacgagaacaggagaca

SEQ ID NO: 587427 - DNA, 1559 bp, Homo sapiens
  misc_feature (373)..(373): n is a, c, g, or t
taggaaaatattttctaaaaccagttttaaatgactcttattcctgtagtaatattcaattggctgtaccgtgctggggggttagaaaggaggctagaaagaatgaattcaggcactttcttccaataaaactaattatggctcattcccttgtgacaagcgtgtagaaacgtggatctcattttataaaccatttttcatacagtttcaaagtgggtaaattcgtgatgtagattttataaatgtggcattttgtggaagaaacttgtggctattagaattagtttatacagaattcttataataagggtgtgttgtatatcattttatagaaaagacacactctactaacattcacctatctgtggtgaanttctctgtgaacacctaaagtggggtgcctaaaatctccagaagacaacagtgtgcacaagtgtgtaaacagtgtggagaaatctcctcgtggtgtgctccactctgggacgaaatttccacaaagctgttttctctctctcttgatggtgagtaattatggtggtcccaaggtggtgtgtgccattttgtgaaatttatgtgtgtctgtgagtattccataaataaaatctaaagatcttttcttttaaagacacatttactaaaaaacaaaagaaatacactaaaacaagagaccacaacatacagatacaccaacaaaacaaaagacaacaagagataccaactggaaacaaagacagagacataacaccaacacaacataacagaaaaaagagaggaagacagcaactacaacaacaatataaaagtttataacaaggaaagaggacgacgccgactacaacagagatagacgaaaaaagatacaacgcaacagccagagacatagtcacatatcggcaacacgtaaatgagaaagaactagggaccgacgtcaagaatgagtatgggcaggatagcgaaaatctggaacacaataacaatgaactcagacgcgagcaagcactgaggacagatcagggaacgagatggtatactatagagaagaagagtaagggtatggttgcgagaggagagagagaaacacacatagaataaagaccagagcggagtgacacgctcgacgcgcgcagaaagcaagagaaacatcaacaagatagaagaagatataagacaaatcataatcacgagatccgacgcagacgacagcaggacgtgcaaagagagaaaataagaaatagaagtatgtggcccgtcggtcgccacacagacacacgtgaccaatcccaagggctgagagatcacaggtgagataggagtccacagacgctcacgctgcgagacgctgaggcgactccgagacacgaccggagaggtttaccgcgcgcagccgaagcggactcctagaactcgaatatgatgaacatcagcagtagcgataactataacgcaggccggcaagatagacgcagacagaatagacggcgcgagaacaggcggagcgcgggcacagcgagggaaggcggaaggaggggcagcggagagggcgccggcacaaaggagcg

SEQ ID NO: 587428 - DNA, 328 bp, Homo sapiens
aggtgagaaccaagcactgcaaacctcataggagtactccagcgacaaggctcaaagcgggctcctccgaataggctaggctaaggataggtaggtacagtccctaccaacaacagcaaggaggatgccttctccgggacagattggatagtaggagaaaataggatatgaaggagtacgacttggatgccctgtagggtatagataacctggaaaccatgccagataaccttctgaccacgttggatgacacttgtgatctcttagaccccctagtccaggagactaataagcagcccccccagacggtgaacccaataggccatct

SEQ ID NO: 587429 - DNA, 157 bp, Homo sapiens
tcagtggagaccttctgggttccgggatcctgtccatagtgcctcgctcatctcccgatcgatcccactgacccccatcagcacccctcacaccttccccaaaggtgagatgggtatgaagaggcaagcaatgcagtgagcagtgggcaggatggca

SEQ ID NO: 587430 - DNA, 1906 bp, Homo sapiens
aaactcagttctttggaaaaattaggtaacttgaacgtagggcacatgggctgtcacaccaccccatttagagcccttattggcatagagatgataaaagtggactctgtgatggcctctcatgatctcaggatagcaggataggggaactctgagtcatggccaaaataattggtcaatgtacagcctcagacagctgggaataccaccccaaatcacttggataaggagatgttttccttatcctgtgtctttaactctgagacggatggagttgaacaatcaacgattgttaaaaatgtaccaaatgtgtaagcatcatgaggtgtttaagctgagcttttaaattaaaattctgctgggtgtggcggctcatgcctgtaatcccagcactttgcgatccccacacaggaggattgcttgagcccagaagtttgagaccagcctgggcaacacaaggagaccctgtctctacaaaaaacaaacaaacaaacaaaaaagccgggggtgttggtgtgtgcctgtagtcccagctactagggaggctgagatgggaggatcgcttgaacctggcaagtcaaggcggcagtaaatggagatctgtactccagcctgggcaacggagcgagaccctatgtcagaaaaaaagaaaaagccacccagcaggctgagcgtggtggctcgcgcctgtagtccctgcactttgggaggccaaagcgggtgagtcacttgaggtcgggagttcgagaccagcctggccaatatggtgaaaccctgtctctactaaaaatacaaaaattagccagctatggtgacgcacttctgtagtcctagctacttgggaggctgaggcacaggaatcgctgaagcccaggaggtggagattgccgttagctgagattgtgcccctgcactccagtctggacgagagagtgagactctgtctcagaaaagaaaaaaaaaaaggctgggcacggtggctcacgcctgtaatcccagcactttggggggccggggtgggcggatcgcgaggtcgggggttcgggaccagcctgaccaacgtggtgagacctgtctctactgaaaatacaaaattagccgggcgtgcttgcacgtgcctgtggtcctggctacccgggaggctgatgcagaataactggaactcgggaggcggagctggagtgcagtggcgcggtttcaactcattgcggcctcgaccctcctgggtcaagcgattcttcctgccttagtctccagagttgctgggattgccggtgtgcaccaccaagcctggctggtttttgtgtttttggtggagacggggtttcactatgttggccaggctggtctggaactcctgacctgaggtggtccgcctacctcggccttccagggtgctgggaatataggcgtgagccactgtttccggcctgttttttttagacagagtcttgctctgtcacccaggctggagtgcaatggtgcaaacatgactcactgcaccgtcatcctcccaggctcaaccatcttcccacctcaccctccagctacagctactccagatctgggctgaggtgggagaatcatttgaacccgggaggtggaggttgcagtgggctggaatcgcgcgactgtactctagcctgggtgacagggtgagaccctgtctcaaaacaaacaaacaaaaaccccaccagcaaccttgctgacaaatccacaggcccccacgtctgccaattgcctgcctgtatgaactgggcacctgggggaggggcgtggcccccaggctactcatcttggctttcacagccaaagggcctgggtggaacctcagcttactgtgtttactgactgggtaatgtggcctctgaagctgtcacctatctataaaatggggattaaaacg

SEQ ID NO: 587431 - DNA, 114 bp, Homo sapiens
aaattgtgtcagcgtgggtgattccccaaagatctgagggtatctcctagtatcctaattctgaggctaaagtctgccttcaggagtaaggtttaaagcttaaagtggcaattc

SEQ ID NO: 587432 - DNA, 717 bp, Homo sapiens
  misc_feature (651)..(651): n is a, c, g, or t
gaacgaaaatctgttcggttcattcattgcccccacaagtcctaggtcctacccgccgcagtactgatcattctatttcccccatctattgatccctcactctccaatatatctctatctaactaacgcgactaatcaccactcgcgaacaatgactaagtcaagactaacctcaaatacaaatgataaccatactacacacactaaaggacgaaccctgagtctcttatactagatatcctataaattcattcttatatttcgccacaacgtaacctcctcggacatcctgacctcactcatttactagcctaacctacactcatactatctatataatcctagtccagttggccatccccgttagtagacgccgaggcgcacgttcgattgataaagtgctttgctgcgtctaactgattgagatagaattgcccgttaagcccactttctgtgacgcaccataggcaccactcgttagcaacctccctttagttcgccccattacctaagttcattagtgctgataacgcgatccaggcgcattagcatcattttctatatctctaacttggcctcttgagccgctgtaccgccattataccgcttttaccagttgacgttgccaaggctcgacccttacctcgaatntcgacccctaaattcggagagccgcccacctcggttaggcaaaattatctagacgcagttaaagcc

SEQ ID NO: 587433 - DNA, 240 bp, Homo sapiens
agaagatcgttaagaacatcctcgaggccgacgaagaggccctccaggctgcttatgatgccctggcagtcgccgatcccttctcattcgggcctgacacctacattcccaagcttgctcctcgtctcgcctcgcaatacgactccaaggatcccggtgttcttgtcgccctgattaccatgaacttcctcaccctgcaacccggcgaggccatctacatccccgccgacggcatccacg

SEQ ID NO: 587434 - DNA, 316 bp, Homo sapiens
cccccccccccccccccccccccccgggagggggagacttcccctgggaattttgttgtcccaaggaagcaaggggggggggggagaaaccccccttccccccggggggggaatttttgcggggggcccccccctttttaaggggggggggaaaaagaaaagccccttttttccggggtgggccagggggggtttggtcgggcccggggcccccccccttttttttctttcccccccggcccctttttaaccccggggggtttcagggggggtttttaatggggaataaggtttttttattttttttttttgggga

SEQ ID NO: 587435 - DNA, 283 bp, Homo sapiens
  misc_feature (233)..(233): n is a, c, g, or t
  misc_feature (238)..(238): n is a, c, g, or t
tcgagatagaatactggagctatcattgtactaaattattaatttcttgcctccagtgttctatctctcgcaggctgagttattatcagaaaatgaccatctgctcctttttcattgcagaagattgccaggggctaatttcagaagaacttccactttctttccactggctctcatactctctaacttattagttattgttgccccgctgtgtaccgaggctctacattcgntatcntagctcctaggcattttcctgtgtagacaaccctggccgtaccct

SEQ ID NO: 587436 - DNA, 284 bp, Homo sapiens
  misc_feature (116)..(116): n is a, c, g, or t
cacaccgggggtctgtagaggattcccatgcgcaccgatcagaccgctccgtccggctctcggactaccagccctatcccttccgcctcgacagcgtcgatcttgagttccagctngatctggtcgccacacgggtcaaggcgcgcctcgccttcacgcgcaccggcgaatcgggtgcggcgctgagactcgacggcgaacgtcttaagctcctgtccatcgccatcgacggtgcgccgctgtcatccaatgcttatcagctcgatgatgagtcgctgacgata

SEQ ID NO: 587437 - DNA, 161 bp, Homo sapiens
atgcagcacagtaggtgatagaaataaaatgcttactacagtggctattacaaggtcctatgacatagtatgatgtgcaactatatgacagcttattatttttaagactaccaattactgatatttctagttttattgccttgaaccctgctggaaaagta

SEQ ID NO: 587438 - DNA, 133 bp, Homo sapiens
gaaatagacacatatactgcttggtacagctgtgacatcaactggatttaccagtgctgtctcagcctctgcatctctatgttatctaatctgtgattctcttgcgtgtcacttatcatcctgtttttctaag

SEQ ID NO: 587439 - DNA, 244 bp, Homo sapiens
gaccatccccgagtacgctacatgatcatcactaccatttgtgttgccattagtgaatttttacggggatttttaatgtgggtgcaatccctctggaaaagaccattgagtattatagaagaaaaaattaacagattattggcatagccgtgggttacgcaatgatgttttattacacaaaacacagggaacatataaagtttgtacactttttaaaaagtacaaagatctgttaatcaaattg

SEQ ID NO: 587440 - DNA, 307 bp, Homo sapiens
aacaaacggccttttaaaaaaaacccctggggcgatagctcttttcaggtaggttttttaaaaattaaaacaggggcctcctgggcaggtagggtttgtcattccgttaccaaaatagggaaagggttttattggcccaaatatggttggggtttctccttaaactttctggccccatgactgaatgcatttagaattttcgtttccctgggttttatttgggttatccctgctacagggttagtcatgcaaaaaaacaaaggggccgttaggaaaaatttattttttccccccccccagggcccca

SEQ ID NO: 587441 - DNA, 611 bp, Homo sapiens
  misc_feature (105)..(105): n is a, c, g, or t
cgggacacaaccgttataaaggagaaatagggctgagcctatttggggcgtgcaaagccaaggcgccaagaaagtacctccctgtaaaatgaatttgtcatttcnaaagcaaacaagaggccttaatttgtcaccaggtacttgtcagtgccacgggccaaatgcaccagcacagagtgcggtggattgacctctcccatccagaacctcataccgattgcacactttattgtcaatctcagggaggtgggcttccttaaaagggccagctccaaaagtaccttgggtttctccccagccagtgatgatacattcggtccggtcggcgaccacataatttgtggatggcagacaagctgggattcgtgtgggctacaagaacagcctagacatttctatttcctgaacattcggttcgagattcacgtcttggtgtgcacccaggatgaccttgtagaatgaaggccttggggacttctccaagcagtgggcagcagtcaacacccactctgggtatatcaaggtgcctccacataagtgcattccaaaccttgttctaagattgacttgccacccccagaatgtgggtgggccacacacccacaaacaac

SEQ ID NO: 587442 - DNA, 229 bp, Homo sapiens
cccattgtctgggacgtgagcagcccctctgcctgtctgcccagtctggaaagtgaggagcgtctgtgcccggccgccatcccatctaggaagtgaggagcgcctcttcccacccgccatcccatctaggaagtgaggagcttctctgcccggccgcccatcgtctgagatgtggggagcacctctgcccggccgcgaccccatttgggaggtgaggagcaactctgcc

SEQ ID NO: 587443 - DNA, 206 bp, Homo sapiens
gcgccgggtctgtacaagcatgaaaaacgcatcaccgtgccgctgctggtgtcgagcatcctgctgttctacaccgggatggccttcgcctacttcctggtgttcccgctgatcttcaagttcttcgccgccgctacaccggccggtgtggtagatgatgaccagtcatcacgaagtcgaggtaactggtgatgtcgggtcgacgc

SEQ ID NO: 587444 - DNA, 992 bp, Homo sapiens
ggtccccgttttctcattgggggacgtttgcagctcccccccgcggggtttatttttttctggtaggaacgctcctcttgcgcagggcgcacccccattctcgctgtgtgtgcgccccaaggctgctcaccgtttgtcgaacacatttctgtggacgccctttctccacccccaattggggccccgcgagaaatgtggcgccgccgcgcagatctctatacccaaagagctcgcttgtggcgctctcgagatatatttgtcgtggaagacttcggtggtgtgtataaacaccgcgtgctttctgcgcgccccacaccccctgcgagtggttgcgatatttgtccccccccctgttcagttttcccccagggtgtcccccccgagggcgcagatttggacatagcggcaaaatagggccccaggttgtccacccttcctccccaagcgggcccccacgtggttaaacactctccctcccgcgctcgcgggagtgttccccccactcgatgtctttctgtctacccacattgagaggagcacttcggttgggatagccactctagagaacagctggccacgcggtcgagtataatgagagccccccactggagtgtccaccccgggtgttacaattacacactgccagtttcccccacggctgtagacacgaaatattttcatcggtttctccacgaagccaaggtccctgtcccataatatgagccccgtgtaccaaacatgaaggaagcatggggccctcctcacacatttgcaagacatcccctccacagtaaccaggcccttaattatttgtgaaaaattggcaatttgggaactgttttcccccgctcggcacaccttatggggcttcccggccccccctttgttctcccggtccccccgaaacccgccacaccttttcactccaacaggaaaggtggggggccactcccgttgggagcctattaaaatgaccaatttaaagagaggca

SEQ ID NO: 587445 - DNA, 1847 bp, Homo sapiens
gcagagagtggggacgctcctggctatcgtgagcgggcagctgcttctgttagtgccagcgacctaacacacatgagcaacttacaactactgggctgactgcttgacgacacaggcaacgcaagcacttcattactctactgaagctgcattcccacgcttgctctatcaccgcttgacaacacgggaaggcaaagacacaacggactatggtgccaacatactaccatagcgatactactatatggcgccgcgacagcacaagcgtcacatgcgccccctgcgcataactactatcaacacaagcccggccaactatagcacaccaacacgcgcctacactactagacgtagaagcagcgataacaacctcgacatcacggcacgctaatacaagcgcagcacattccccgcaaccgcaacaggttaacccactcacgactagcggcacaccagcacaacacataggcatacctcatatatgctaccggcgctacatacacacgcacatgcaaacgcgcacaacgcacacacgcggcgcccagaaacttacaacattcacgccctactaactactcaccaactaccacaacaatcgccttaaacactacacaactctagcaacgcctaacaatctcaaaccatctctggccgcccaccacaccctatgcacccccttatccaataacacacactaactacacacgaccaaaaacacccaatcaaaccacactacgcatactcaccaaatctagtcacacccatactcacatcatcatcactacacgtatcattaacccaccaactccccctaccacaaacagtccagcaactacctctctacttacaaccaacctcccaacgaactaacatacccacagcaactttccacacatagcaacaacttgcacacactatgtacacacacaacaacataacatcatactcagtacttcaggagatacacacgatatccccctattgacaaattctcctacacacccacactctactacaaccacaacacttttgctacccatactgtccagacggctctaccaatacaccatcgaccccatcacctatgcctatctccaacacacatacatctcaccaccatacattcactcaccacacacactcattacaacccctacactcacaccatctcatcccccactcacacaccttcgcactcattatacatcaacagcacttcttcaccccccccctctatcctaaatcagtcactaacttgcacttacagcacacctcacacaggcattcagcaccacactatctccacaccctaatctccacaccaacaaccgacttgtcccacacacctctgcccaaattccatactaaaacaccaacatcaccactgccaccaactcgtcgcctccacacaacaacacaacaccgtctcacaatcaatacactcccaccaatacaaccacccctccaataatagcaacaccccccacccacccactgtcactaccctaacaccacaaccacaacctcacttctcgccctctcccaccaccgcccacaccaccccaacactgcacatctacccacacccacaccacccacccacccactcctccctcctactcatccatcccctgcctcatcacactctgacctccacacatgctctcacactcacactcacccccctcctaacctcctacacttcacaccaactcgaccatcactctgaccacacaacacaaccctctcccccctcactccatcctctctcccctccctccatcccacacatcaactacacacctcatcatctccactcctccccccagatcacctcatctcacttc

SEQ ID NO: 587446 - DNA, 394 bp, Homo sapiens
  misc_feature (45)..(46): n is a, c, g, or t
  misc_feature (48)..(48): n is a, c, g, or t
  misc_feature (394)..(394): n is a, c, g, or t
actaaacatttaaaatatatttctgaacaaaacgggcccctcgcnnantcatccgagcagagcagcccatgaagatgcagcactgatttccgtcccatagtcagggtgaaaaatgtacagcttgttcctgaaccacagacacaccttctctctgcagcctaacaggtcactgctagtatggtggctctagccgaaattatgtagttccttaaaataaaaaaaataaaataaaataaaaataaaaggaaagaaaagaaaaaaaatgtcctaagactcctaatcaatctgggaatgtagactctggagcacaaagtagcccagctcatctaaaaaactgaagagacccttccttccccaccccctcagtaggggcctgaaaggagaagaagtagtn

SEQ ID NO: 587447 - DNA, 1100 bp, Homo sapiens
  misc_feature (84)..(84): n is a, c, g, or t
  misc_feature (86)..(86): n is a, c, g, or t
  misc_feature (113)..(114): n is a, c, g, or t
  misc_feature (132)..(132): n is a, c, g, or t
  misc_feature (135)..(135): n is a, c, g, or t
  misc_feature (147)..(147): n is a, c, g, or t
  misc_feature (194)..(194): n is a, c, g, or t
  misc_feature (202)..(202): n is a, c, g, or t
  misc_feature (207)..(207): n is a, c, g, or t
  misc_feature (213)..(214): n is a, c, g, or t
  misc_feature (222)..(222): n is a, c, g, or t
  misc_feature (225)..(225): n is a, c, g, or t
  misc_feature (233)..(233): n is a, c, g, or t
  misc_feature (266)..(267): n is a, c, g, or t
  misc_feature (275)..(275): n is a, c, g, or t
  misc_feature (277)..(277): n is a, c, g, or t
  misc_feature (297)..(297): n is a, c, g, or t
  misc_feature (306)..(306): n is a, c, g, or t
  misc_feature (315)..(315): n is a, c, g, or t
  misc_feature (329)..(329): n is a, c, g, or t
  misc_feature (443)..(443): n is a, c, g, or t
  misc_feature (459)..(459): n is a, c, g, or t
  misc_feature (467)..(467): n is a, c, g, or t
  misc_feature (472)..(472): n is a, c, g, or t
  misc_feature (492)..(492): n is a, c, g, or t
  misc_feature (528)..(528): n is a, c, g, or t
  misc_feature (542)..(542): n is a, c, g, or t
  misc_feature (545)..(545): n is a, c, g, or t
  misc_feature (559)..(559): n is a, c, g, or t
  misc_feature (561)..(561): n is a, c, g, or t
  misc_feature (565)..(565): n is a, c, g, or t
  misc_feature (578)..(578): n is a, c, g, or t
  misc_feature (623)..(623): n is a, c, g, or t
  misc_feature (1100)..(1100): n is a, c, g, or t
gcaggagccggtgcgagcggagcagagccgaggtcgggccgcgagcggagccggctgagcgggcgccgagctcccgccagggcncnggaacacgctgtcctcgcgcttccgcnngggtggacatcgacgaanttngacgagaacaanatttgtggacgagcaggaggaggcggcggcggcggctggcggagccnggcccggnacccntagcgnnggtggacnggnctcctgcnggcaaggggacatgcttcggggcattccatgcnngccttgtngnaactctcccgtcaacaccanagaatcaangctgtgaanggagcgagcccagngcgtggtgctgaaagtgctcacagaacttcaagagcagtgagattgagcaggctgtgcagtcactggacagaaacggcgttgacttgttactgaagtacatttataaaggcttngagaagcccacagaanatagcagngcagngttactccagtggcacgaanaggccttagcagtaggaggactaggctccattatangagtcttacagcanganagactgtttaacananatanaacgactcatgtnaccttgagaagaattctggatgcccaggctggtgaagaagggatngacaatggaccatcttcctaggaactcccaagtaactatttcaggacatgtatctgctgaactgtatttcattttcaaggtggaggggaagatccgctgtgtcctaaatcctgtttaggaatctgatagtctatgccttgtctccgagttctgcagactgacctttgacgtctacaacgtggggtggtgttggccgtgccctgtgtgcccggggcaggatggcttggccggtgccatcaggcctgggtaaagggaagaacatgggttttggaagggtgaaaaaaccatggagtttgttaaagtggggtcttcccaaaggggactcgtggaactgatagtgctgcgcacaaaacggggtttgatataaaaagaaaaggggcttggtgcgaaagaatgtgtaatgtgcacgataagatgtcttgttacatacagagggagagatgatcgtgcatgtgactctttattatttgttagagn

SEQ ID NO: 587448 - DNA, 400 bp, Homo sapiens
cagagaaagactctgtctcaagaaaaaaaaaaaaaaaattagccaggcatagtggtgagcacttgtagtcccagctactcgggaggttgaggtgggagaatcacttgagtgattctccgtgcacctgccaaggctgcaatgagtgctacttgccccactgccctgtagcctgagtgacagagcaagaccctgtttaaaaaaaaaaaaaaattaaaataaacctggtcaacatggcaaaaccccatctgtacaaaaaacacaaaaattagttgggtatagtttccacccacttggggggctgatgtgggaggatcacttgcacccaggaggtcaaggttgcagtgagccataatcacgccactgcactccagcctgggcaacagagtgagaccctatctca

SEQ ID NO: 587449 - DNA, 842 bp, Homo sapiens
aacggctaggtagcgaggctgggtggtgcacatctaccagttccccgaatgtgactctgatgaagatgaagacttcaagaggcaggatgcagagatgaaggaaagcatcccttttgcagtcgtgggatcatgcgaggtggtgagggatggcgggaaccggccggtgaggggacgccgctactcctgggggaccgtggaggtggagaacccacatcactgcgatttcctgaacctgcgacggatgctggtgcagacacacctgcaggacctgaaagaggtgacgcacgatctgctctacgagggctaccgggcccgctgcctacagagcctggcccggcctggggctcgcgatcgagccagccgcagtaagctttcccgccagagcgccacagagatcccgctgcccatgctgcctctggcggacaccgagaagctgatccgcgagaaagacgaagagctgcgccgcatgcaagagatgctggagaagatgcaggcccaaatgcagcagagccaggcccagggcgagcagtcagacgccctctgaggccacgccccgcccggccttacctcggctccgccttcagtcggcctcttgtccaatccccgcgccccacactgcccagcgccccccgggacctccgcgggtgccgccctcgcgcgggctagggggaggttctcccagcctgagtccgtagccccgccccggcgctggtcccgcccacccagacaccgcccacttcccggcccggggcctgcacaatctccgaccgcatcactgtcttccggagtcccccttcttctcccagactctgtcttcaataaaaactgagcttcccgcggca

SEQ ID NO: 587450 - DNA, 236 bp, Homo sapiens
cgatgggtcatgcagttcaactcattatctgtgtgcaattgtttgtccgagaaactccatcttctttacatctcgcagcaatgtcttgtcctttcttatggtccctggtgatttgctcgtttttctcttccatcagctctcgaaccaatgaatattcatcatgattggtgatgccaatgcgggcacagatggtcatgagcatgtcagtgacagtcttagagggacacgaatgttca

SEQ ID NO: 587451 - DNA, 365 bp, Homo sapiens
  misc_feature (2)..(2): n is a, c, g, or t
  misc_feature (64)..(64): n is a, c, g, or t
  misc_feature (81)..(81): n is a, c, g, or t
  misc_feature (127)..(127): n is a, c, g, or t
  misc_feature (223)..(223): n is a, c, g, or t
  misc_feature (303)..(303): n is a, c, g, or t
  misc_feature (337)..(337): n is a, c, g, or t
tnttgctctgtcacccaggctggagtgcagtggtgcgatctccactcactgcaagctctgcctnccaggttcaagaaattntcccacctcagcctcccaagtagctgggactaccggtgtgtgccancatgcccggctaatttttgcaattttagtagagacaaggtttcaccatgttggccaggctggtctcaaactcctgacctcaagtgatctgcctgtntcagcctctcaaagtgctgggattacaggtgagccaccgtgcccggccaggggcaattgtctgctcgaaggcacatgttncccaacagctttgagcgtggggatcaagggagtncagtttttttgaggggcgggacagccgt

SEQ ID NO: 587452 - DNA, 638 bp, Homo sapiens
gctctctccccctctctccccacccgcttgcctccggccctaacctcaaggaactggctccgcctcctagaccccaacctcgccccaggccctgcctcctgggcctcacccacaacctcaggtcccgctcctgattcctgtccccttcccactgtcccgcagtaagctttcccgccagagcgccacagagatcccgctgcccatgctgcctctggcggacaccgagaagctgatccgcgagaaagacgaagagctgcgccgcatgcaagagatgctggagaagatgcaggcccaaatgcagcagagccaggcccagggcgagcagtcagacgccctctgaggccacgccccgcccggccttacctcggctccgccttcagtcggcctcttgtccaatccccgcgccccacactgcccagcgccccccgggacctccgcgggtgccgccctcgcgcgggctagggggaggttctcccagcctgagtccgtagccccgccccggcgctggtcccgcccacccagacaccgcccacttcccggcccggggcctgcacaatctccgaccgcatcactgtcttccggagtcccccttcttctcccagactctgtcttcaataaaaactgagcttcccgcggca

SEQ ID NO: 587453 - DNA, 327 bp, Homo sapiens
  misc_feature (21)..(21): n is a, c, g, or t
  misc_feature (24)..(24): n is a, c, g, or t
  misc_feature (31)..(31): n is a, c, g, or t
  misc_feature (228)..(228): n is a, c, g, or t
  misc_feature (291)..(291): n is a, c, g, or t
aaccgtcgttatcccaaaatnaanttttaantttccaccggcccttccggcactatgctggatggtgtactggagggaaaactgaatgcggcgtttattgatggacccattaaccatactgccatcgacgggataccggtataccgcgaggaactgatgatcgtaacgccacaaggatatgcgccagtaacccgtgccagtcaggttaatggcagtaacatttatgcnttccgcgccaattgttcgtatcgtcgccacttcgagagcttggtttcatgctgacggtgccgntccgggaactatccatgagatggagtcttattcacg

SEQ ID NO: 587454 - DNA, 698 bp, Homo sapiens
  misc_feature (641)..(641): n is a, c, g, or t
  misc_feature (644)..(644): n is a, c, g, or t
gctctctccccctctctccccacccgcttgcctccggccctaacctcaaggaactggctccgcctcctagaccccaacctcgccccaggccctgcctcctgggcctcacccacaacctcaggtcccgctcctgattcctgtccccttcccactgtcccgcagtaagctttcccgccagagcgccacagagatcccgctgcccatgctgcctctggcggacaccgagaagctgatccgcgagaaagacgaagagctgcgccgcatgcaagagatgctggagaagatgcaggcccaaatgcagcagagccaggcccagggcgagcagtcagacgccctctgaggccacgccccgcccggccttacctcggctccgccttcagtcggcctcttgtccaatccccgcgccccacactgcccagcgccccccgggacctccgcgggtgccgccctcgcgcgggctagggggaggttctcccagcctgagtccgtagccccgccccggcgctggtcccgcccacccagacaccgcccacttcccggcccggggcctgcacaatctccgaccgcatcactgtcttccggagtcccccttcttctcccagactctgtcttcaataaaaactgagcttcccgcggcaaanaanaagaaagaagtaaataattaatacaagaaaaagaaaataagaacagaaaaagag

SEQ ID NO: 587455 - DNA, 116 bp, Homo sapiens
tcacttgaccatctgcgcccccttctctcctgcaattggtttgtactcactggggatgtgctctcgcctgtttagccgatgtatggagataagaggatctttttgtcctgtaggct

SEQ ID NO: 587456 - DNA, 111 bp, Homo sapiens
ttttccggggaaagtaaagcctcagggatgcccgcgccttttttccaaagcctttgtctatgagacctcttaagttttaagattaaatgcccctcgctgttcttcctctga

SEQ ID NO: 587457 - DNA, 1547 bp, Homo sapiens
ccccatgtctcaccacgatgatggagctacagtgggacttggaatccagatgtgtgaaggatggagggttgaagccgcactcagcttcctgccccaccagaggaagtggggagagacggcaggtgcagtgatggctggcggagtcatggacaaggagtacgtgggttttgctgctctccccaaccagctgcaccgcaagtctgtcaagaaggggtttgacttcacgctaatggtggcaggggagtcaggcctagggaaatccaccctcatcaacagcctcttcctcaccaacctctatgaggatcgccaggtgccagaggccagtgctcgcttgacacagaccctggccattgagcgccggggcgtagagattgaggaagggggtgtgaaagtgaagctgacccttgtggacacacctggctttggggactcagtggactgctctgactgctggcttccggtggtgaaattcatcgaggagcaatttgagcagtaccttagggatgagagtggcctgaaccggaagaacatccaggactcccgagtccactgctgcctctacttcatctcacccttcggccgggggctccggcccctagatgtggccttcctccgggcagtacacgagaaagtcaacatcatcccagtcattggcaaagcggatgctctgatgccccaggaaacccaggccctcaagcagaagatccgggatcagttgaaggaagaggagatccacatctaccagttccccgaatgtgactctgatgaagatgaagacttcaagaggcaggatgcagagatgaaggaaagcatcccttttgcagtcgtgggatcatgcgaggtggtgagggatggcgggaaccggccggtgaggggacgccgctactcctgggggaccgtggaggtggagaacccacatcactgcgatttcctgaacctgcgacggatgctggtgcagacacacctgcaggacctgaaagaggtgacgcacgatctgctctacgagggctaccgggcccgctgcctacagagcctggcccggcctggggctcgcgatcgagccagccgcagtaagctttcccgccagagcgccacagagatcccgctgcccatgctgcctctggcggacaccgagaagctgatccgcgagaaagacgaagagctgcgccgcatgcaagagatgctggagaagatgcaggcccaaatgcagcagagccaggcccagggcgagcagtcagacgccctctgaggccacgccccgcccggccttacctcggctccgccttcagtcggcctcttgtccaatccccgcgccccacactgcccagcgccccccgggacctccgcgggtgccgccctcgcgcgggctagggggaggttctcccagcctgagtccgtagccccgccccggcgctggtcccgcccacccagacaccgcccacttcccggcccggggcctgcacaatctccgaccgcatcactgtcttccggagtcccccttcttctcccagactctgtcttcaataaaaactgagcttcccgcggca

SEQ ID NO: 587458 - DNA, 1515 bp, Homo sapiens
tccacctccttggtgactccaagtactcacacagtcatcgcccctacccacgcacagatggccacatctgcctccatccactcagcgccaacaggtaccattcctccaccaacaacgctcaaggccacagggtccacccacacagccccaccaataacgccgaccaccagtgggaccagccaagcccacagctcattcagcacaaacaaaacacctacctcgctacattcacacacttcctccacacaccatcctgaagtcgccccaacttctactaccacgattactcccaaccccactagtacacgcaccagaacccctgtggcccacaccaactcagccaccagcagcaggccaccaccacccttcaccacacactccccacctacagggagcagtcccttctcttccacaggtcccatgacggcaacatccttcaagaccaccactacctatccaaccccatcactccctcagaccactcctctcactcacgttccacctttctcaacctctttggtgactccaattactcacacagtcatcacccctacccacccacagatgtccacttctgcctatatccactcaacgccaacaggcacgattgcttcaccaacaacagttaaggccacaaggtccacctacacagccccactaatgacggcaaccaccagtaggatcagccaagcccacagctcaatcagcacagccaaaacctctacatccctccactcacatgcttcctccacacaccatcctgaagtcaccccaacttctaccaccaacgtgactcccaagtctaccagtagagacaccagcacccctgtgacccacaccacctcggccaccagtagcaggccacccacacccatcacaacacactcttcacctaccaggagcagtcccctctcttccacaggtcctatgactgcaacatccatcaagaccaccacgacctatccaaccccatcacaccctcagaccacacttaccactcatgttccacctttctccacctcatcagtcactccaagtactcacacagtcatcacccctacccacgcacaaatgtccacttctgcttcgatccactcaacgccaacaggcaccgttcctccactgacaacgcgcatgcccacagggtcgacacgcacaggcccaccaatgacggggaccatcattcagacaagcaaagctcacaactcattcagcacagccaaaacttctacatctctccactcacatgcttcctccacacaccatcctgaaaccacaccaacttctaccaccaacattactcccaagtccactagtgcagggaccagcacccctgtggcccacaccaccttggccaccagcagcaggctacccacaaccttcaccacacacttcccacctacagggagcagtcatgtctcttccacaggtcctatgactgcaacatcctcccagaccaccactacccatccacccccatcacaccctcagaccacacttcccactcacgttcca

SEQ ID NO: 587459 - DNA, 1473 bp, Homo sapiens
ccccatgtctcaccacgatgatggagctacagtgggacttggaatccagatgtgtgaaggatggagggttgaaggacaaggagtacgtgggttttgctgctctccccaaccagctgcaccgcaagtctgtcaagaaggggtttgacttcacgctaatggtggcaggggagtcaggcctagggaaatccaccctcatcaacagcctcttcctcaccaacctctatgaggatcgccaggtgccagaggccagtgctcgcttgacacagaccctggccattgagcgccggggcgtagagattgaggaagggggtgtgaaagtgaagctgacccttgtggacacacctggctttggggactcagtggactgctctgactgctggcttccggtggtgaaattcatcgaggagcaatttgagcagtaccttagggatgagagtggcctgaaccggaagaacatccaggactcccgagtccactgctgcctctacttcatctcacccttcggccgggggctccggcccctagatgtggccttcctccgggcagtacacgagaaagtcaacatcatcccagtcattggcaaagcggatgctctgatgccccaggaaacccaggccctcaagcagaagatccgggatcagttgaaggaagaggagatccacatctaccagttccccgaatgtgactctgatgaagatgaagacttcaagaggcaggatgcagagatgaaggaaagcatcccttttgcagtcgtgggatcatgcgaggtggtgagggatggcgggaaccggccggtgaggggacgccgctactcctgggggaccgtggaggtggagaacccacatcactgcgatttcctgaacctgcgacggatgctggtgcagacacacctgcaggacctgaaagaggtgacgcacgatctgctctacgagggctaccgggcccgctgcctacagagcctggcccggcctggggctcgcgatcgagccagccgcagtaagctttcccgccagagcgccacagagatcccgctgcccatgctgcctctggcggacaccgagaagctgatccgcgagaaagacgaagagctgcgccgcatgcaagagatgctggagaagatgcaggcccaaatgcagcagagccaggcccagggcgagcagtcagacgccctctgaggccacgccccgcccggccttacctcggctccgccttcagtcggcctcttgtccaatccccgcgccccacactgcccagcgccccccgggacctccgcgggtgccgccctcgcgcgggctagggggaggttctcccagcctgagtccgtagccccgccccggcgctggtcccgcccacccagacaccgcccacttcccggcccggggcctgcacaatctccgaccgcatcactgtcttccggagtcccccttcttctcccagactctgtcttcaataaaaactgagcttcccgcggca

SEQ ID NO: 587460 - DNA, 853 bp, Homo sapiens
tgtgcgtgtcagattgcggcccgacagcctgagtcacgcaccacgccgcagctgcccaccacaggctcacaggctccacgcaagtctggcccatgacgggaacctccaccaccatcgggcttctcagctccaccggaccctcacccagctctaatcacacccctgccagccccacaccacctcggccaccagtagcaggccacccacacccatcacaacacactcttcacctaccaggagcagtcccctctcttccacaggtcctatgactgcaacatccatcaagaccaccacgacctatccaaccccatcacaccctcagaccacacttaccactcatgttccacctttctccacctcatcagtcactccaagtactcacacagtcatcacccctacccacgcacaaatgtccacttctgcttcgatccactcaacgccaacaggcaccgttcctccactgacaacgcgcatgcccacagggtcgacacgcacaggcccaccaatgacggggaccatcattcagacaagcaaagctcacaactcattcagcacagccaaaacttctacatctctccactcacatgcttcctccacacaccatcctgaaaccacaccaacttctaccaccaacattactcccaagtccactagtgcagggaccagcacccctgtggcccacaccaccttggccaccagcagcaggctacccacaaccttcaccacacacttcccacctacagggagcagtcatgtctcttccacaggtcctatgactgcaacatcctcccagaccaccactacccatccacccccatcacaccctcagaccacacttcccactcacgttcca

SEQ ID NO: 587461 - DNA, 316 bp, Homo sapiens
gcccaggctgggacccactgactggctatttatgaagaaaagaggtttaattggctcacagttctgcaggctgtacaggaattgtgatactggcatctgctcagctttggggaggcctcaggaagcttacaagcatggcagaaggtgaagggggagcagacacatcacaggccagagcaggagcaagcaagcgaggaaggagatgccacatactttaaaacaactggatctcatgagaactcactcattattgtgaggacagtaccaaggggaatgctgctaaactattcatgagaaacctgctcgctcactctta

SEQ ID NO: 587462 - DNA, 296 bp, Homo sapiens
caggcttgggacttttaggtagggagctcaggaatcctaggaatctgtagtattctagacaaggagcaaagacttggatgggtatatccccttggcaactcaagactctctagcctgtgggatgtacgagcttggaggctgcccaggccagaccccgcttgcctggctccaaggatggcctggtcagcctctcgctctgtgctgcaggtacatgagtagatgagcagatcccacctgcttctcctcctcaaaggtgaagacacatccctgaggtcaagcctcaatctagccatatc

SEQ ID NO: 587463 - DNA, 1641 bp, Homo sapiens
ccccatgtctcaccacgatgatggagctacagtgggacttggaatccagatgtgtgaaggatggagggttgaagccgcactcagcttcctgccccaccagaggaagtggggagagacggcaggtgcagtgatggctggcggagtcatggacaaggagtacgtgggttttgctgctctccccaaccagctgcaccgcaagtctgtcaagaaggggtttgacttcacgctaatggtggcaggggagtcaggcctagggaaatccaccctcatcaacagcctcttcctcaccaacctctatgaggatcgccaggtgccagaggccagtgctcgcttgacacagaccctggccattgagcgccggggcgtagagattgaggaagggggtgtgaaagtgaagctgacccttgtggacacacctggctttggggactcagtggactgctctgactgctggcttccggtggtgaaattcatcgaggagcaatttgagcagtaccttagggatgagagtggcctgaaccggaagaacatccaggactcccgagtccactgctgcctctacttcatctcacccttcggccgggggtctggtggggggatcctgggggctggcgcatttagggagggctggggggtctctgccccctgaggctgggcaatgaccaatccctgggtgcaggctccggcccctagatgtggccttcctccgggcagtacacgagaaagtcaacatcatcccagtcattggcaaagcggatgctctgatgccccaggaaacccaggccctcaagcagaagatccgggatcagttgaaggaagaggagatccacatctaccagttccccgaatgtgactctgatgaagatgaagacttcaagaggcaggatgcagagatgaaggaaagcatcccttttgcagtcgtgggatcatgcgaggtggtgagggatggcgggaaccggccggtgaggggacgccgctactcctgggggaccgtggaggtggagaacccacatcactgcgatttcctgaacctgcgacggatgctggtgcagacacacctgcaggacctgaaagaggtgacgcacgatctgctctacgagggctaccgggcccgctgcctacagagcctggcccggcctggggctcgcgatcgagccagccgcagtaagctttcccgccagagcgccacagagatcccgctgcccatgctgcctctggcggacaccgagaagctgatccgcgagaaagacgaagagctgcgccgcatgcaagagatgctggagaagatgcaggcccaaatgcagcagagccaggcccagggcgagcagtcagacgccctctgaggccacgccccgcccggccttacctcggctccgccttcagtcggcctcttgtccaatccccgcgccccacactgcccagcgccccccgggacctccgcgggtgccgccctcgcgcgggctagggggaggttctcccagcctgagtccgtagccccgccccggcgctggtcccgcccacccagacaccgcccacttcccggcccggggcctgcacaatctccgaccgcatcactgtcttccggagtcccccttcttctcccagactctgtcttcaataaaaactgagcttcccgcggca

SEQ ID NO: 587464 - DNA, 354 bp, Homo sapiens
gcatgaaccactgcacccaacccttgaaaaactaaatctctgatcgcatattcatatataactccgacaatttattgccggcaagtgtgtaatatattataagtgaatcgaacattaaaatcttgctgcttaaagtcagcactcatctcggacatgttgaaattaaaatctattcttgtatcatatacactatgtgataaagatattctgcatgacttgcctctaaatctattactaccatactgcatttctactataaagtctcaacttagattatatctgtcattcactttgttctagcagattgtatcagctgattatggagaatattctatacatcaggattattttctg

SEQ ID NO: 587465 - DNA, 1607 bp, Homo sapiens
  misc_feature (1550)..(1550): n is a, c, g, or t
  misc_feature (1553)..(1553): n is a, c, g, or t
ccccatgtctcaccacgatgatggagctacagtgggacttggaatccagatgtgtgaaggatggagggttgaagccgcactcagcttcctgccccaccagaggaagtggggagagacggcaggtgcagtgatggctggcggagtcatggacaaggagtacgtgggttttgctgctctccccaaccagctgcaccgcaagtctgtcaagaaggggtttgacttcacgctaatggtggcaggggagtcaggcctagggaaatccaccctcatcaacagcctcttcctcaccaacctctatgaggatcgccaggtgccagaggccagtgctcgcttgacacagaccctggccattgagcgccggggcgtagagattgaggaagggggtgtgaaagtgaagctgacccttgtggacacacctggctttggggactcagtggactgctctgactgctggcttccggtggtgaaattcatcgaggagcaatttgagcagtaccttagggatgagagtggcctgaaccggaagaacatccaggactcccgagtccactgctgcctctacttcatctcacccttcggccgggggctccggcccctagatgtggccttcctccgggcagtacacgagaaagtcaacatcatcccagtcattggcaaagcggatgctctgatgccccaggaaacccaggccctcaagcagaagatccgggatcagttgaaggaagaggagatccacatctaccagttccccgaatgtgactctgatgaagatgaagacttcaagaggcaggatgcagagatgaaggaaagcatcccttttgcagtcgtgggatcatgcgaggtggtgagggatggcgggaaccggccggtgaggggacgccgctactcctgggggaccgtggaggtggagaacccacatcactgcgatttcctgaacctgcgacggatgctggtgcagacacacctgcaggacctgaaagaggtgacgcacgatctgctctacgagggctaccgggcccgctgcctacagagcctggcccggcctggggctcgcgatcgagccagccgcagtaagctttcccgccagagcgccacagagatcccgctgcccatgctgcctctggcggacaccgagaagctgatccgcgagaaagacgaagagctgcgccgcatgcaagagatgctggagaagatgcaggcccaaatgcagcagagccaggcccagggcgagcagtcagacgccctctgaggccacgccccgcccggccttacctcggctccgccttcagtcggcctcttgtccaatccccgcgccccacactgcccagcgccccccgggacctccgcgggtgccgccctcgcgcgggctagggggaggttctcccagcctgagtccgtagccccgccccggcgctggtcccgcccacccagacaccgcccacttcccggcccggggcctgcacaatctccgaccgcatcactgtcttccggagtcccccttcttctcccagactctgtcttcaataaaaactgagcttcccgcggcaaanaanaagaaagaagtaaataattaatacaagaaaaagaaaataagaacagaaaaagag

SEQ ID NO: 587466 - DNA, 1713 bp, Homo sapiens
ccccatgtctcaccacgatgatggagctacagtgggacttggaatccagatgtgtgaaggatggagggttgaagccgcactcagcttcctgccccaccagaggaagtggggagagacggcaggtgcagtgatggctggcggagtcatggacaaggagtacgtgggttttgctgctctccccaaccagctgcaccgcaagtctgtcaagaaggggtttgacttcacgctaatggtggcaggggagtcaggcctagggaaatccaccctcatcaacagcctcttcctcaccaacctctatgaggatcgccaggtgccagaggccagtgctcgcttgacacagaccctggccattgagcgccggggcgtagagattgaggaagggggtgtgaaagtgaagctgacccttgtggacacacctggctttggggactcagtggactgctctgactgctggcttccggtggtgaaattcatcgaggagcaatttgagcagtaccttagggatgagagtggcctgaaccggaagaacatccaggactcccgagtccactgctgcctctacttcatctcacccttcggccgggggctccggcccctagatgtggccttcctccgggcagtacacgagaaagtcaacatcatcccagtcattggcaaagcggatgctctgatgccccaggaaacccaggccctcaagcagaagatccgggatcagttgaaggaagaggagatccacatctaccagttccccgaatgtgactctgatgaagatgaagacttcaagaggcaggatgcagagatgaaggtgtgggaaacaaagaaggaaggcaggccgggcacggtggctcacgtctgtaatcccagcactttgggaggctgagacgggaggatcccctgaggtcaggagttccagaccagcctgggcaacatggcgagaccccacctctactaaaaatacacaaatttgccaggaaagcatcccttttgcagtcgtgggatcatgcgaggtggtgagggatggcgggaaccggccggtgaggggacgccgctactcctgggggaccgtggaggtggagaacccacatcactgcgatttcctgaacctgcgacggatgctggtgcagacacacctgcaggacctgaaagaggtgacgcacgatctgctctacgagggctaccgggcccgctgcctacagagcctggcccggcctggggctcgcgatcgagccagccgcagtaagctttcccgccagagcgccacagagatcccgctgcccatgctgcctctggcggacaccgagaagctgatccgcgagaaagacgaagagctgcgccgcatgcaagagatgctggagaagatgcaggcccaaatgcagcagagccaggcccagggcgagcagtcagacgccctctgaggccacgccccgcccggccttacctcggctccgccttcagtcggcctcttgtccaatccccgcgccccacactgcccagcgccccccgggacctccgcgggtgccgccctcgcgcgggctagggggaggttctcccagcctgagtccgtagccccgccccggcgctggtcccgcccacccagacaccgcccacttcccggcccggggcctgcacaatctccgaccgcatcactgtcttccggagtcccccttcttctcccagactctgtcttcaataaaaactgagcttcccgcggca

SEQ ID NO: 587467 - DNA, 405 bp, Homo sapiens
agtgactgatgcgtgggccaaggagcaccaaggggagatgggtcactgcccaagccgtccctcagagcctggcccagctcggtggtccctgccaacaacatacaggtcacaaagacccaaagacacatagatgcaacagagaagccagccaaaacctgccaaatccaagatggcaacaaaagtgacttctggtcgtcctcactgcacattatgtgctaattataatgcatttgcatgctaaaagacactcccactgccaccaagacagcttacagatgccatggctactttcagaagctaaacgagggagggactctcagttccagggaaatcccctccccttacctggaaaactcatgaacagtccaccccttgtttagcatacaatcaagaaataaaccacga

SEQ ID NO: 587468 - DNA, 1807 bp, Homo sapiens
ccccatgtctcaccacgatgatggagctacagtgggacttggaatccagatgtgtgaaggatggagggttgaagccgcactcagcttcctgccccaccagaggaagtggggagagacggcaggtgcagtgatggctggcggagtcatggacaaggagtacgtgggttttgctgctctccccaaccagctgcaccgcaagtctgtcaagaaggggtttgacttcacgctaatggtggcaggggagtcaggcctagggaaatccaccctcatcaacagcctcttcctcaccaacctctatgaggatcgccaggtgccagaggccagtgctcgcttgacacagaccctggccattgagcgccggggcgtagagattgaggaagggggtgtgaaagtgaagctgacccttgtggacacacctggctttggggactcagtggactgctctgactgctggcttccggtggtgaaattcatcgaggagcaatttgagcagtaccttagggatgagagtggcctgaaccggaagaacatccaggactcccgagtccactgctgcctctacttcatctcacccttcggccgggggtctggtggggggatcctgggggctggcgcatttagggagggctggggggtctctgccccctgaggctgggcaatgaccaatccctgggtgcaggctccggcccctagatgtggccttcctccgggcagtacacgagaaagtcaacatcatcccagtcattggcaaagcggatgctctgatgccccaggaaacccaggccctcaagcagaagatccgggatcagttgaaggaagaggagatccacatctaccagttccccgaatgtgactctgatgaagatgaagacttcaagaggcaggatgcagagatgaaggtgtgggaaacaaagaaggaaggcaggccgggcacggtggctcacgtctgtaatcccagcactttgggaggctgagacgggaggatcccctgaggtcaggagttccagaccagcctgggcaacatggcgagaccccacctctactaaaaatacacaaatttgccaggaaagcatcccttttgcagtcgtgggatcatgcgaggtggtgagggatggcgggaaccggccggtgaggggacgccgctactcctgggggaccgtggaggtggagaacccacatcactgcgatttcctgaacctgcgacggatgctggtgcagacacacctgcaggacctgaaagaggtgacgcacgatctgctctacgagggctaccgggcccgctgcctacagagcctggcccggcctggggctcgcgatcgagccagccgcagtaagctttcccgccagagcgccacagagatcccgctgcccatgctgcctctggcggacaccgagaagctgatccgcgagaaagacgaagagctgcgccgcatgcaagagatgctggagaagatgcaggcccaaatgcagcagagccaggcccagggcgagcagtcagacgccctctgaggccacgccccgcccggccttacctcggctccgccttcagtcggcctcttgtccaatccccgcgccccacactgcccagcgccccccgggacctccgcgggtgccgccctcgcgcgggctagggggaggttctcccagcctgagtccgtagccccgccccggcgctggtcccgcccacccagacaccgcccacttcccggcccggggcctgcacaatctccgaccgcatcactgtcttccggagtcccccttcttctcccagactctgtcttcaataaaaactgagcttcccgcggca

SEQ ID NO: 587469 - DNA, 256 bp, Homo sapiens
gtactcacattctgcttacagttgtaacaaatacagacgagttaaaagacaaacaaaagtacgcttagctgaatcagccccgaagggactactcctatgggagcacgggttatcctgccgcgtgaaactgtcctatgttgcctatggacccggagttccccaaagggacagagcatcacagttgaagaggcaacatgggtcaagtgtagtgtgcagacaggccaacttgggtgactggcgctcatcgagggcccct

SEQ ID NO: 587470 - DNA, 986 bp, Homo sapiens
  misc_feature (374)..(374): n is a, c, g, or t
acactgccttgtctgctcccctgtgtcgcgagttgctttggaggggcctcgtgtctgcggtagacagcccctcgtgtggaccagggtgctctcaccatgttgctctcgctctttgtcctcttaagggccctcgtggctccggatgttgcttctctcgcgatattttgaggggcgcctggtctgccagaggtctcaaggcgcccctagcgccgtctcaggggcctccccggggggcccgcccggtgttcgccgcccgaaggtgtgggcgtcccgtccccggtacacaggcgcgtgtggtcagagaggtgtgccaaggatgctgcgcgcaaaaatctgtttgggcagggttctcccccgcgcccttttgttggggncctgtagtaccccgcgctggtgtgagccgcgggactcccagcgccgcgtggctgctgatggttgctcccggctgccgaccgtatcagccatctcgtgaacaacctccgcggttagggccgccgttgctccctaagaagcagcgtttattgcgtgtggaacaccgcctctctttgtgggtctgccagcacccacgtgggtagtctgagccaccccggtgccctgaggtggcacgttcttatcaaccttatcagcaggatgtcttaggggcccacccgagccagcaatggggggggaaggtacaaaatcatgataataatgtggatactagcgatctaaaaggcttcagtcttctcgcgcacaaatgttttcttgagcctgatccccactaacagacggcgaatctgtctttaattattcactctgccccccgtcttcctcaatgaacacgtgccggcttttgtctcaagaattctgcacacgtacattcccccaggcgcgcaagtgtctcatggcgaggggaactctcgcgtccttttttcgacagagccgacccccgtaaaggtggctggggaaccccgtaagatcttgggcgggaacagacccacataaca

SEQ ID NO: 587471 - DNA, 1099 bp, Homo sapiens
gggatctagctatattgcccaggcttctcctgttctcttaatgtctgccccatcttagaatcttgtgtttacaccatctatgtctctgagattttgtttttgtcttcctgtatgtccatctctccccatctctgtctttcatgtctttctctctgtctctgaccacccagtatctctgtgtctcactgtctctggtcatgaaatgtctgtcattgtggcccgtttcacactgtctctatatctgtttcccctgagatccgggatcagttgaaggaagaggagatccacatctaccagttccccgaatgtgactctgatgaagatgaagacttcaagaggcaggatgcagagatgaaggaaagcatcccttttgcagtcgtgggatcatgcgaggtggtgagggatggcgggaaccggccggtgaggggacgccgctactcctgggggaccgtggaggtggagaacccacatcactgcgatttcctgaacctgcgacggatgctggtgcagacacacctgcaggacctgaaagaggtgacgcacgatctgctctacgagggctaccgggcccgctgcctacagagcctggcccggcctggggctcgcgatcgagccagccgcagtaagctttcccgccagagcgccacagagatcccgctgcccatgctgcctctggcggacaccgagaagctgatccgcgagaaagacgaagagctgcgccgcatgcaagagatgctggagaagatgcaggcccaaatgcagcagagccaggcccagggcgagcagtcagacgccctctgaggccacgccccgcccggccttacctcggctccgccttcagtcggcctcttgtccaatccccgcgccccacactgcccagcgccccccgggacctccgcgggtgccgccctcgcgcgggctagggggaggttctcccagcctgagtccgtagccccgccccggcgctggtcccgcccacccagacaccgcccacttcccggcccggggcctgcacaatctccgaccgcatcactgtcttccggagtcccccttcttctcccagactctgtcttcaataaaaactgagcttcccgcggca

SEQ ID NO: 587472 - DNA, 898 bp, Homo sapiens
agagagcctggtctgtggcaagtatctggctgaccatgtccactgaaatagaaggcttgttgccaagacttcgtggacgaagtgacactccgtgaggagctaggatagatgcgcaataactgctttgctgatatggcgaccggttgcaattgactggattctaggacgatgttcaacaataagtccccatggtgcaatcaagcgcggattgtactgccacacgtacatgatttgatactccttatacatacaatgcaggtctgtacaaccacctacagtgctcagtcacaccctgtgcaaagaccaaactacagaactctttccaaaagccactccgacaacagcccgcaagtgccttgaaggatgcgtccgtccccaggtgcctcccccacatgtttccacctccagtcccgccgctttgagcaatgagatcggtcttgccaaccagaaaagcatgacctgagatcctccagacagaaaagtggacacaagaaaatatcggtctgagccaaaggagtactctgggaatagtgaaccattggcaggtcatcaattcttcagcatgaaagagcagtaagcacttggtcagtttaaacagaggtatgccagctcggtgggctcccagggttcccaataaacctgaatttcagacccgattagcaatttttgtgcacaagggtaatcacttagaaatcaatgttattgtgtataactgatttggagcatcttcattctcagaattgaaaggatacgatggttttatattattgtctttagggagcaagtacaaagtgtatgtgagagtggttgtgtgaatgaactatatattttttttcaacaacagggtgcgggggttatactacggaaataatacattggtatgggctttatatattgg

SEQ ID NO: 587473 - DNA, 876 bp, Homo sapiens
  misc_feature (3)..(3): n is a, c, g, or t
ccnccccataatagcataataaaaacatacaaaataatcgccgaacacgcccagcttgcttgtatgtaacgattcgctataatactggggcaaaacaaatatagtattccctcgaagtctcttcacttaatgttgccccacgttttattatacccgccacctcttattaacccgttacctctacagcaatagttacagttcccagtatatacacacaatcttgttgtcgcacctataatctctttagattttcccttcttaatgccttctgatccatctgcccccggggtacaattcaaccccttcgcgatatacacacatgtaaaaatcgcagacccggtgtgtcgcccatcctggctgtcctctagaacgacagtctttttttccaaaactgtgatctatagtagttacacgtatccattttcacaaggacgtcttcgattaataatctacccccgtaaaggaaccccccttgcttaccctgtagtccctgagccagaataaccagtgcattctttaccataagggccgaataggcgcactaaataatatactgattacacttccccggagtattacaaaatttgtgggggagaaaactttggtatcccccagcgaccacacccgaggttttttttaaagattaaaatatgagtaatcattttgacatccacccagaagaggaacatctaatctcatatataatcaataatcattagtaggggagtccccatcaccaccccggtcttgcatcactggccctgataagtagtaggaacctcaagatcgttgtgaattcctatttttcctatttggctctcgtttaaaaaattttattctccaaacattttttcagtattcccagggaacaaaaca

SEQ ID NO: 587474 - DNA, 809 bp, Homo sapiens
tactggtcagggtaacactactgattacggggtggccgctctccgacttactcttggttttctctccagacattgtagaatggcagtggtcaagaacagtggctcccagacttacattactggtttaacgtgtatattcctggggcattccccacggggccagtggacaccgggcacacgcggattgaagaagggcataatacctcctggttggagttgtttattcacacatctatcttatttgaagaaaaagactgagtgtatagaatctttggtccttaaagctgaacttttcaagaaagtattatcgaaaccttcttaccttggacctgggtatatgaaaacttactgtttgggcggttcctaatgactgcggtaagctggggttcccgggaataacacacgaattactgggtcataaggcgggtgggtccttggtgcctttcatacgaagctaactattttccaaatagagagtgatactggggtaacttctggtatattccaagaaactgtgtaaatctttgtactcccgtccagggagaactccttctatgggttacgtggattcaaaacgctgaatggtatattattaattaaaacaaggtatcattgaccttcatggtattggcaatcttcggttggcgcattgccggtgtgacgtaagaacccaaatcggagaaattcagtatgcagggatctcaggttcctaagtaacccatagtattaacacctttagaatgtgcattaccgcaggttcttggtacaaacgtgcggtgtggcaccactagtgcagcgaaatttttttg

SEQ ID NO: 587475 - DNA, 244 bp, Homo sapiens
aacgtaggcaaagtatggtaaaaatatggtatagaaaattaaataaaaagatatacctgtatagggcacttcatgagtagagcttacagcactggaatttgctctgagtgaatcagcaagtgagtggtgagtgaatgtgaaagcctaggacattactgtaccctactgtagattttataaacactgtacacttgggctacagtaaatttattaaaatttttctttaataattaaaaaaaaaaaa

SEQ ID NO: 587476 - DNA, 341 bp, Homo sapiens
  misc_feature (279)..(279): n is a, c, g, or t
  misc_feature (302)..(302): n is a, c, g, or t
aaatatgttttagggccaggtgcagtggctcatgctgtaatcccagcaacttgggaagctgaggcaggaagactgcttgaagccacgagtttgagatcagtctgcacaaaatggacctcgcctctacaaaaaatttaaaaattatccagacatggaggcaaatgcctgtaggcccagttacttggggagttagcctaccgtacatggggggaaaagttagccttgtttgcctggggaaataccaaggataatctggggcttgcacgtttcttaagggantttaatgggctctgtttgacttnggtcttttggggaattttgcatattacactttctgggta

SEQ ID NO: 587477 - DNA, 335 bp, Homo sapiens
ttataagggacaggacttgctcactcggagggctcaggctctacgagacaggcgtctagccgatagacctggaccgaataaagcccttccctctttacgttggtgtttgcggagttttgtctgcggctcgtcctgctacagatgaacagaagtactattaccctacatgcagacttgcggaacagacatacagaggttcagcaacaaaccttaataatacaactaaacaggtacagagctacaaacagaactagagcctttttatcttgccgctcattccattaaataatactgcggtatccaggcggctcgggcctgctttgaccactctacat

SEQ ID NO: 587478 - DNA, 130 bp, Homo sapiens
ccccgtgcagaatatacctcggggggctgcagctcatctggggggagctggactcagatgctcccgtaggtgcaaaagcaactatcctacatctctactcctcccggtgctttttgcggtattcctgaag

SEQ ID NO: 587479 - DNA, 907 bp, Homo sapiens
cctgttttctccggacacctaagaagtcgtcctcctaggtactaacttaggctgagtacctacctgtcacacgtcactggcatagctgaaggaccaactgtgtagtccaggtgagagcatgctatcatggaagataaaagcatctacctcgtctaatagcgtaggtcgtcgcgcatagcagagatgtccttaaattatagagctgttgacaggagcacggaagctgatcatatttaattatcgttcttgcggataacgcatcacgtgtgatccgccgagcgcttggtgtatcatcaatcgccgatgaggctatcagtcagaaggcctgaacgcaggcacatacttcctattctacaccctaggtaggcgtcccttctccctactcatcggacgtaagttgtacacttcacaacatcctaggctcgactaaacattctactactcactctcactgcctcaagaagcgatcgaaacgtcctgagccggacaagctgtaatatgactagcttacacaatatgctttctatacgtaaaggatacctctttacggagctccagttatgactccctaaagcccatgtcgaaggccccagtcgctgggtcaatagtacttgccgcagtactcttagaactaggcggctatggtataatacgcctcacgctcattctcaaccgcctgacaaaacacatagcctaccccttccttgtactatccctatgaggcataattgtcacaagcttgatctgcctacgacgatgagcacgtaaatcgctcattgcgttgctcttcaatcaggccgcgtaagccctcgtagtaacaaggcattttcattccaatccccggaaggttcacgagggaacaatctcataatcgaccaggggttaaatcctcagaaatctgcgaaac

SEQ ID NO: 587480 - DNA, 196 bp, Homo sapiens
gggcccgggcccccgggagggcccccaaaatttttttttgggggggggggggtttttttttttggggggggggaaaaaacccccccccccctttttttggtgttttttttttttccccccccttttttggggggaaaggggcccctttttttttttttcccccatttttcccttctaaaaagggggggggggggga

SEQ ID NO: 587481 - DNA, 336 bp, Homo sapiens
agtcgggcagggggtgtggatgtgggactggtctggggcagtcagatgggtgacctctgcctgcggggaagggagtcgcaggcggcgtcatggcggtgtcggagagccagctcaagacaatggtgtgcaagtccaaatacagagacctaactgtacgtgaaattgtcaaggttatgactctatacaaagatctcaaatctgttcgggattcgatatgttttgaacgatggcagttccagggcactaatgaacctcactggaacgatccctgtgccttatcgaggtaatagatacaatattccattatgcctatggttaggggacagatacccatat

SEQ ID NO: 587482 - DNA, 133 bp, Homo sapiens
tccctctaaacatatcccgtgagatgttgcaacaaacgaaaattttgaaggttatcaggaagaatttggtcaaaaattgcttagatctctttactgacctggcggaagataaagcctacaagaaattctatga

SEQ ID NO: 587483 - DNA, 117 bp, Homo sapiens
aactgcaaagcgaactcaaaaccggctcttgctcagcctatataccggcatcttcagcaaaccctgattgaaggctacaaagtaagcgccagttaccccacgttaagacgttcaggt

SEQ ID NO: 587484 - DNA, 502 bp, Homo sapiens
ttgaactgtgctttaaaaaaaatcttatctgcatgtattgttaacttagagaccatgagatctatttatcaggaccaggaagatacacacttcaggtccattgcaactgacttttttcttgtttttctcaaaccctggtggagcctgggaagggggcctccacaattctgtggctttgatattagccccaattctcacaagcacatacaagccccataattgccgcaggaaaacacaagatggaaaattgcaataacccatgcactgagacttagaaaatcatccttactaggtaaaatgtattatgatgcaataagtgccaactggtatttctcacgttgggactggccaggaactgctgcaaagaaaaataagcagctccttctccattatttacattttaagatgtggtggggggaggttgggagaaattagttctgaggttatcatatgccttttttaaaagataatggaataaagctatttttaagtaaaaaaaaaa

SEQ ID NO: 587485 - DNA, 184 bp, Homo sapiens
tgtagactccagttagctgtgtgttcaggagcaggaatatagagagcccctactcctgttcatttgaggccattctttcagaaatctgtgctttcatacactgaagattcgatgattgctgacttctgtggaaccctcgtttggcttcatgctaccgtagatctgacttttaaagagtcatttt

SEQ ID NO: 587486 - DNA, 219 bp, Homo sapiens
  misc_feature (64)..(64): n is a, c, g, or t
  misc_feature (66)..(66): n is a, c, g, or t
ctctagtaggatcccctccaggtacaacagctcacccatcgctttccgtcggggccgggagatnanagtagtcacttatgagctgttgtaactgggaggaggatgaccgtgcttgaggaggaagaatgggttcaagaatggactgcattaatctcaatgaaaccatgcaggagatgttttgtttcaagttcactgcatccagccagctgttgtaactgg

SEQ ID NO: 587487 - DNA, 965 bp, Homo sapiens
cgctggttagtaattgcgccaataaataactttctttgtggcagttagaattactaatatttggtacaaaatatggtttacgacacctacgcgccccttatttcatgtaaggcccctgtctatgcggcggccctcttattctgttccttaatagtgcggtttcaaaaaaaaaacattgctggggtagaatacgccccgataaaatccgcttttccgccgtcaggagcgcccccccactaataaatattttcggctctttccacaataagaagaagtgcttaaatcttcctacagtcacgcggtgtgaacaacaacggttctaaatattatgttaggtgcccactcacgcactagagtgatgtatgacacccacggtgttctttctgcccagcgctccttgtcaggtcccacatagtctgttcctgggtgaagtagtcatttcttttttcttaacaagcccgccgccacacaaaattgctgggcaaacaacagagataaaagggtggagaacacacggcttgatctttaagtttggagtcctaccctcgaaaccccgccccttgttagaatgcggggtgtacatacaaaggaaatatatatatttgtacagggaaagaaaaaagtacagacatatgggatccatctggatgcgtggaagtgcccacacaccgcgcgagattcttgtcttttggtcatttcagagagatattcgtgtgaatcaccatataaaggtcagagtataaacacaggcccacgcctgacatatattgtggggcgcacactgtcgaacactgccagcggttacacgcacaacatttatgagcgtgcccgacggggacatgcaacacacctttatgtgggggcttaatcaaatggacgtggattgtcatctgtacgggtttttagttatggagacaccacctgtctaaaaaaaaacaatagaaacatttctcccaaaaaaaaca

SEQ ID NO: 587488 - DNA, 387 bp, Homo sapiens
cggcttcatcgttcagtccgtggctactgtcttgatattcatgtctggaagatgaagatctggcatttaactctcgaaattactattccatagttcagcccgagagcttttcaatatcttctatactatcaattgagttcctgaccagtttctccttgaatggtcacattttccctcattagcaccagactgtacagcaagatttgctttttgaggaactagctgatctaggtcttccaccaatgacttctggtcttgttattccaaaagaagcttatctccgagtgcgaatgtcctgcaatgggtacagcctgcatgtactcacacatgtcttccacgattcgtctactggatctgtctgtacttggttatgaaattcattatcct

SEQ ID NO: 587489 - DNA, 334 bp, Homo sapiens
agcggctgcgctgggtatgcggtcccagagggtaggtcatccgcgtttacccagcatttactcagtgttaggctttcctctcgcaggcactctcagctctaaactgactcaggtctcacaacccaccaagataagtcttcgtcatgttctcatttatggacaaactaaccagagcacagaaaagttaagcaatctgtccaaagtcacatagctagtaggtgatgaagcaagatttgaaccaggaacttgaggtccagagtccacaggtttcaacattatgtttttaccgcctcagagaaataaggctttatgagaggctgtggacattgcaggg

SEQ ID NO: 587490 - DNA, 183 bp, Homo sapiens
actgtgtggccgtcgctgcagactgtctgcttcgtcgatccaggcccccagtgtgaccgctgtcttccagatcatctttcccatggatcaccggctgttccttggtctggctcgtgctcgccactgccgtccagcctgttgcccagcgcctcaagttccggctgaacctttatgagcttgaag

SEQ ID NO: 587491 - DNA, 166 bp, Homo sapiens
gtgtggtggctcacacctgtatcccagcactttgggagaccgagatgggggggattacgtgaggttgggaattcaagaccagccgtggccaacatggtgaaagcccatctctaccaataataatactcttaccttctcttttctaattccatttattcttcaattt

SEQ ID NO: 587492 - DNA, 153 bp, Homo sapiens
agtcatacgtcgggtttattctcttctattctattctgttctgtttgttctattctattgtattctcttctattctattctattatattctgttctattctgttctattctgttctattctcttctgttctgttgttctgttttattctattc

SEQ ID NO: 587493 - DNA, 876 bp, Homo sapiens
  misc_feature (225)..(225): n is a, c, g, or t
tctcacggacacagttcttctccccttgggtttcctcgaacatgtggtggccacactctccacgctatatataatagggtatattttttaaagaaacgcaccgagtggggacccacagagatatagttgtttttataagactttgggggagagtttctttcctcgaattcttgggggtcctctctctttataggggggcccacagcacaccacagagaaaggtcnctatgccgttttttctcgggagagcccacacccctggtctccccacccctgggtgagccacaggtcaccttcttgtgggcacaagcaaatctaactggggagaagggcaacatatatcctgcgaggagcccttgtccttcccgtatggtgagcctggtgatagatcacagttggggcaccatttttttatgggaatgatcacagggcccttccagggtggaacacatagtcgttcccacagctctttgtctagataggcacagcacggaaggcgctcttccctctacgagccaagctatccacaaagtgtcccacagggatgccactccacccaacattggtccctcttcacagtacctgcaacgcacgtggtgccccacggctttcttcctaaggaattcccacagtggcacatttaatcacagtggccacagctaacctgcccaggccccgggcttggggcacaccgttttcggccactgaggcccggccgccttccgcacccctaccccgctggcagcagcatacctttgcaattttggaaagtgtgtgcatccatgaagtttgtatatttgaggcctttaaaatctattttcgttaacgagggccaatgaagaatgaatattgattctttaaaaaaggaaagaagac

SEQ ID NO: 587494 - DNA, 286 bp, Homo sapiens
  misc_feature (157)..(157): n is a, c, g, or t
  misc_feature (222)..(222): n is a, c, g, or t
  misc_feature (225)..(225): n is a, c, g, or t
  misc_feature (277)..(277): n is a, c, g, or t
ttagttcctttggagccctccattgtctgagtctgcagtgatctgtaggaaggcagctggtcaataatcatgtagacaatggcttggaattgtaaccctatggttattgattgcctgtgttggttcaggcatacttaggtatgtcctggggaaaaanaaaaccatcagcttagagttgctaccatgtctttgggtagaaataatggtcatttttggcctggntgnaataagctctaaaaggtctggtgactgaattgaacatgagtccgcatgctgnttcttcggt

SEQ ID NO: 587495 - DNA, 182 bp, Homo sapiens
ggttcccgaggcgcggcgggcgcggctgggggcggcgtgaggggggcgcaggaccccaacgtgggggtcccgggagccagagtggccaattcctgtcccccgcagcagcatggcatcgtgtgctgaaccctctgagccgctcgtgccccactgcccgccggggtcccagccgcgtcgaggac

SEQ ID NO: 587496 - DNA, 584 bp, Homo sapiens
tggggcctccttgtcctggatttccagctctccccatgccccctccctgagcaccaccggcaccgcctcccaaacagggctgctggtttccgcagccactgctccacctcccccaaatcgtcatggaaagggtggagaatggaggggaaccaggcgtccttggaggcagcttgggagggtgactgtgtagtgtcacccacaagggaggctagggcaatggagcaggccaccagcagcaactgggcagcatggaactcaggccaggctccgaggctgggggaactgcttggagttttctgccccccaccccaaacttctgtcgaggagcaaggcttgccagcaaggcaaaaggatttgaaccgaacagccaaactttccagcccctccctaccgacccttggctggaaacgcaacaacccgggtcccccaaggcctctgggttgggggaataaagcataattcgctggggaaaaagtcaacgtttagccaccttggagccccctaaccagggcccggtgggttaaccccaaccccttttctggcgggccaaaggattggtttctgaagaaaggccacccttccat

SEQ ID NO: 587497 - DNA, 227 bp, Homo sapiens
cgatatggtggtgtcggggactagagggagtggggaatagggagtatgtttaatgggtacaggatatagtttgcaagatgaagagtttggagatggttgtacaacaatatgtgttgttgtgttgtgttggagacagggtctcattccgttgccgaggctggagtgcagtggtgtgatgatcacagctcactgcaacctcaaactcctgggctcaagcaatcctccca

SEQ ID NO: 587498 - DNA, 402 bp, Homo sapiens
tctagaggacctggcgatgtccgtgcatgtctccaaggaagtccaaggttgctttggacattaaatccccaaatcaggagaaccataactgcccaggctggtggcatatactttggttaccgtgatgccaccacacacggtcacgactggtcaaaatactggctttccaatccttaaataaaaaagaacttccacaccagctataaaaatgttgccacaaaaagccaaactttccttctaagaaatattaactggatttggactataaactaaactccagatttggtaaaggttacaggaattggtaccataaataattatatttgggtccataagtaacattctataaatcttgaagacctagctcacaggcatcttggaacatggcacgcgacatcgcca

SEQ ID NO: 587499 - DNA, 295 bp, Homo sapiens
tagaggatcccctcctagcctcggtagttgcatggtgtatctataccagccagactggctgttgctgcttaaagacccagtgtcctggttttatgcttgagtgtgggctgttcccctttgtggtgcaccagaccagaatgtgcatggctgttcccgtgattgatgagaactgttagaatgagaaggaatgagccagtgatttctccactggcgatggctagtgacacttggctgatgtgctatgaacaaagtgggctttcacgaaattaagcctatagagaatgagcttgcttgt

SEQ ID NO: 587500 - DNA, 973 bp, Homo sapiens
attactatggtggtgatttgtgagcataggaatggtttcccttttctagagcattcagtcttcagtgtttttagatgtcacgatgacctcagcttgactaagttattcataggtatatttgacttttgtctggtcgcttgtttcttgggctttggaagacaattttaaaaattattttatcaccattttcattatataaatggctacttggtttttctagactgactttattgtactacttggtgaagtaatgattggatgtaagagtcttggtgcggcacttgggtcttttaagactatgaacataggagcagtcaagagcactggctcttttcctagaggactgaggcttgattcccagcacctgtgtggcacctcacacctgtaactccagttccaaggaatccaacaccctcctctgatctctgggcatcagacatgcgcatggtgcacagatagacaggcaggtaaaacacccttaccaggtaataataataattttaataagatgatcatattatctataaatagagatttggcttcattttgcttccatttttctttcctccatgctcagggttgaaccaagggagcttgtatgtggtaggcaagaggtgtaccactgaactgcagcgccaaatggatctctttcctttctcttttaatgtctagcttaggtgccgagaatgtgtcccgcgggttcaagaacgtgtgtgactgtcttcctgtgtaactccctgaaagtttgagaagacgcgttaagtcccaaagggcataacctgggcccagttgcgggtggaacatttcttcacggggggttttccctccaaatcggaatataccgggagaaagctgaggcctcctatatgggggcacggaccggattactttacaaggtattgggagctattacaaaccccaataggaaaggccgcgaaataattacaggagatcgagacagagaaacaaaatg

SEQ ID NO: 587501 - DNA, 326 bp, Homo sapiens
agaggatcccttcactaagagcgccgtgtatgataggggcatagggcaagattcagcgtaggcggactacgaacgatggttctggacagatctgtctaagaggtctctgtcatttgataaacccctagagcttggccgagaaggacgagtttgagcacaagaggaaggagctggagcaggtgtgtaaccccatcatcagcggactgtaccagggtgccggtggtcccgggcctgggggcttcggggctcagggtcccaagggagggtctgggtcaggccctaccattgaggaggtggattaggggcctttgttctttagtatgttt

SEQ ID NO: 587502 - DNA, 158 bp, Homo sapiens
tccccccccccccctttgggggttggccctttttttcccggggggcccccccctttggggggcccccgggttttttttcccccccccccccccccccccttgggtttttttttttttttttggggggggggagaataaaaaaaggggttttttttcca

SEQ ID NO: 587503 - DNA, 327 bp, Homo sapiens
gatcttgccgtcctcgaaacgcaccgcaatgttgtagatcagcgtgccctggtaggacagcggcttcgaactcacgacatggccatagacccgccgccaatgcggcgtggtgaagacctcttcggtcgggatgttggcgttgcagctgatgccgttcttggcggacgaggccccaccttcccactcgtggccgtccgcaagcccgatggtgaggtcggtgccgggacccgaatattgcagcgcgcgggaacgcaggccgttgagccagttggtgcgctcgcgcaagaccgcattgtggctcgcccaattcgaaatcgcatccccgcg

SEQ ID NO: 587504 - DNA, 535 bp, Homo sapiens
acgcgagtaggctgcggcacacttcaacgcattgaacaacacaatggactgggacacgatcaaaccgatacccagcaacgagtaacccacatgcaggaaaatcgccgaaccgacgcccaaggcccgtccatgtgccagcacggcggccgtgggtcacgctttcacgcaccaccacggcgaaatccgggccggggctcgccactgccaacaagtgaatcaaggctacggtcaaaaactcggcgacgtacgtgctcactccattaagtaactgattatttcatctgataggctcggcagattacgccttcgaacctcgtcgcaaaaggtacagttgatcatgaacaatcgccgcgccgtcttcctcgaccacccttccctggacttgggcgacctcgacctcagcggtttgcatggctgcttcagccagctgcagttgtttgaacagaccacgcccgagaatgtgctggagcgcttgcagggcgcccaagtcgccatcagcaacaaaatcccgctcacagcccaaaacctggcggcc

SEQ ID NO: 587505 - DNA, 302 bp, Homo sapiens
taaggttttcataatttatttatggaaaaatattccaaatctggtggattctctccagtcaaaagttcttggagacagaggccatcgggcctgggccaatcgggagaagggaatcatctggactcacccatcctacgaagggccccgcagatagcataagttttaaactgggccattaaacctggccggttgcacctggtcaacctcgggccacggttcatctgggatgggatcgcggtgggtccttgggcaccggatgatcgcagatggctagcgggagcatttccgggggacacgtacag

SEQ ID NO: 587506 - DNA, 376 bp, Homo sapiens
ccccaatctgcaggacaaagaaatggctgcccttttcaaaatgccctactttccccaacaacaaaaatcacaaattgtatttaaaaaaacaaggccgggtgccgggtggtcacgccctgtaatccccagcactttgggaggctgaggcaggtggatcacgaggcccaggagatcaagaccaccctggctaacacggtgaaacccttctctactacaaatacaaaatattagccgggcgtggtggcggacttctgtagtcccagctactctggaggctgaggcaggagaatggcatgaacccgggaggtggagcttgcagtgagccgagatagcgccactgcagtctggcctgggcaaaagagtcaaaaaacgtctc

SEQ ID NO: 587507 - DNA, 187 bp, Homo sapiens
tcttggatgcggatgtgcgtctccaccctttatcttgatacatttgagggaccgtttgtacttggagatcttcagtcaactccatgtgcgcgccgctcgtagggggcaaaggcacacagctcccgtaatcatgtcccgatacgcaacttggtgtgtcatggtacagaccgcccgcggcgtcccgctg

SEQ ID NO: 587508 - DNA, 403 bp, Homo sapiens
tcggcagcgtcgttgagttgactcaccgtccttcagatagaagtgtcgtgacttgtataactctgccgggataacactgagctgctgaatagcaaggcaagcatcatgataaggtgagttatcttgattcttctggtctaggcataagagatctgcttccactcttttacaccttctgtggcatagcaacctcttgaggtaccctcatgtatgtcattggcattgaaatcatgtctccagaatgtcaggttcataacacctgtgacgtccagagtcgccatccttcacccctaggttactatgtgatttctcatggtcactgcttagaagtctgtctgtgtctgattcctcagtcttttcatctggctcatcaatatctagctcaataaattcaacccaagag

SEQ ID NO: 587509 - DNA, 393 bp, Homo sapiens
cagggggcccccccggtttcccccttggaaagggggcgggggggccccccccattaattggggttggccccccctttgggcccccccgggtttccccttttgggtcccgggtcgttttttggggggaattgggggggggaacccttttccccccgggccccggtttgcccggttttcgatttttaaacccccccccaagggggattggccccccgggccccaaaattgggcgcgggggcggttcccccccccggggggggggggggaaggggtttttgggggcggggacccaggggttctttccaaaggaaaccccgggggttgggccccccaggattcttttttttttaaatttttgtcccaaaaaccggggaaaaaaaaaagtttttccca

SEQ ID NO: 587510 - DNA, 1120 bp, Homo sapiens
gcagttactgagaactcatatgacgaagctaataatcgcctcttcggatccactagtctaaccgcccgtgattcactattcctgtaaaaacacgcccagaggaaatgagagcgccagtgtgtcttactacagaataatagtgcacgctagtctttctggtctagcagttgtccgtgtgtgttacgtcgccatgttctaccatttcctgacatcctgatggttgcacggattaggccacattagagtcgcatctgactgaacgaagtgataggaagcactcgaattctttctcacccattccgaggatgtcacccacattatctttcagttgcgttggtgacttgcctgtcttgctctacatggcgatatcccacttcctcttaaggtgtacctagaggtagagacggcactggtctgggtcccaccataaggaacgtctaacgcttacgagggagtttccgacctttattcttagtttgatcaggcattaacacttacgattaattaatatcaagcgcgattcaatcacgttaaaatcgcgagcggagtgtttcctcattgctggctcgagaaggcaaagccaaaccaccacgaggaagatgctcccaaagtggctcaggaataactccttggcttctatctgtatttctaactggaaacgatctatatcccagtactagattagtatagcgccaaaatgagtggccagtcgacatctctgagtgtcactcgcgagcatggccgctggcacgtctctttcccttggggccaaacctggggccgcttaacattaaaacgcatatcggctgcgcacaaacgctcggactctgttagtctggcaagcccattactgtgggactcgccgagagcaaattgcacgacacgaacccgtttgtgatggcaccgtctctattctccccctttttgaaacggccaagttgacaccgcccgagaccattgtctattgggaagtcagacccggccatgttcactagcaaggggaaacgttcagttcagcgttgtgcccagcgccttacttcgtcaccccgtgggacctctcttacgcccgattgccccctctaaattccaccctatatgcacgggcttagcgatccagttc

SEQ ID NO: 587511 - DNA, 530 bp, Homo sapiens
gggcaacagagtaagactctgtctcaaaaatgaatgactgaatgaatgagcgaatgaatgtactatgagctgatacgtggatacaggtaccgcagttttgtgctgaatgatatgtctggggtaaatcagtttttttcttatagaattcggcgttgtgctgcaattgcaatatttttgcatttaaaagacacaaagagaggaatgtattttccaaaggagtgaatgaggttaaaatcaagatttgtgaatggtataattatgcaactaaatccagtggtagggatatcatcacaatttttaatggctaaatatgtttctttcatactgttgcagtgcttacatgttccaaacaagccttttccaaggaaaaacttttccatatttggtggtcatttggtaaagtatccttaactacttgtcacaaattaatttggcgattattccaacttttacattgtatgtctgaatttcatcgatgttgtaccttggctcagtcaatagttgtcacaggtatcaagccatttggcact

SEQ ID NO: 587512 - DNA, 204 bp, Homo sapiens
tggcatccatgggaaagtccatggcttaaaaagtcttaaacctacggatttaacagtatgggaaataaccctacttaggacatggtaaattataggtaaggttcttcctcgggttaccggaacgggtgttatgggatgcccaggtttatagagggtccaaaatacaaaatatgattcaccgggtgtgtagacctcaaaagaaat

SEQ ID NO: 587513 - DNA, 165 bp, Homo sapiens
atctcagcctgctcacagtggcatggggtgtcggggtaaggctgtccagctacttcgtctctgcaggaccctaagccctgcccgcagccacatgcctctgtgatgagtggcgtctttcctgcctctgatgatggactcaataaacagcactggacaaggctgctg

SEQ ID NO: 587514 - DNA, 393 bp, Homo sapiens
  misc_feature (270)..(271): n is a, c, g, or t
gttgtacttagaaaggacaacaaatttttgggggtcacttgggggggggttccaaggtggttttttatgggggtttttagttttaggggcattttgggggggttttaaaagggttcttccgggtcttcctaaaggtattttttgttgaagaaggggggcttttgggggattaccatgggggggggagggtaggggttttttagctattcttttttttcaaaggtttttagggaggggggggtccggaatttttttgtgagggggaatttnnttggcccccccccccccccggcccttgggcggggcccctttttggggaacccattttcatttgttgttgattcttttttttttttaataggattttccctccaaataaaacatggttggtta

SEQ ID NO: 587515 - DNA, 736 bp, Homo sapiens
gcttcctcctgcgaatggaccgcgcccacgaggccaagatccgactactacacctacctgatcatgaacaagggcaggctgttgaaggcgggatgccaggtgcgagagcccggccaggacctggtggtgctgtccctctgtccatcaccaccgacttctatccctttccttccggctgtgtggcgtactacacgctgatcggtgccagcggccatgagaggacggtgagtaggccgacgtcccgtagctgtgagtgagacagtctaaaggacatccatgccgtggtgcttctgcttggtggtaaaaaggcggccaagtcagaagaccggcagcctgtacctgggcagcagatgaccctgaagatagagggtgaccacggggcccgggtggtactggtggccgtggacaagggcgtgttcgtgctgaatacagaagaacaaagctgacgcagcagtaacgatcctgggaccgtggttggacgaacggcagacatcggctgcaccccgggcagtgggaaggattacgccggtgtcttctccgacgcagggctgaccttcacgaagcagccgttggccagcagaccagccagagggcagaacttcagtgcccgcagccagcctgccgccgaacgccgttccgtgcagctcacgggagaagcgaatggaccaaagtcgggcaagtaaccccaaggaagctgcgcaaagtgctgcgaaggacggcatgcgggagaacccca

SEQ ID NO: 587516 - DNA, 1243 bp, Homo sapiens
  misc_feature (38)..(38): n is a, c, g, or t
  misc_feature (1241)..(1241): n is a, c, g, or t
  misc_feature (1243)..(1243): n is a, c, g, or t
cggccccccatggacgcccccagacacggggtcgctgnagaccaccgcgctgtcgcatgcccagtcccggtccggcgcgccacgccgagggatctctggacaggacaagactccgaagctactcccccagcacacagcccgggacccacaaacccagcttgcagctgggtacgcgtaaggcagggccccgtcgagcggactaatcgtacagcaggacgccgactatatacagagaataagagagagaaatacaaaacgtaactccagagagtattataaaaagaactagcacgatgactaactaagaacaaacatagtaaaaaacacaatactaatgcatatgagacacagacaggatctgataccacaaagagacacaacaaccacacacaaaacaccatgaacaactagacaacaagaaacacaaacaacacaaaccagcgcaagccaaaaacagaacaagcaaacagcaccacaccgacaaacacccacgagagacagagaagagcacacaacaacacgaacagaaaacaccacccacgacacgaaagaaagaaagagaggcacgagcaaccaaaccaaccacgaaaaacagaacacaacaccaagaaagacaaagacaccacaaaggtagcgaaacaagaccacgacaaaaacagaaacgagacgacacacaagacgacaaacgaacaggagacagaaagacaacacaaaacgcacacgcagacaagaaagggagacagcaaggagaccgaacgcacgaacaaagcaagcagaggggacgagagcaagaagagacgcgaagcagaagaagagcagaaaaaagaaaggagagaacggagtgaagacgaggaagaaggacaccgacagaagagcaggacaagagagacgagaaacagagacagagagcacaccgagcacgagacgaccagagcagcacagaccgagacaacagcaaagcacagacacgacacaaagcagaaggaggaaaccaacacaaacaccagaggaacagcagaacaacacgagacaaacagaggcaacagaaccgacgaaacaagactacgtacagaagacacgaaaataggcagaaaaaagacagaagaacaagacaaacggcaacgaaaataccaagcagaacgagaaagaagaggagcaacaaaagaaaaacaggagaaaacgacagacacaaatgaagcagataaaaatagtttctctcttctgcttgcgtcctcacacgnan

SEQ ID NO: 587517 - DNA, 344 bp, Homo sapiens
  misc_feature (3)..(3): n is a, c, g, or t
  misc_feature (15)..(15): n is a, c, g, or t
  misc_feature (37)..(37): n is a, c, g, or t
  misc_feature (229)..(229): n is a, c, g, or t
  misc_feature (270)..(270): n is a, c, g, or t
  misc_feature (273)..(273): n is a, c, g, or t
  misc_feature (298)..(298): n is a, c, g, or t
  misc_feature (306)..(306): n is a, c, g, or t
  misc_feature (315)..(315): n is a, c, g, or t
  misc_feature (320)..(320): n is a, c, g, or t
aancctacctgtccncctgtcctttgcctaccctccngcgtcctttccttcacagaaaagtatggggaatgaaagtgtccatatggaagacaaaaaaaaaaaaacattgtctaggaatcagtagggacaaaagaacaggtgaaactgaagtgtatggagagatttagggagtacagagtgacagcattggacttaggacacagactgcagccagactgtctgggttggnataccaccttagcctttttttacctgtgtggtcttgggcanaantactccctctctgcgttagtttctntatttgtnaaatggttntaatnaaaatagtgcctatcgaaaaaaaa

SEQ ID NO: 587518 - DNA, 119 bp, Homo sapiens
tggcggcagacgcacaagtagtctgacatacgactcctcgctcagaagtcttcaaatactcctcctacggaaaaagtcaaactttttagccgggcctaatttaaagctcttactgacgt

SEQ ID NO: 587519 - DNA, 232 bp, Homo sapiens
gggatatggatatgggtggatggacagatgttttgatgaatacagctgaatgatgggtggatggacagatgtttggatgggtggatggatggatggtgggtagatgagtggataggtggatgaataatgggtggatagacagatgttttgatgggcgaacagatggatgatgggtagatggatgatgagtgggaggacagcttgactgatggctcggaggttgtgaacgagt

SEQ ID NO: 587520 - DNA, 277 bp, Homo sapiens
atccccctagctacttgggaaagctgagatgggaagatcgcttgagccaggagtttgaggctgcagtgagctgtgatggcaccactgcactctagcctgggtgacagagcaaaaccctgtctctttaaaaaaaaaaaaggaaagaaagaaagaaagaggcctggggtgggggctcatgcttgtaatcccagcaacttggggaaggccgaagggtgggtggatcaacctaaggcacgaggaagttcaagttccagcccgtgggcaaaacataggtgga

SEQ ID NO: 587521 - DNA, 725 bp, Homo sapiens
  misc_feature (711)..(712): n is a, c, g, or t
  misc_feature (715)..(715): n is a, c, g, or t
aaaagaaaaaaagtggggagatatatttttaccattaggggggggggggtggtccccttcccccggggttttctttttttataaaggggggggggggcccccgcccccaacaaaaaaaaaaaaaggcggggttgaatttgggggggtttttttaaaccaaacctttttagggggggggaaaggccaccccccccttctttttgtgccggttttgtggggggaaaaaaaaaaaaaacccgcccccaaaaaaaagacccgcccaaaaaaaaaaaaaaagcgggccccccaaatattacttctccaaaaatttttttttttgtgggggagaaaagtggggttttttttaacaaggggggggataataaaaagaaaagtcccggcccccccccctttttagaggagaaaaaaaatttttttttcccccccaaaatataaaaaaaacacccccccccttataaaaagggaaaaattgccccccccccgggggggcgcccaaaaaaggtgggtgtaaaaacccccccccccccaaaagtgttgggaaaaaaaaaaaaaacatttgccaaaaaatttttgggccataccccccctaagggaaaaaaacctttgcccactggaaaggttccccaaaattttctttccccccaagtttttgtgaaacagaaacctaattttcccaagtagttatttttaggtgatatccccaataaatanntanatcatatgtc

SEQ ID NO: 587522 - DNA, 663 bp, Homo sapiens
gagaacttgttcgagtttttttttttagcccagatggtgtgtctctatagggactggaccacaccagtcaggaagactcatatcagagtttgattgcgtatttctccatctacccacccccgactcatccatcatcctctctccctctctcctccctccagttcatgggaagttagcatgagcattctgccagcagactatggagaacagcgcaggggggtgaaaatgaagagacagttaagagagcaatacacggggctaagaggccaagctgatctgctgggccttacacctgggtgtatcagtggaagtgtgatgtggacagagcacctgagcttctctccagcttaggagcagtcccgcgttgcgggaaagggagggggttgttttttgtggcttttgcttgctcccaaccccatcttggaacaagtgcctatcgtgtgtgctgtgtgatcctctaaggcctgcctatcttccgggtggaggatttctgtaacttttggaagtaccatcgctaggcaactggtggtttcttgctttcataaatgaagcccctcggtcatctcggccctctttcgtaatgaacaggtggggcgccggttttgtgggcattaacccacaccctcggccacgccagcggtccctggtcgttctgtctccccc

SEQ ID NO: 587523 - DNA, 999 bp, Homo sapiens
ggtgaacatgcggcgccgttgtgggggcccgggcagagctctgctgcgggcgggcgctggacggctgcttcggggaggcgtccaggagctactgcgtgccgcgacatgaatgggaacagcccctgacctggcctgcaacttcagcctttctcaaaatcggggcacgggggggcgtggagcgctggtggaaggtaccggctggccggggcagggccggcaagccgcgcctgcaccggcgacatcgacgtctataaggctggtggaggacacgaaagcatcggcccaaaagaaaacctggagctcatactgacgcagtcgcgtggagaagtgcttggagatcacggggctgaccctggtctcaggtgaagaaacatctttaacgcccgagaatcgacgtcacttcctcaagggacatggggctaggttcatattcgcattccccgcgttgaacaaccagaggagaggcttggttttgcacacgatgcgtcagccccacttcggcgtgagggagccaaggaacagggagaagactttagaagacggactcacagaacctaaggggacagagatcgcaggccggcagaagtggcaggcttccttagcgaagcgtgcgtcgatcgcccatgggaactagctacgcggcaatggaacagaaagcacaagtggaaccaaatgatgggggaatgccttggaaaagccacgtgaagacgtacggtcagccacgagggccacgcgactcaatgtaagagacaacgtcaataagggagaggaatggcagagtaatgaccaccaagcaataaagcacaatacacagggcatacgcagagaacagagagccatatatcaccaaacgagcgagacgggaagacactaataggggtgacagcagagctgaaacggggaccacagcggagccgatagaaacatagagaacaaagcggcaaaacaacgagatgaagagggagcaacggaagcagagcgccagagacgcgcaacaaa

SEQ ID NO: 587524 - DNA, 180 bp, Homo sapiens
tttttaaaaagggggggtttttttgggccccccaggaaccccccctttttaaaaccaaccccgggctttaaatgttgggccccttttaaaaaaccccttaagggttttgggggttttaaaatgggttaaccccccggacttaaaaccccttttttttccccccgaacccaaaatccggga

SEQ ID NO: 587525 - DNA, 156 bp, Homo sapiens
agtgctccgcctagaaggcggtttttttaaagagagaagatgacttttacacataacttgactgtttttttaaaatgtacgaaaagtaaacaaatatatcaggtcataaataataagactcatttaagtccatcaatctttcccagctggctccga

SEQ ID NO: 587526 - DNA, 400 bp, Homo sapiens
tttggcacaattggactgtgaagagacatgagaaggaatctttgatgatgtgaaaggaaaccggttgctcaactgtggtagacgcagcactacaagcagcacggacgcctcagctcaaactgcttggacaacaggagggaaggaggcccctggagaggagacagacaccgaggacagaactgtctggcccaacttctacaatgaagaaacctcttcacttctataaaaaagaggaagccatctaaggatcaaggagtaagcttttgatttaaaaggtcaacctaagtactgccgactgcaggctagacagagctgcgttctctcggaatgtgggtggcagcccatttattccattgtgttctcctgctcctttttgtcactaaaaagggggatagacaca

SEQ ID NO: 587527 - DNA, 230 bp, Homo sapiens
gttaactagaggatcccaacgttggacccatctggactacggctggctccagtaggcgtgtagccggctgcggttgtgggcatgagctgtgtggcatggtgtgggtaggactggtgaacagtggcataacagggcttgggtgggtagtgctgctcgtgcagaaagtggtacttgcaggggtagcaggatgacactgatgtgcctggggaatgggaccaactgttgggtac

SEQ ID NO: 587528 - DNA, 1223 bp, Homo sapiens
  misc_feature (1)..(1): n is a, c, g, or t
  misc_feature (29)..(29): n is a, c, g, or t
  misc_feature (52)..(52): n is a, c, g, or t
  misc_feature (117)..(117): n is a, c, g, or t
  misc_feature (125)..(125): n is a, c, g, or t
  misc_feature (127)..(127): n is a, c, g, or t
  misc_feature (158)..(158): n is a, c, g, or t
  misc_feature (162)..(163): n is a, c, g, or t
  misc_feature (183)..(183): n is a, c, g, or t
  misc_feature (186)..(186): n is a, c, g, or t
  misc_feature (490)..(490): n is a, c, g, or t
  misc_feature (497)..(498): n is a, c, g, or t
  misc_feature (656)..(656): n is a, c, g, or t
  misc_feature (707)..(707): n is a, c, g, or t
  misc_feature (946)..(946): n is a, c, g, or t
naggaaatgagtgaaaaaatagagagagnaggggtgtgtgttatggttgggngggaggctgttgttttggggagtgtgtgtatggagggtaaattgtgagagtgtgagacccattgntttatgtntngattatggcggttatagtgatgccagttgtntggnntaatgatatagagtgaagtnggntgtcgaggttgtgagttgcggggtggtgcgggcctatagataattaatataatagtataaggggaaagagttcccaacaaagaagacagacaaacacatagatacagtgaagaaggagctgaataggaaggatatgggcggggttgtatacaccttttagggatatgtgttagtgcgcgtatatctcgaagtaattattgtttattactcagcgaaagggagggaatgggttttttcctatagtgtgttatttgactttaagtttttatgtttttttcttgtggtggggatgtgtgtgttggtnatggggnngtaaaaggtatatgaggaaaaagaaaggaaaaatatgtattttaatgataagtgggagtgcgtgaattcgaatatatagtagtagagggtgttagtgatgagaaattatgataaatgaattaatttatattaacataatctccaaactgacactatantatcatatagtggatcgggatgaatagtagtgtgatgggtgttagaggagngttgatggatgttttgttgttgtcgtgtagtcattaatcgtctctattgttcatttatgttaagcgtgcacgcccgactggagcaccgacgtacgatatatgtttatttgttatatgttatgatgaaagtattatgacgaaggtaaagaaggtgtaggaagaaatgtagtgggggagttaagtgagggttgagtataggttatggtccgtaattaattgtgtgtatgtcgttgttgtantagtgtttagtgcaatgaagcttgagtacgatgagcgtggtctatggatgctaagggtgtgtgtaggtatgcggtagtgttacgttcttatattatgctattgaagtactattgtgttatcagacctttataacatatgtagtagaatgattgtttcttatagttcatagatttgtaagagtgataatgtactttatacgcatagttggttgtcggtcgagcgtagtgggtcgatcatagggagctgtaaggtatgggtgtggtcgcgcgagaggtc

SEQ ID NO: 587529 - DNA, 853 bp, Homo sapiens
  misc_feature (1)..(1): n is a, c, g, or t
  misc_feature (3)..(3): n is a, c, g, or t
  misc_feature (24)..(24): n is a, c, g, or t
  misc_feature (29)..(30): n is a, c, g, or t
  misc_feature (231)..(231): n is a, c, g, or t
  misc_feature (233)..(233): n is a, c, g, or t
  misc_feature (240)..(240): n is a, c, g, or t
  misc_feature (257)..(257): n is a, c, g, or t
  misc_feature (285)..(285): n is a, c, g, or t
  misc_feature (308)..(308): n is a, c, g, or t
  misc_feature (488)..(488): n is a, c, g, or t
nanggattccactttccctatgantaccnnaacctgcgttacagtccagctgcgtgtatgaccgagaggttccagtggacgcttggtagccatttctatataagactacgatccttatccatgtcatgggatcttcagggcaggaaggtgtccgacaacgcccatgtggtagtctggtgtccgtcgtctcctttgtatacaaccagctatctcttctttgcctgtatcctngntggtagnctactggccatcttccntataccttctgcggtacgccgaattcanccaccgacaaacacgagcctcanctccattgacttgctgtggcttgaagaggtggtgcccatgatgggagtacaggtggggccgtgaggctggaccaggactagagaagcttgagcacccccgagttgctgctcattgaattcctccactttcttatatagcctcagatgctgtgatgtctgaccttgtggatatttgccctnggaatttctactttactttctaccgtaattccttctccgtacccaggtcttctctgagagaagctataatttaatctgtgaggaactaaactgacagggagaattgcgtgctaaataccgggggacccacaggcttggtccaagttgaagcaaggtttcgactcctttctgagaaggtccgggtgtcctagaaatctcaacctttcttcccttgctaagcatgaagttggcatttggccactggggcctgttgactcgaacatggggctctgtacaacgccgaaaatctgagggggcccttttttctggcaaatacttcttggagcccccttcggccgattcgtctcccttagatcgcgtgtttt

SEQ ID NO: 587530 - DNA, 131 bp, Homo sapiens
gatgcaggcgagtctgacacacaggaaacaagtgtttgcaaagcccaggggtgtgtttccctctgcgtacaagtgttatctgagtaactgtctagaaaataacccaccacccaatcccgaggggacccgac

SEQ ID NO: 587531 - DNA, 915 bp, Homo sapiens
  misc_feature (1)..(1): n is a, c, g, or t
  misc_feature (3)..(3): n is a, c, g, or t
  misc_feature (24)..(24): n is a, c, g, or t
  misc_feature (29)..(30): n is a, c, g, or t
  misc_feature (293)..(293): n is a, c, g, or t
  misc_feature (295)..(295): n is a, c, g, or t
  misc_feature (302)..(302): n is a, c, g, or t
  misc_feature (319)..(319): n is a, c, g, or t
  misc_feature (347)..(347): n is a, c, g, or t
  misc_feature (370)..(370): n is a, c, g, or t
  misc_feature (550)..(550): n is a, c, g, or t
nanggattccactttccctatgantaccnnaacctgcgttacagtccagctgcgtgtatgacgcagataagtgttctaggctgtgacctgcttgtggatgcgcatttatcgtgaatatagaagacacagcaattcgttgatcacatcgtcaacgggaattcctatgcagtgcgagggtaacgggtgtgcccgatcaacgcgccattgtgtacgactggagtgtacgctgtccatctccgcatttctgctatactacaccaatgttaatgctctgtctattggcctgtatcctngntggtagnctactggccatcttccntataccttctgcggtacgccgaattcanccaccgacaaacacgagcctcanctccattgacttgctgtggcttgaagaggtggtgcccatgatgggagtacaggtggggccgtgaggctggaccaggactagagaagcttgagcacccccgagttgctgctcattgaattcctccactttcttatatagcctcagatgctgtgatgtctgaccttgtggatatttgccctnggaatttctactttactttctaccgtaattccttctccgtacccaggtcttctctgagagaagctataatttaatctgtgaggaactaaactgacagggagaattgcgtgctaaataccgggggacccacaggcttggtccaagttgaagcaaggtttcgactcctttctgagaaggtccgggtgtcctagaaatctcaacctttcttcccttgctaagcatgaagttggcatttggccactggggcctgttgactcgaacatggggctctgtacaacgccgaaaatctgagggggcccttttttctggcaaatacttcttggagcccccttcggccgattcgtctcccttagatcgcgtgtttt

SEQ ID NO: 587532 - DNA, 128 bp, Homo sapiens
gcgactgcgttcttgggcataggagcgcaagcagctcagtcctggacttccaccactaaactgcgtagagaagctaaacgtgtttcttttcccttaaattatttttgtaatggtagctttttctacat

SEQ ID NO: 587533 - DNA, 270 bp, Homo sapiens
ggtagtcagaagcctatagtacaagatagctcacgtatttgaaggaacgtagttgcgcattttatgacatttttataaagtactgtaattcttccattgaggggctatgtgatggagacagactaactcattttgttatttgcattaaaattagttttagggtctctagttcaaactgacgttcggacgaatgcttgaacttgttggtctgtgtgaatgtgtatatatatatacctagaatacacggaatctatcggagaccatattcac

SEQ ID NO: 587534 - DNA, 271 bp, Homo sapiens
ctggaattacaggcgtgtgtcgcacgcccagttagtgttttgtatctttagtagagatggggtttcaccatgttggccaggctggtctcaaactcctgacctcgtgatccgcctacccgcctccaaagtgctggattacagcgtgaaccactgctcctggccgagctcaaagcttttatcaactggccatgagtctgcactgagtcttgagggggaggtgaaataaatagccatagaagtgcttttacaactactgtgttaagaggagagg

SEQ ID NO: 587535 - DNA, 928 bp, Homo sapiens
ggcttttttttttttccgcaaccggttttgccgccagaaacaacaggttgttcggtgaaaacttaccccttaaaagccaaaaggggacagggaaaagactcatattcaacattggtcgtcattgggacacgtagattcgggcaagttccaccattacgggccatcgtgatcatataaagtgcgggtggcattcgacaaagagaacctttgacaacacttggaagaaggaggctgctgagcatggcgaaaggggctccttcaagtatgcctggggtctgggataacactgaaagctgagcgtgaccgtggtatcaccatggatatctccttgtggacaattggagaccagcaagtcactatggtgactatcatggatgccccaggaacacagaagaactttatcaaaaactgtgattcacggggacatctcaggctgactgtgctgtcctgatggtgtgctgcatggtgtcggcgaatttgaaagcgggtatctccaagatggtggcagacccgagagcttgcccttcgggctttacacagtgggttggtgaacacaactaactggtcggtgttaaccaaaatgtggattccatgtgagcccagccctacagccaagaagagatactgagccgaaaatgggtcacagagaaagttccacgcacttaccatttacacgaacacatgggctacgaacccccggaacacaagataagcaattctgggtgccccactatacgggggtagcgacacttgcgtgcaaccacaattttgctggaagcccagatggggctaaaccaattgcccttgggatacaaaggcgccatgtggaaaagttccaccagcggattagagcgatgtaacaacgtggccatggtgtaaccacaacgatggattggaaaggtcttctgaactggactttactaacacg

SEQ ID NO: 587536 - DNA, 291 bp, Homo sapiens
gagaggatcacttgagcccaggaatttgagacctgcctgagcaacatagtaagatcctgtctcaacaacaaattttaaagttagctgggcatggtggttcatgcctgtattcccagctacttgggaggctgagacaggagaatcacttgaatgcaggagtcagaggctacagtgagctatgattgctctgcactccagcctgggcaacagagcgagaccctgtctcaaacaaacaaatatacacatggtgagatactacctatggattccagtttggctgactctcgattt

SEQ ID NO: 587537 - DNA, 1076 bp, Homo sapiens
  misc_feature (199)..(199): n is a, c, g, or t
agcgggctcacccagtgggcggcggatgggcggccggggcggccggtcctgagctgcggaccgggctgtcaggtggagaagccgaggcctggagaggggcactctgtgtgaagttgttagactgggggcctggagactctgagagacagacagtccttggattgctggcctggtgcaagtgggctgtgcccttctgagncgtccacgtgcacaactgcggactagacagtaatgtacctcttgctcctcagggttggaggccagggcttcaggaagggctgggctttgctggcggtggataggactacccatggaggcaggtgacttggggccagaatggcgaagcacacgcgcttacctcccaccccatgggcaccaatacagtcaggtgttgcctcgagtcgcgttgcctgcttagcttcgcatcgtaccgacggacattgggtgaccgtccgaggatccgcgtagcatggcgaccgtcattgcgttgcgtcaatccccgaagtgctgacgtactgtgccgtccatcttcccttgctctggagatgcttccaatcctgagacgtggcgaaagatccagcatcaccatccagcccccattttgttatcactcttctacatcctggatgtcttgtgggtggcgcttggtgggcattgcccggagccgtggtatccatgacggtgagcacctcggaaacgctgcaactgtggctgataagaatcctgtgggagatcacccgctttcttcctgcttggccatcgagctgagtggtgatcatcctggggcctggccttttggcaacctgggagacgtaagtccagcattcaaagcgggtgctgggcatcagcacatgtgctgtccctggcctactctgtcacccaaggggaaccctgggagaatccttgataccctgatgcccaatctctcaagctgaagtgactttaataatctattgggcgcttgggggccccgccaaattcttgacttggctcagagtcctgctttcttcttcactgggctaataccttggggagaaacccgtcccaagaaacccggtaatgagagcgctattccg

SEQ ID NO: 587538 - DNA, 995 bp, Homo sapiens
  misc_feature (220)..(220): n is a, c, g, or t
  misc_feature (266)..(266): n is a, c, g, or t
ttgtggtgtcttttctccctccaatgaaagtagagtgatagaggtgggcgaaagaggcagaggagagacaagacagcagaagattgccgacgctaccatcacttgtatgtttacggtcagattatcacacgacacggcagttggggcacagccagattgtgtgagacactccagactaagtgtcggagcttttgtgcactttgtaaatcgtcccgccgcnccgcgtgtatcgccggtgccgcccgcggagaagtttgtgagccctngccctcgtgttccacacgaggcctcgtcacaaaacaggcgaaccagcaatggggttgtagacctgcctaaatgtgacgccgtctgtttttctgcgcagcaaccaagccgaggtcgttgttgcttttctctcctctgccgccccctccttggttgtacgcctgggggcataacatccgtgcttcgcgcccggaatgttccagagtcttgttccccggcgggtatttgccccccttgttcggagcagccgattgcttcacagggtgcgaccgggttctctgcgattatacacggactccgggcttacgggctttcaaaatctcacgtcctgcccctctgtggtccggcgcctcaccgagtgtcgctcccccgttgctgttacgacctggtcttcctccccttccatgcggatgctccgcacctcgtttcagacagccgccagtgcgcacgagtttgcgacgacacgcagacaggtttcattctttctttttttgttgagcagggatttgaacccccccatcgttgttgcgccccgtctttttgatacccaagattcgctgccccagtgcttttgtgggatacccgcacgtccccgagcaccccctcgtgtgggttggcgacacccccgctttacgccccgggcggcgctgctgcccagtactgcagggggatccccgggtttttttctatcaaaacccaacaaaacatttttataaccaagcaacataaca

SEQ ID NO: 587539 - DNA, 273 bp, Homo sapiens
agtgactttttgaaaaattaaggctgagttcctttcggtcagctgacactccccttttcctgttctgggttaatcataaggagccccctgccatagcaaaggccaggtgagtgtcaactatctgcatctggctgagagaggacccgtttcctttcatggatgtgacagggtaaggcagcaagccatggttctcctaccgcgtgtggggtaacagactagaaggtaggctaagacctgacaccattcagatttcaattagagcaggttgagatc

SEQ ID NO: 587540 - DNA, 168 bp, Homo sapiens
cagcataaactattacagcataaactattacagcataaactattacagcataaactattacagcataaactattacagcataaactattacagcataaactattacagcataaactattcccccgagcaatctcaattacaatatatacaccaacaaacaatgttcaa

SEQ ID NO: 587541 - DNA, 110 bp, Homo sapiens
  misc_feature (20)..(21): n is a, c, g, or t
  misc_feature (25)..(29): n is a, c, g, or t
tatcattatttggggtttgnnaaannnnnttttacaccttctaatttctttatttctcaaagcagataattcttctgtgtgaaaatgttttctttttttaatttaaggtt

SEQ ID NO: 587542 - DNA, 1412 bp, Homo sapiens
ttcactcatgtgccctctttcggtggttagtgtcctgaagatttttataagggggcacactgttatatcgtgcttacaaatgagttcgttactttcttaagactcttgagcccgggtaccattttttccgttagaccccttatttccttttggaacgtgaaccccagacggcctcttctttaaaaccggggaattattggatctgagggaaaacaccagaattgttttcttcggcacaagttgatacccagaaattggagaatgagaattttttggggaaaaacccttgactgttgtaagattgaagtcgatctttttctttaaagaagaccagtttgagagggtgaccaattttgggcaggaatccacaagtgatttttggggagccattaaaaatgtattgccttgtttggttggaacccacataagagatataaaattaatgggtaaattgggaaatttaaactttccccgccccccactagtttatgcgcagtttggttaaaacacaaagacccggggggtgacgctcaaatttaatggtataagccccagtgtaaggtcctccacagtttatatattcgtgaagaaggtgaatttggtggaacactcaaaccacagattatagtcttttcggcccttgaagtgttggcgcaagccactgtgttagaagcttgcccgctcggttaaaaaataaaggggaatcttgtaagatatatccacgcccttgtttgaggccacaatggagactcttgagaattctaaggtttttcacacggtgaatccacgaagccaccgccacgctatatattgtgaaggtgttatatgagatatggagaattgagatgagatcccccctcgtgggcttaataaagtggtatctcgagaacgcgcaccccactatgtgtaccaccgagaatatatatgtttagacatacacacaatatttgtcccaactctctcgatagagtttttctcccacgagagaggggggctatatgggagattatagttttgagacactcgtgcacaattccctctgacataactttctgttggaacacaccccctcgcgccactttgttctcgtgtctcttaatattaacacccacgggtggtttaaggtggtggagactcgtgcaccacacctgtatatagtgtttgcccacgtgaaaactagagagtgaccagagtatttgataattataatttgtatttcacccaccctataaatgtaaatgttgagttcctccaagaatgaaatgaaggcacctaccacttgaaatattgttttgtataaatttgtcactgttgaaccacgcacttttagccatggtaagttcccttagctatatgaattttggcatgtttcagagagatccagtaaatataaataattagatataaatata

SEQ ID NO: 587543 - DNA, 194 bp, Homo sapiens
agtcctgctgcttgcactcttgtcctcatctacctgtgggcacaatcttcagtgatgtcgtcgtgagagtgccagtgggttggcggtgcgtctgtcttgctcccccgagcagcattgaaagctccgtggatgttcttggcactgtagctgtgtccccaaaggagcagcttgtgagaatcacatgcgtcatgtct

SEQ ID NO: 587544 - DNA, 620 bp, Homo sapiens
  misc_feature (251)..(251): n is a, c, g, or t
gagcacctcaatttgcacgactggctggtggaagagtttttggtagcacgaagagtgctctcacatgctctaatttccggggctaagaagctacccctcgagtgtggtccccacccgcgatatgtagagaaaatcaccactgccggctcactttatagagaaatgaggttccaaagcttcgcccgctccacgcttttgatggggaccaaccgctttaatttttggaagtttcgaaaggggggctctgtgtnggtgtggtgtgtgtggtgtgcgcccctcttcagagtatcatctacgggcgtctttgtgtcttggtgccataccatattcggtgcaggcgcgccccacattggggcaccacgaaaggggcgttcttggaaaaaggttccgcgagaaccacaattcgaggtcccacataataggctaccacttccacaccctcgtgtaatcctcgggtttttatgagaccccttaatttctcacgaccacgctgagaaagtgaaatgggctgaatttgcaccttcttggtttctttggagagcccttttggtggaataccccctttccccatttttttttttcagatcattaatgggccgaattaaaagagtaaaatggta

SEQ ID NO: 587545 - DNA, 116 bp, Homo sapiens
  misc_feature (94)..(94): n is a, c, g, or t
  misc_feature (96)..(96): n is a, c, g, or t
ggttcgggcctctgtttattgacaggcacagaccaaggcctgcgcagcacagggctcagcgacaataaacgtcccgtcccttggcctcttctgncnggatcttggccctcgccgct

SEQ ID NO: 587546 - DNA, 1335 bp, Homo sapiens
  misc_feature (368)..(369): n is a, c, g, or t
  misc_feature (378)..(378): n is a, c, g, or t
  misc_feature (671)..(671): n is a, c, g, or t
  misc_feature (681)..(681): n is a, c, g, or t
  misc_feature (683)..(683): n is a, c, g, or t
  misc_feature (712)..(712): n is a, c, g, or t
  misc_feature (731)..(731): n is a, c, g, or t
  misc_feature (737)..(737): n is a, c, g, or t
  misc_feature (739)..(739): n is a, c, g, or t
  misc_feature (755)..(755): n is a, c, g, or t
  misc_feature (786)..(786): n is a, c, g, or t
  misc_feature (790)..(790): n is a, c, g, or t
  misc_feature (796)..(796): n is a, c, g, or t
  misc_feature (799)..(800): n is a, c, g, or t
  misc_feature (803)..(803): n is a, c, g, or t
  misc_feature (811)..(811): n is a, c, g, or t
  misc_feature (815)..(815): n is a, c, g, or t
  misc_feature (829)..(829): n is a, c, g, or t
  misc_feature (836)..(836): n is a, c, g, or t
  misc_feature (872)..(872): n is a, c, g, or t
  misc_feature (889)..(889): n is a, c, g, or t
  misc_feature (895)..(895): n is a, c, g, or t
  misc_feature (914)..(914): n is a, c, g, or t
  misc_feature (922)..(922): n is a, c, g, or t
  misc_feature (932)..(932): n is a, c, g, or t
  misc_feature (938)..(938): n is a, c, g, or t
  misc_feature (945)..(945): n is a, c, g, or t
  misc_feature (947)..(947): n is a, c, g, or t
  misc_feature (957)..(957): n is a, c, g, or t
  misc_feature (965)..(966): n is a, c, g, or t
  misc_feature (973)..(973): n is a, c, g, or t
  misc_feature (979)..(979): n is a, c, g, or t
  misc_feature (982)..(982): n is a, c, g, or t
  misc_feature (995)..(996): n is a, c, g, or t
  misc_feature (999)..(999): n is a, c, g, or t
  misc_feature (1006)..(1006): n is a, c, g, or t
  misc_feature (1020)..(1020): n is a, c, g, or t
  misc_feature (1024)..(1024): n is a, c, g, or t
  misc_feature (1026)..(1026): n is a, c, g, or t
  misc_feature (1035)..(1035): n is a, c, g, or t
cggctgtacggctggagtatgggatgcgagcgcggcgggttccgctgccccgctaagcccttttggcggctgccgccttccgccccatgggccccgtgggccccgctggcgcagtaccagctgacctggcatgtcaccagtgaaccggatgcccatggctggcttgcaggtgggaccccctgctggctccccatttggtgcagcagctccgcttcgacctggcatgccacccacatgatggatccattccgaaaacgcctgcttgtgccccaggcgcagctcccatgcctgcccagcgccggggggggttttaaaacagcacgcgagcggaagatggcagataaggttctacctcagcgaatccgggnncttgttccngagtctcaggcgtacatggatctcttggcttttgagcggaagctggaccagaccattgctcgcaagcggatggagatccaggaggccatcaaaaagcctctgacacaaaagcgaaagcttcggatctacatttccaatacgttcaggtcccagcaaggcggaaggcgatagtgcaggaactgcagggacccctgggggaaccccagcaggggacaaggtggcttcctgggaactccgagtggaaggaaaactgctggatgatcctagcaacagaagaggaagttttcttcatnctttaagagncntcgcattgagctggacaaggagctgtacnggcctgacaatcacctggnggagtngnaccggatgcccaccanccaggagacagatggcttccaagtaaacgcntggngacctnaanngtnaagtgcancctnctgctatgctggancatcagnctccccagtacaaattggacccccgattggcaaggntgctgggagtgcacacncagacnagggccgccatatgcaggncctgtggntttacataancacaancagctgnangatgggcacnagcgggannacataantggaancgntacttcgccagannttnagtgggncgactccgttttcnggantncatgaagtngcagggttgctgcagcatccagaccccattggtcatcagaccatgtcattcagtgtcgaccctaaacgaccagaagaagacagctgtgacgacatcgatgtggaggttggacgaaccattgaagggccaaaatgagccaattttctgggctcttacaccaatcaagcaggagattgcctccttgaatgtcaggatccaatgagacccattgagtccatcaaccaggtgaagacccagagaagatttaaggtcagttttagaccgaaccccaggattccatccaggaatggtcccgtccca

SEQ ID NO: 587547 - DNA, 1117 bp, Homo sapiens
  misc_feature (368)..(369): n is a, c, g, or t
  misc_feature (378)..(378): n is a, c, g, or t
  misc_feature (671)..(671): n is a, c, g, or t
  misc_feature (681)..(681): n is a, c, g, or t
  misc_feature (683)..(683): n is a, c, g, or t
  misc_feature (712)..(712): n is a, c, g, or t
  misc_feature (731)..(731): n is a, c, g, or t
  misc_feature (737)..(737): n is a, c, g, or t
  misc_feature (739)..(739): n is a, c, g, or t
  misc_feature (755)..(755): n is a, c, g, or t
  misc_feature (786)..(786): n is a, c, g, or t
  misc_feature (790)..(790): n is a, c, g, or t
  misc_feature (796)..(796): n is a, c, g, or t
  misc_feature (799)..(800): n is a, c, g, or t
  misc_feature (803)..(803): n is a, c, g, or t
  misc_feature (811)..(811): n is a, c, g, or t
  misc_feature (815)..(815): n is a, c, g, or t
  misc_feature (829)..(829): n is a, c, g, or t
  misc_feature (836)..(836): n is a, c, g, or t
  misc_feature (872)..(872): n is a, c, g, or t
  misc_feature (889)..(889): n is a, c, g, or t
  misc_feature (895)..(895): n is a, c, g, or t
  misc_feature (914)..(914): n is a, c, g, or t
  misc_feature (922)..(922): n is a, c, g, or t
  misc_feature (932)..(932): n is a, c, g, or t
  misc_feature (938)..(938): n is a, c, g, or t
  misc_feature (945)..(945): n is a, c, g, or t
  misc_feature (947)..(947): n is a, c, g, or t
  misc_feature (957)..(957): n is a, c, g, or t
  misc_feature (965)..(966): n is a, c, g, or t
  misc_feature (973)..(973): n is a, c, g, or t
  misc_feature (979)..(979): n is a, c, g, or t
  misc_feature (982)..(982): n is a, c, g, or t
  misc_feature (995)..(996): n is a, c, g, or t
  misc_feature (999)..(999): n is a, c, g, or t
  misc_feature (1006)..(1006): n is a, c, g, or t
  misc_feature (1020)..(1020): n is a, c, g, or t
  misc_feature (1024)..(1024): n is a, c, g, or t
  misc_feature (1026)..(1026): n is a, c, g, or t
  misc_feature (1035)..(1035): n is a, c, g, or t
cggctgtacggctggagtatgggatgcgagcgcggcgggttccgctgccccgctaagcccttttggcggctgccgccttccgccccatgggccccgtgggccccgctggcgcagtaccagctgacctggcatgtcaccagtgaaccggatgcccatggctggcttgcaggtgggaccccctgctggctccccatttggtgcagcagctccgcttcgacctggcatgccacccacatgatggatccattccgaaaacgcctgcttgtgccccaggcgcagctcccatgcctgcccagcgccggggggggttttaaaacagcacgcgagcggaagatggcagataaggttctacctcagcgaatccgggnncttgttccngagtctcaggcgtacatggatctcttggcttttgagcggaagctggaccagaccattgctcgcaagcggatggagatccaggaggccatcaaaaagcctctgacacaaaagcgaaagcttcggatctacatttccaatacgttcaggtcccagcaaggcggaaggcgatagtgcaggaactgcagggacccctgggggaaccccagcaggggacaaggtggcttcctgggaactccgagtggaaggaaaactgctggatgatcctagcaacagaagaggaagttttcttcatnctttaagagncntcgcattgagctggacaaggagctgtacnggcctgacaatcacctggnggagtngnaccggatgcccaccanccaggagacagatggcttccaagtaaacgcntggngacctnaanngtnaagtgcancctnctgctatgctggancatcagnctccccagtacaaattggacccccgattggcaaggntgctgggagtgcacacncagacnagggccgccatatgcaggncctgtggntttacataancacaancagctgnangatgggcacnagcgggannacataantggaancgntacttcgccagannttnagtgggncgactccgttttcnggantncatgaagtngcagggttgttcacattcaaaacccttggataaaacttttttaggggggacctaacacaaaaatttttggcccacaccacaa

SEQ ID NO: 587548 - DNA, 594 bp, Homo sapiens
tgagtgtgtggggcggagcggactgcgtgtccgcggacggtgcagggaagatgttagccttacgatgccaggagcgtggtagaagcctctgggcttcctgaagcccttcctccttgatgacggcttccagcctgttcaaggcacaccaggatgcattgccagggttgccctgtgccccctctccagcagtcccgtggagcactagctgaagtgcgctgatgccatcgtgagtgaggaggagtgggcccacacccaagcagctggtggctgagttcaggcctcaggaggtgtaggggagcgcctgcagaaaggggctggagctttcgggccatggacagacggagaactgggctgttctgagtggtggctcgaagaccggcctacctcgagtaccggcagcctgtggtcatctactcgagcccaggtgtgtgatgcttacccgaagcaggacttctgtgggacctgcaggttcaggctccgattggttggccaaattcattgaggggtgtgtaggatctccagggtcatgattggacaatgagaaccttgcccgtggatgtacctgggggggacagccactgtgcttaacccagt

SEQ ID NO: 587549 - DNA, 245 bp, Homo sapiens
  misc_feature (2)..(2): n is a, c, g, or t
antacagaaacattcaagcctgtgataaactctctcaccctaaaaccaataaaaactcttagtccataggagcaagcactcctaaccaaaaaaaaaaaaaaatttgtccagaaaccccctctcaggtttattctccaaaataaccttgtcttggactgtggacccatttttcatgtttcttttctctttctttacttctaactttgggtgctgaaacctgggttgggtgtgggggatcaccttca

SEQ ID NO: 587550 - DNA, 141 bp, Homo sapiens
agttggcgtggactgcaccaggcaagcgtcggagcgcacgtcggtggtgcaggcagagtaggagcggccctcgaagaatgaaggggaagtggcaggcgccatctgcgtttccaaaccgagttggaaccacgacgacgacga

SEQ ID NO: 587551 - DNA, 237 bp, Homo sapiens
atgaacggtctggaatagaatagaatggaatggagtgtaaaggaattgaatatgaatcaacccgaatagaatggaatggaatggaacacaatggaatggaatggagtggaatggaatggaatggaatcaactagaatggaatgcaatggaatggaatggaatggaatggaatggaattgactgtaaagggaattgaatagaagtaacccgaatggaatggaattgaaccggatagct

SEQ ID NO: 587552 - DNA, 437 bp, Homo sapiens
  misc_feature (73)..(73): n is a, c, g, or t
  misc_feature (81)..(81): n is a, c, g, or t
  misc_feature (95)..(95): n is a, c, g, or t
  misc_feature (98)..(98): n is a, c, g, or t
gcagagtaatttcttattgtgaggaactgtccaatgtattgcaagatgttctgcatacttgggctctcgaganaggggggnggtgggggggtggnggngggggtgggggggggggggggggggtgtggagggggtggggggtggcgggcggtggggaggagggggggcgcgtttggaagagagtgtgtaacattctctttgctgacctgaaatgactcatagataatacaatctacttacacacatgaatttcttaaaaaaatcaatttaatgccctaactctcttattaaggagaaatagaaaagaagaaatttataatgaaaagaagatgaatttcattatgtaaacgctcaggcatgactacgctgtttgaaacagacagatgtttactcttccttgtaatgagtaggtttggatttaagagccgattagaggc

SEQ ID NO: 587553 - DNA, 312 bp, Homo sapiens
cccgcttgttcaccgatggcttgccacacattcgggtcactggcctggccgatgcgctgcaggtggtttctcgcgacgtcaccacgacattcgaacgtattgcctggtatgcccacgacattgcctggattatcgcgctattgctgtgcaatggcgtggccttgtggatggggttctgcctgttcgacatcgcggtgccgctgctgttcagcgttttgctggcgaggttgtaccggctttcgatcaacgagctatatcgcacccgggtggaaagcgttaagggatttgactccctattgcgctcggcccatg

SEQ ID NO: 587554 - DNA, 507 bp, Homo sapiens
tccctccgcggggggggcccctcttctttcccagcccccccgggggggggggcctttttccctgtgggggggggggtttccggcttttcaaatttgggggggtgttttttccccccccccccccttccccccctcctctccccgtcggggggggggggtgggtgttgtgggggctttctttgggggggccccccgtctccccccccccgggggggggccagaccccccccccccccccccggggttttttttttttttttttaagggggccccccccgggggggggggggggtttttttttgttgggggcccccccccccccccccccccccggggggttttttttctttttccccttttcccccccccctcggggccgggggggggggggcccccccccccgggggttttttgcgggggtttcccccttttttcccccccctttttttccggttttggggtttttgggggttttttttcccccttttttttttttttttttttgga

SEQ ID NO: 587555 - DNA, 925 bp, Homo sapiens
ctttctcagggtcctattacgttttcattcgggttttccactttaaaacaggtatcattcccccgtaggtccagaaatattgtcgcgggaaggaattggtcccctgggggctttcagttctgcttacaaggtcgggccacgtgtaccccccgtggttttggcaacacttttgtgtgggcatattttctaagtgcacgatttcaaggggcctcccttgtcccgggtacgctctattcaccagtggcctttctggccaccaattttgaaatttgcctttcacctgcgggctagtgatattaagcgacttggggggcccgggcggtgactgtgcccccttgcacacattcggaccacgggtccctgtcgcgcacacagcttctccgaggcccgtaaaggcgtgtccaaattgggctcccaatggccaacatgggacctggccccaggcggtcaccctccacacgaggccacgcagtggcctggagttgactgactgagcaggctttcggggtggagcaactggactccggggcccacacctggctggaggaaatggggtttggcctgttagaagtttaacctggcgccctgccttcctggaggaccagattgtgtttgccccaaccttgccacgggacagggtttgtggctgggcaccctgaacttggctggggaaggaaccacgggccctgggcagggcaagggcagcctgtcacccgtgtgaagattaaaggggcttttcatctgcctgcgctctctacggtttttttaggattattgtaaagagtctgggacccctgttggggaatgggtggccacagtgggggtggcctctctggccatgaattttgcctttcccaggtgtccccctccttccagggcctcctgggggacctttgtattaagcccatttaaaacatgaatttta

SEQ ID NO: 587556 - DNA, 362 bp, Homo sapiens
  misc_feature (282)..(282): n is a, c, g, or t
ctactcgattgtcaccgtcaagaattcgcagttcgcttgtttctagaaataatggggaaagtatgtaggagttgaatattagtccgccgtagtcggtgtactcgtaggttcagtaccattggtggccaattgatttgatggtaaggaagggttcgttgccctcgtctgttatgtaaagtatgcgtaggtatgggaggccaatgaggtctagaatgatggcggccagtataggttgtgagtgtataggaaaagggcatacaggtctaggaagcagataagganattgattatgagggcgtgctcatgaaaggtgataagctcttctatgatagggaaagtagcgtcgtgtagacctacgtgcg

SEQ ID NO: 587557 - DNA, 183 bp, Homo sapiens
gggtttgcttgtcactcaggctgcggtgtggtggcacacctggctaattttgtatttttttttgtggtagagatggggtttcgccatgtgcccaagctgttcttgaactcccgggctcaagtgatccgcctccctcggcctcccagagtgctgggattacaggcacggaccaccatctctacc

SEQ ID NO: 587558 - DNA, 248 bp, Homo sapiens
cctcacggctctgctcactttagcaggctttcaagaccattatctaaacgatgcaaatgcctctgcgctgaagtgctactatcccatcactggagcccacaggaacaagtcctacaattccaaaaagcgctcgatggaaaaatttctcaatcctgaaatcccctagggaaggggtcaggagaaagtgtttggttgatatttaagaactccacagctcttaaaaataagcacttatccctaacatgcaa

SEQ ID NO: 587559 - DNA, 1531 bp, Homo sapiens
ggagagagagaactagtctgagtttatgtggtattctcaattccataaaattttttggtaaacatattttaacatccacatgtaccaaaaaggtgggaggaaagggaggctgggcacacaggggatataatacgcctataaaggggggcgacagggaggaacgacgggggcgcccagggctgaccaaaagaccaccacggtcctctatggaaatgtgaaagaagaagtagaacacgcagaggtagtagcaacaaacgcaagcgctcgacaacccgaaagacagggatgcgccaacacggcgcataaaaaatcacccacaagaggaaaacacattgggcagctgtagcggcacaatgacatggcccgcgagataaaacgatagcaccatagaccgcggagaagcgacaacgcgacacacataggaaaacgctaacaccaagaaaacacgaggttaacaaaacaacaacaggcaaatcacaaacagaagaatgacacccgagaaggctagccacgagaacctcaaaggcagaatgaaaaccaccacagagcgaaacctacacacacgaagggacagtcacaaaacaccatacacaaagaggccacacacaacaccaagagggcacaacccagcaacacaagaagagcaataacatgtagataacaggaacaaaaagacaacaagacacaaacagacccaacgaacaaccaagaaacagccacaaaggcagaccaaaacgtggacaccaagcatacaactttcacacgtatgatgaacggaaaacgacccacagaagagccaatacggagaatagactacgataagacaaagagacggataccaatacggagtagcagagaaaaaaatagaataaacaccacgtgaacagtgccgacacaatacagacaaggaatacgaacacccagaaaaagaaatagggagcccacaaaaatagtgagaagtgacagagaagaacaaggcacaaaacagaccacagaagacagcaagcgaagaaaccgagaagaaccaccaacacctatgagcaacttgggaagagaacaaaagagacagtagagcaccattcaccaacaagaaagaattaaaatgatgagacaagtctaccaagacaataaaacacggacgacaagatacaggcgaacgatggaccgacagactggaagaaagaaccaacgaagagaagcaacaaacaccaacagcaggatgggacaaggtaaaccacaaccactgtagacatagcataggtggactgctacgaggatcaaacacgcaacgaaagaagacacaaaaatgaccagatcagaacgcatcgatgcagaacccgcacgaacgtggaatgtgggacacacaccacgcagcaaacaatagaacgaccagaagggacaggaaccataaaagataagaaaacagccagcaacagagcacaaacaactttacaaaaatatagaaaagagaccaacacaagaaacccagaccaacaagaccgagaacactgagactcgcagacatacacga

SEQ ID NO: 587560 - DNA, 565 bp, Homo sapiens
agccccaacagcacggcgtggcctctcagcctcgagcctgaatgcctcccccatctccatcaggaaaaatacaccccatcgcccagcacccctgctgataccaccagacagagagagagagcacttgattcttcccgagatagccacctggaaacactaggtgcctgcccagggaggaacggaggaggactcgcgctacaagaggccactcccagggacccagggaggcgatggccaccccagaggccaccttttgctccacggaggtgggagaaaatctgggcacatggggccccctgggcagtgcaggacaacatcagctcactggcaggacaacatcagctcactggcaggaaagtccttgttgagggtgagggggtgctggggtacccgggggctggggaagcaaggaaataagtcatctgtatgctgactggggataatggcatcaaatgtcagtccttgacatttggggggaacagcaggtgccagagctaaaaggtacctttgtctgccattgatccagctcagaacgattggaaataaattggaaatgtaaccgata

SEQ ID NO: 587561 - DNA, 198 bp, Homo sapiens
agaggatccccgggaatacctacctacctacctaaccacgataggggctcaggggctacggggagggctcagggtagagcacagacacagctaacggcagggtagccaggcacacaggagacaccagcaggagtacacgaggactagaacccaggcactactaaccccactaccacaagaccaaggcaaacaccataa

SEQ ID NO: 587562 - DNA, 424 bp, Homo sapiens
accgtcatatgtacatgagtttacctatataaaaaacctgcatatgtacctgtgaacctaaaataaatggtaaaaaaaaaactataagtgttttatgtaagcttcatggtaatcacaaagaaaaaacctgtaatagatacagaaaagataaagaaaaaagaataaatgcataacactacaaaaaaaattatcaaatcacaaaggaagacagtaaaagattaagaaagggactacaaaagtcagaaaacaattaacaaaatgacaatagtaagtccttacctaccaataagtactttaaatgtaaaagtacttataattggctgaatggattgaagaaaaatattcacctatctgtagcctacaagagacttacttaaaatacaaggggacacaaaaatagactgaaaatgagagatgaaagaga

SEQ ID NO: 587563 - DNA, 922 bp, Homo sapiens
ggatcactgaccgggtgccatggcgcccacccgggagagtgcctgtgtgctcctgagcatcactacacaccgacgggtactgtgtccgcggagcggttgcgcaccagtgggttctcccgcgaggcccgggcgcgctctacaggactcgcggcggagagcggtaccgggccgcgcggaaggccagcggacgctccggaatcgccccgcgccccgtgatcgaggtgccattccggtccactcggtgtcgctgcccccatgggtctaacggatacctagcacaatcgaggttccctccgggcgagtctattctctctctgtccactgaccatcatgtggagtgaactcacagtactccaatatgaaatgtgctgtgtcccttggggcgactctcgtcattaaatcgtgattggaagtcctgtatggaaaggactgtgaatagcacaagtcgcacgaaaagcttcgcacctcccgaatggcccgagaccgatgcgacgaccgcgacgtgtaacgagaagggtacctgtgtccgactaactcaagtccatcctttcccctgggcacggctcttcgtctccgccctgattaaggtgactaccagtgcatggctgggcacgaccgttgaatacctgtgcgcgagcccatcctttcacccgggcacccggcttccatcgcccccggttcccgcgcgaccgctcctatagagcatagcgtaggagagagctcggagtctctcgactaggacgccaacgagttagtcacctttcgccaaagcgcctttcggcgtgggctcttccggtgattgcgttcctgctgtgcgctacgccctcggttccttttcggccttacggggcacttgggattccgtaggcagggcccctggtgaccctggatggatgtggcccgatgaagtgtaggcctcctg

SEQ ID NO: 587564 - DNA, 261 bp, Homo sapiens
gaatgtaatatgcttgctgtctattatcaagaacaaaatgctgtctcttctctatagttggtgtgtcccacctagaatatatatttggttctggccacatatgaaggtggtcagagactgtcatatgaaagttcccaggcccataatcaaatctgagctgcttctgcgaaactagtgcccctgatgtggcaaaaccagatccttaacccactgcactaggctggggattgaacaggcaacatcacagagataagctggatc

SEQ ID NO: 587565 - DNA, 975 bp, Homo sapiens
cgcgtctgctgtggcccccatgccgtgagttgtttcaactcagtgggcgctttcctcacgctgctccgccaatgggcccccgatgctcaacagggcctcttctcttgtgtgactgagctccacaaaaccgggctttttcgctgtggtgtagggaccacctgtggttcccgctggtcccccgctatacgccggggggggtcccccctccccgcctgtttgtatggagccccaaagcctcccccctttgggcacagttgggccgcactcccaggacaagctgctacaggggccccttgcaaaaaggtttcccggcagacactggggtccgccttccagagcacagcgcccctccatttttctgtatgacgtccgtttaaaatctccctctcaggcggcccaaagtggcttcttggatcaagagtctctgtactacaaaagcccatgggcgtccccccccgccgcaacgccaaacatggaaaaatgatgggccgcgagttctcaaggaggtaacttgccgccccgcaagtccctcgggatgttcaatcctccgccaagcacccaatatgggccaggatccccgcatgacctgcttcgtgcacgactcctggggcggagggatatagctcgaagaccgccgaccacgcgcccggggccgacacccaaatgggggcgccaccacaccggcgccgcgctcaacgaggttgagcaacccccgctcgtcgggtgagaacaaccctttcccctggccaactcgctgcacaggggtgcctagcccgttaccccccccctccctgtgtagtagtccgcagaccctcccaggccgtccgcccacgttgaagagcgctccgcggagatccccaagacaaagcctcactatacagagaggcagggagcgccaccagtagaaagtgcgaacccagcgcgcccgtgacccggtctcaccccagaccaaaaaagcatcactccaacaaaaca

SEQ ID NO: 587566 - DNA, 1526 bp, Homo sapiens
agcgggcctgcgcgcgctcctccgtacgagaactagttttgttccgtgccctctggactggaaccttttggagagaacccccggcaggaccaaccccgcacccgccagcaccgcggcaatgtccagcaatagttttccttacaatgagcagtccggaggaggggaggcgacggagctgggtcaggaggcgacctcaaccatttccccctcgggggccttcggcctctttagcagcgatttgaagaagaatgaagatctaaagcaaatgttagagagcaacaaagattctgctaaactggatgctatgaagcggattgttgggatgattgcaaaagggaaaaatgcatctgaactgtttcctgctgttgtgaagaatgtggccagtaaaaatattgagatcaagaagttggtatatgtttacctggttcgatatgctgaagaacagcaggatcttgcactcctgtccataagcacttttcagcgagctctgaaggacccaaaccaactaattcgtgcaagcgctttgagagttctgtcaagtattagagtgccaattattgtacctatcatgatgcttgctattaaggaagcttctgctgacttatcaccatatgttaggaagaatgcagcccatgcaatacaaaaattatacagccttgatccagagcagaaggaaatgttaattgaagtaattgaaaaacttctgaaagataaaagcacattggtagctggcagtgttgtgatggcttttgaagaagtatgcccggacagaatagatctgattcataaaaattaccgcaagctatgtaacttactagtggatgttgaagagtgggggcaggttgtcataatccacatgctaactcgatatgctcggacacagtttgtcagcccttggaaagagggtgatgaattagaagacaatggaaagaatttctacgaatctgatgatgatcagaaggaaaagactgacaaaaagaagaagccgtatactatggatccagatcatagactcttaattagaaatacaaagcctttgcttcagagcaggaatgctgcggtggttatggcagttgctcagctgtattggcacatatcaccaaaatctgaagctggcataatttctaaatcactagtgcgtttacttcgtagcaacagggaggtgcaatatattgtcctacaaaatatagcaactatgtcaattcaaagaaaggggatgtttgaaccttatctgaagagtttctatgttaggtcaactgatccaactatgatcaagacactgaagcttgaaattttgacaaacttggcaaatgaagccaacatatcaactcttctttgagaatttcagacctatgtgaaaagccacgataaacaatttgcagcagccactatttagactataggcagatgtgccaccaacatcttggaagtcactgacccctgccctcaaatggcttgggtttgtctggttgtccaacaggggattaaataaattttttgttgaaaactttgggtgtgttattaat

SEQ ID NO: 587567 - DNA, 1015 bp, Homo sapiens
agcgggcctgcgcgcgctcctccgtacgagaactagttttgttccgtgccctctggactggaaccttttggagagaacccccggcaggaccaaccccgcacccgccagcaccgcggcaatgtccagcaatagttttccttacaatgagcagtccggaggaggggaggcgacggagctgggtcaggaggcgacctcaaccatttccccctcgggggccttcggcctctttagcagcgatttgaagaagtatgcccggacagaatagatctgattcataaaaattaccgcaagctatgtaacttactagtggatgttgaagagtgggggcaggttgtcataatccacatgctaactcgatatgctcggacacagtttgtcagcccttggaaagagggtgatgaattagaagacaatggaaagaatttctacgaatctgatgatgatcagaaggaaaagactgacaaaaagaagaagccgtatactatggatccagatcatagactcttaattagaaatacaaagcctttgcttcagagcaggaatgctgcggtggttatggcagttgctcagctgtattggcacatatcaccaaaatctgaagctggcataatttctaaatcactagtgcgtttacttcgtagcaacagggaggtgcaatatattgtcctacaaaatatagcaactatgtcaattcaaagaaaggggatgtttgaaccttatctgaagagtttctatgttaggtcaactgatccaactatgatcaagacactgaagcttgaaattttgacaaacttggcaaatgaagccaacatatcaactcttctttgagaatttcagacctatgtgaaaagccacgataaacaatttgcagcagccactatttagactataggcagatgtgccaccaacatcttggaagtcactgacccctgccctcaaatggcttgggtttgtctggttgtccaacaggggattaaataaattttttgttgaaaactttgggtgtgttattaat

SEQ ID NO: 587568 - DNA, 168 bp, Homo sapiens
aagcatgtctcggtgtggacactggagcatgtttagaagcaatgtacctgtcttgtggcggaagaagaacagggttaactaggaatagacctggaataagtcacgcaattgctttccttgtcctccccgtctaactgttaaaaacggcctaattgggctgcgtataca

SEQ ID NO: 587569 - DNA, 679 bp, Homo sapiens
cggtctcaactcattcgacaagactacttgagcgcgacccacttcttttaaatccatccagtatagagacataagatatgacgaactgagctccgatgcttgcgctacgttaccaagactagaccatgaccagttcgttatctatacgcaggactgcttacgtatcgtgcgcacgattatgccgtgcgtagtcaagcagccattgctcgatctcaaagccgcccctgaagctatcaccgggctgctagtcattgctcagtatatcgcccacggacttagcagtcctcattagatatgtctgcctgagcaaactctaactacgaacagcactcacagtcgcatcatgatcctctctgcaaggaccttcagagacatctgactcgccaataatagctcgttataagatgacttgctgagcagagcctcgcgtgaaccatcgccattaccaccccgacctagtaacctagcattgggagaactctctgtgtctagtaaccacgttctcctgatcaaatatcactctcactactttacaggactcaacatactagtcacagcccctatactccctctacatatttaccacaacaacaatggggctcactcacccaccacattaacaacataaaaccctcattcacacgtagaaaacaccataagccgaggcctatccctcaca

SEQ ID NO: 587570 - DNA, 272 bp, Homo sapiens
caagtagcaatatctatcggttatttctaattatgtggctgtcataaatgagaaatatttcgggttatattttgcctattttaagtaaatggatagttactattttcttctgtttttgtatcactttcgtagttttatacagaaagctattcttttttttttttttttaagattggcgttcactcttgttggcccaggctagagtgcacgggtgtgacctgggctcacggaaacctccacctcccctcaacgtgcaaacgcgcttggagtgg

SEQ ID NO: 587571 - DNA, 476 bp, Homo sapiens
catctgtaaaatggatattatggtagaatttatcacctggaattactgtctggattggatgaatttattcaaaggtatttagaacagaaattggtcatagtaagcactcaataaaaaataatatattggccgggtgcagtggttcacacctgtaatcccaccactttgagaggccgtggtaagcaggacatttgaagcctggagtttgagaccagccttgccaacatggtgaaaccccgtctgtactaaaaatacaaaaaaattagtcacgccgggtgggaccccacctgttattcccgttacgaggtgggttgaaatataaaaattgtttgaacccccgaggcagaggtttgattgatccaatcaattgatttcacgcttgggggaaaaaatgaaactgttttaaaaaaatactatatttctgtggcccgaatttgagctcatttgcccatttccctttttggggcggtttcctg

SEQ ID NO: 587572 - DNA, 213 bp, Homo sapiens
tcgaagtgtccagttggtgacagaagaggcggctgcaccgtgaaggagcagggctcaggtctgacgacaaccagggaagggacagggcagggatggcttggctcacgagaggcacccgagtcaggcagtcacatacttcccgctggggtctaccatgtgaggcatggtgtgggatcctgctgaagatgtctccagagaccttctgcaggtact

SEQ ID NO: 587573 - DNA, 224 bp, Homo sapiens
atattacgaaccacatcccggaactggtcaggtttctgaatgacaccctctccaccttagatacgcagagaaagccaagtcgctcctcgctgtcctctgggcatcgcaagccaacaccattccggcgactttctggtgcttattccaaacgattaggtaatgactagtagctgaagtcatttatttattctagtagaatgcagaacattcaagccattctaact

SEQ ID NO: 587574 - DNA, 287 bp, Homo sapiens
ggtggagagcccaagttgagaacaataatgaacaattattgtatgaacaattgttagaaacagctaatcacaaacaacctgcgggcacaatgacctcattccacacgtagcacccttcagcaggaccctataaaactttcctccagcccttgcctctttgcaggtagccccttctctgctgagctgcccactgcaacatattttcacaatttctctaataagtctgcccttctttacctacaactatcttggtaaatggctttaccacctgcaaaactgaccctagg

SEQ ID NO: 587575 - DNA, 257 bp, Homo sapiens
gtgctgcctgtaatgggaaggagatgtccccaaccaggcaactccggaggtgccctggaagtcattgcctgacaataactgatgtttccgtccctgtttatgccacaacgagaaaaccccctgcccaaaacagcaaggaaatgcatccttaatagcccccttaagttttttgtcaaggtctgactaggtcaagggtaatgggccagtatcatttggtgatttggtaaaccaataaaaatggtggcccctttagatta

SEQ ID NO: 587576 - DNA, 632 bp, Homo sapiens
gcgtgctgaatgtactggactcactgtggcatcttcagtgtgcacccatgtatcgggatggcctcaggcgagagagcgtgtgtcttcaagtacggtagactattgactggccggacattatacaatttctctctatgtggtcaacttatactatctataaggcacagtcagcatcttaactgatgttcctcgcattcgacgaagtttccgtagtactactttatggatctgaacggtagtcatgtcgagtatcactgtcctgtacggactgtacttactagaactgccttaatcgctatatgttagctactagtgataagactctgatattgcgctatacatcctgacaatgtcctaacttacattgactcaatctgtccatgactcatcggactgatgagaattctgcggtgatgcctgataccttgagatcctaggtatgtacctataggagaccattggccgctgaatgcacatctatatcagtgcagaacaactgcgttaccgcacacttgcacagacggatgctagcttttagtagtctaagaccgtatgtatacgtcatggctaatatctcctttccaccttatctgatccttaacataaggccattataggccttcactggcttc

SEQ ID NO: 587577 - DNA, 286 bp, Homo sapiens
cggcggcggcttgagaacatcgagtcaggaagtgtagcgaacgggtcataggccgggtgtcgctgaacttgggtaggtcttgaggatgtcttgatcatgtagcggtggtcttgtacgtgtagctggcgtgctggcgatacttgcgcatcaccacgtcaagggcgtcgatggtgtagcccgccgccgtgatcttcagttggatcagcaagtcttccacgggaatctgcgggtcgaaaccaccgacctcctccagcacttcgcgaggaatcagcatggtcggcgccgg

SEQ ID NO: 587578 - DNA, 1919 bp, Homo sapiens
gtaatgtttttttggttgctgacaaatgtctttttattccaagcaggactataatatggatttagagctcgacgagtattataacaagacacttgccacagagaataatactgctgccactcggaattctgatttcccagtctgggatgactataaaagcagtgtagatgacttacagtattttctgattgggctctatacatttgtaagtcttcttggctttatggggaatctacttattttaatggctctcatgaaaaagcgtaatcagaagactacggtaaacttcctcataggcaatctggccttttctgatatcttggttgtgctgttttgctcacctttcacactgacgtctgtcttgctggatcagtggatgtttggcaaagtcatgtgccatattatgccttttcttcaatgtgtgtcagttttggtttcaactttaattttaatatcaattgccattgtcaggtatcatatgataaaacatcccatatctaataatttaacagcaaaccatggctactttctgatagctactgtctggacactaggttttgccatctgttctccccttccagtgtttcacagtcttgtggaacttcaagaaacatttggttcagcattgctgagcagcaggtatttatgtgttgagtcatggccatctgattcatacagaattgcctttactatctctttattgctagttcagtatattctgcccttagtttgtcttactgtaagtcatacaagtgtctgcagaagtataagctgtggattgtccaacaaagaaaacagacttgaagaaaatgagatgatcaacttaactcttcatccatccaaaaagagtgggcctcaggtgaaactctctggcagccataaatggagttattcattcatcaaaaaacacagaagaagatatagcaagaagacagcatgtgtgttacctgctccagaaagaccttctcaagagaaccactccagaatacttccagaaaactttggctctgtaagaagtcagctctcttcatccagtaagttcataccaggggtccccacttgctttgagataaaacctgaagaaaattcagatgttcatgaattgagagtaaaacgttctgttacaagaataaaaaagagatctcgaagtgttttctacagactgaccatactgatattagtatttgctgttagttggatgccactacaccttttccatgtggtaactgattttaatgacaatcttatttcaaataggcatttcaagttggtgtattgcatttgtcatttgttgggcatgatgtcctgttgtcttaatccaattctatatgggtttcttaataatgggattaaagctgatttagtgtcccttatacactgtcttcatatgtaataattctcactgtttaccaaggaaagaacaaatgctggggtcatataaaatatatttatgataactatttacatataataaatagaaatttgttaacatggaatttaatttatgtgaaagagttctggattcaaatgtcagttcataatatatggaagataattttatgtgttatagtaggattaatttatttagttgtgcagtcagtgtcaatccaatctgtaatttcactttagaaggtgtattaccttccacttccatgttgtcttataaacaatgaattgtatgtttgtcgaaagtaaagttatatctacaagtcagtatttgtccaaatatattaggaaaattttctcgaggactttaattccaactgaagaattttacaggtattaattcatttatcaaagggtctaggtagtgggaggcgcaaaaattaatgcgggaatcaaatggggtggtggcctttgttatcctagagtggggctggaagtgtataaggggacgcgtagagaattaaaaagtcggg

SEQ ID NO: 587579 - DNA, 518 bp, Homo sapiens
  misc_feature (261)..(261): n is a, c, g, or t
gcattggacctgatattgcccatggttgagcagtgaataaaagactggtgctcttggtggatgagtttaaggagcttgtataccaccagattacaatcctgatgggtgaaagttaccaagagaaaacacgataatgaaggttctggaagcaaaaggcccaaggtggagtattcagaagaggagctgaagacccacatcagcaagggtacgctgggcaagttcactgtggcccatgctggaaagaggcctgccgggcttacngggctgaagagtgggctgaagaagcaggagctgtgggaagcacttcaccaagcacttccaggactgaccagaggccgcgcgtccagctgcccttccgcagtgtggccaggctgcctggccttgtcctcagccagtaacgaggtgtatctccgtgagctaggaagattcgacccgacataagtcgagggacgtaatgtcttagaggctttctgtaggcatggtgatggtgtatgcctcgcactttgcttgttccgctg

SEQ ID NO: 587580 - DNA, 2142 bp, Homo sapiens
  misc_feature (144)..(144): n is a, c, g, or t
agcgggttctcgagacgccgttaaacccccgccccctcttccccaccgccgcctccaggtcctgctcccgctgctgccgccaccgccggggtgcaggagcgatcgcgctgggccgcgctcccgggagcccaggcctgcagcggncggggcgccccgaggtctgctcattgtgtttttcaggaaaaaggaagggaaagggtgttacaaggaaaggctatcggtaacaactgacctgccacaaagttagaagaaaggattgattcaagaaagactataatatggatttagagctcgacgagtattataacaagacacttgccacagagaataatactgctgccactcggaattctgatttcccagtctgggatgactataaaagcagtgtagatgacttacagtattttctgattgggctctatacatttgtaagtcttcttggctttatggggaatctacttattttaatggctctcatgaaaaagcgtaatcagaagactacggtaaacttcctcataggcaatctggccttttctgatatcttggttgtgctgttttgctcacctttcacactgacgtctgtcttgctggatcagtggatgtttggcaaagtcatgtgccatattatgccttttcttcaatgtgtgtcagttttggtttcaactttaattttaatatcaattgccattgtcaggtatcatatgataaaacatcccatatctaataatttaacagcaaaccatggctactttctgatagctactgtctggacactaggttttgccatctgttctccccttccagtgtttcacagtcttgtggaacttcaagaaacatttggttcagcattgctgagcagcaggtatttatgtgttgagtcatggccatctgattcatacagaattgcctttactatctctttattgctagttcagtatattctgcccttagtttgtcttactgtaagtcatacaagtgtctgcagaagtataagctgtggattgtccaacaaagaaaacagacttgaagaaaatgagatgatcaacttaactcttcatccatccaaaaagagtgggcctcaggtgaaactctctggcagccataaatggagttattcattcatcaaaaaacacagaagaagatatagcaagaagacagcatgtgtgttacctgctccagaaagaccttctcaagagaaccactccagaatacttccagaaaactttggctctgtaagaagtcagctctcttcatccagtaagttcataccaggggtccccacttgctttgagataaaacctgaagaaaattcagatgttcatgaattgagagtaaaacgttctgttacaagaataaaaaagagatctcgaagtgttttctacagactgaccatactgatattagtatttgctgttagttggatgccactacaccttttccatgtggtaactgattttaatgacaatcttatttcaaataggcatttcaagttggtgtattgcatttgtcatttgttgggcatgatgtcctgttgtcttaatccaattctatatgggtttcttaataatgggattaaagctgatttagtgtcccttatacactgtcttcatatgtaataattctcactgtttaccaaggaaagaacaaatgctggggtcatataaaatatatttatgataactatttacatataataaatagaaatttgttaacatggaatttaatttatgtgaaagagttctggattcaaatgtcagttcataatatatggaagataattttatgtgttatagtaggattaatttatttagttgtgcagtcagtgtcaatccaatctgtaatttcactttagaaggtgtattaccttccacttccatgttgtcttataaacaatgaattgtatgtttgtcgaaagtaaagttatatctacaagtcagtatttgtccaaatatattaggaaaattttctcgaggactttaattccaactgaagaattttacaggtattaattcatttatcaaagggtctaggtagtgggaggcgcaaaaattaatgcgggaatcaaatggggtggtggcctttgttatcctagagtggggctggaagtgtataaggggacgcgtagagaattaaaaagtcggg

SEQ ID NO: 587581 - DNA, 2274 bp, Homo sapiens
  misc_feature (144)..(144): n is a, c, g, or t
agcgggttctcgagacgccgttaaacccccgccccctcttccccaccgccgcctccaggtcctgctcccgctgctgccgccaccgccggggtgcaggagcgatcgcgctgggccgcgctcccgggagcccaggcctgcagcggncggggcgccccgaggtctgctcattgtgtttttcaggaaaaaggaagggaaaggagaggtctaacacatggaatggagacacaaatctgaatttagactcaaaactacattgtctctattaccacaaattgtgctgcatcttctctttcttcacacaacatctcggaccagccaattttacactaagtgttacaaggaaaggctatcggtaacaactgacctgccacaaagttagaagaaaggattgattcaagaaagactataatatggatttagagctcgacgagtattataacaagacacttgccacagagaataatactgctgccactcggaattctgatttcccagtctgggatgactataaaagcagtgtagatgacttacagtattttctgattgggctctatacatttgtaagtcttcttggctttatggggaatctacttattttaatggctctcatgaaaaagcgtaatcagaagactacggtaaacttcctcataggcaatctggccttttctgatatcttggttgtgctgttttgctcacctttcacactgacgtctgtcttgctggatcagtggatgtttggcaaagtcatgtgccatattatgccttttcttcaatgtgtgtcagttttggtttcaactttaattttaatatcaattgccattgtcaggtatcatatgataaaacatcccatatctaataatttaacagcaaaccatggctactttctgatagctactgtctggacactaggttttgccatctgttctccccttccagtgtttcacagtcttgtggaacttcaagaaacatttggttcagcattgctgagcagcaggtatttatgtgttgagtcatggccatctgattcatacagaattgcctttactatctctttattgctagttcagtatattctgcccttagtttgtcttactgtaagtcatacaagtgtctgcagaagtataagctgtggattgtccaacaaagaaaacagacttgaagaaaatgagatgatcaacttaactcttcatccatccaaaaagagtgggcctcaggtgaaactctctggcagccataaatggagttattcattcatcaaaaaacacagaagaagatatagcaagaagacagcatgtgtgttacctgctccagaaagaccttctcaagagaaccactccagaatacttccagaaaactttggctctgtaagaagtcagctctcttcatccagtaagttcataccaggggtccccacttgctttgagataaaacctgaagaaaattcagatgttcatgaattgagagtaaaacgttctgttacaagaataaaaaagagatctcgaagtgttttctacagactgaccatactgatattagtatttgctgttagttggatgccactacaccttttccatgtggtaactgattttaatgacaatcttatttcaaataggcatttcaagttggtgtattgcatttgtcatttgttgggcatgatgtcctgttgtcttaatccaattctatatgggtttcttaataatgggattaaagctgatttagtgtcccttatacactgtcttcatatgtaataattctcactgtttaccaaggaaagaacaaatgctggggtcatataaaatatatttatgataactatttacatataataaatagaaatttgttaacatggaatttaatttatgtgaaagagttctggattcaaatgtcagttcataatatatggaagataattttatgtgttatagtaggattaatttatttagttgtgcagtcagtgtcaatccaatctgtaatttcactttagaaggtgtattaccttccacttccatgttgtcttataaacaatgaattgtatgtttgtcgaaagtaaagttatatctacaagtcagtatttgtccaaatatattaggaaaattttctcgaggactttaattccaactgaagaattttacaggtattaattcatttatcaaagggtctaggtagtgggaggcgcaaaaattaatgcgggaatcaaatggggtggtggcctttgttatcctagagtggggctggaagtgtataaggggacgcgtagagaattaaaaagtcggg

SEQ ID NO: 587582 - DNA, 1632 bp, Homo sapiens
  misc_feature (144)..(144): n is a, c, g, or t
agcgggttctcgagacgccgttaaacccccgccccctcttccccaccgccgcctccaggtcctgctcccgctgctgccgccaccgccggggtgcaggagcgatcgcgctgggccgcgctcccgggagcccaggcctgcagcggncggggcgccccgaggtctgctcattgtgtttttcaggaaaaaggaagggaaaggagaggtctaacacatggaatggagacacaaatctgaatttagactcaaaactacattgtctctattaccacaaattgtgctgcatcttctctttcttcacacaacatctcggaccagccaattttacactaagtgttacaaggaaaggctatcggtaacaactgacctgccacaaagttagaagaaaggattgattcaagaaagactataatatggatttagagctcgacgagtattataacaagacacttgccacagagaataatactgctgccactcggaattctgatttcccagtctgggatgactataaaagcagtgtagatgacttacagtattttctgattgggctctatacatttagtgggcctcaggtgaaactctctggcagccataaatggagttattcattcatcaaaaaacacagaagaagatatagcaagaagacagcatgtgtgttacctgctccagaaagaccttctcaagagaaccactccagaatacttccagaaaactttggctctgtaagaagtcagctctcttcatccagtaagttcataccaggggtccccacttgctttgagataaaacctgaagaaaattcagatgttcatgaattgagagtaaaacgttctgttacaagaataaaaaagagatctcgaagtgttttctacagactgaccatactgatattagtatttgctgttagttggatgccactacaccttttccatgtggtaactgattttaatgacaatcttatttcaaataggcatttcaagttggtgtattgcatttgtcatttgttgggcatgatgtcctgttgtcttaatccaattctatatgggtttcttaataatgggattaaagctgatttagtgtcccttatacactgtcttcatatgtaataattctcactgtttaccaaggaaagaacaaatgctggggtcatataaaatatatttatgataactatttacatataataaatagaaatttgttaacatggaatttaatttatgtgaaagagttctggattcaaatgtcagttcataatatatggaagataattttatgtgttatagtaggattaatttatttagttgtgcagtcagtgtcaatccaatctgtaatttcactttagaaggtgtattaccttccacttccatgttgtcttataaacaatgaattgtatgtttgtcgaaagtaaagttatatctacaagtcagtatttgtccaaatatattaggaaaattttctcgaggactttaattccaactgaagaattttacaggtattaattcatttatcaaagggtctaggtagtgggaggcgcaaaaattaatgcgggaatcaaatggggtggtggcctttgttatcctagagtggggctggaagtgtataaggggacgcgtagagaattaaaaagtcggg

SEQ ID NO: 587583 - DNA, 853 bp, Homo sapiens
  misc_feature (77)..(78): n is a, c, g, or t
gatcgatgaagacccggccaaccggctgagggagcatcgggaccccctttggagtcggaggaggaggattccgacannaggggaaaaagtcaataagcatatagactactctttccaaatgagtgaggtaagttaaatatatatgcattaacttccttataagtcagaataaaaaatcaagataaggttaactaagcctttgtacttatttacttataatacattcgtattatgccctctaagttgtattcattgttttaagtagctaaagcaagttccatgattccatgcagatttaatacttggatctttgtctagatgttataagggaacaaatagatctttgatttgttttgaggctccctgtgaaataaactcagatatgctgatcattgatatgcaagatactagtatttggcttaacattttgctataatataatgttagtgtagtctgtgatagcttattattttacagttattagtatgattagtgcttatctatgactatactggagttcaacctgaattgcataacacacattaccatagaataataaataaattaccctactacttgtcaaaacatacagaactttcttttaaccaaaggacttcttactataaaacttttaagaaccatacaaacaattcatatcgcttctatactgaatatacacgcatgttacagggcatctccaatgacatcattccctgatagactctagttgaatcacgaactccatgcatagcctctcacagaggtaagacgtcccttgtactggtttcaggaatgtcctgccagaatatacacaggaactttaacaaacgaattccccacgaactgattgcac

SEQ ID NO: 587584 - DNA, 417 bp, Homo sapiens
  misc_feature (77)..(78): n is a, c, g, or t
gatcgatgaagacccggccaaccggctgagggagcatcgggaccccctttggagtcggaggaggaggattccgacannaggggaaaaagtcaataagcatatagactactctttccaaatgagtgagagcctgagcagcagagagaccagctttctcatcaatgaagaaacaatgtttcaaaaaaatcagcaaagcaaagattctatcttcttccgagatgggattaggcaaattgattttgtgctttcctacgttgatgacgtaaagaaagacgcagagttaaaggcggaaagaagaaaagagtttgaaactaatctcagaaaaacaggtcttgagttggaaatagaagacaaaagggactcggaagatggaagaacttattttgtcaagatccatgccccttgggaggtattagt

SEQ ID NO: 587585 - DNA, 214 bp, Homo sapiens
agtgaatacgactcgggtagtggaggatctctagatgtcgaccagtgctccatgctaaacgatattatggaggtcagcactggtgctcactgtgtctgactggacacttgtacatgggagtgcatgcacctgaggtgggtagaatacactgtctgaccatggctccagtgttaactgatattttggatggtcatgcactgtgtgctcactgtgt

SEQ ID NO: 587586 - DNA, 576 bp, Homo sapiens
ggcgctttggatttccttcagttctccaggtccacctggaaagtatagttggccagttgagtctctcaaatgaggggctactgggagtgctcttggtaacaatcatgatgtgaatgggtgtgaacgatacttggctatgttaagtgccttgtccgcaccttgcttttatctctagagacatgaagttattattaagtttattattaatctgttatataagtacgagatggagtttcagcatctgtttcccaggctggtcttgaacctcctgggcacatgcctggccagggacatgaattggtacaaagaaatttccctcccgtggctgaagcaatatcacccatggactcactgttatccaaagaaagttatccatggtgaatcggccagattctgtctatattcatgggatcatggcactccttcctaagccttccccatttaccaagcaacactgggagactaatcctttgagaatagatagaattattggagtgctcaaaaaacatcacatgtaagatttaggttgtaaaaatatgttttaacatttgggtgtcaaatgggagttgaggaatg

SEQ ID NO: 587587 - DNA, 634 bp, Homo sapiens
tgctggcttaccaatggcaggattcctttctgcttcatggaagctggtaattgaactggatatatcaacaatggtatgtatccttattattggattaatgattgccattgtgagcctatatagcaaacagtcttttctcgacgcatcttgaatgtgacaaaggctcgcatagcgtgcgtggcttaccaagtggcagggatacctttctcttcaacaacagactttaatcttacagtatgtttggtaaagttttcctttgaatacaggtgattgggatgtgtgaaaacctgtaccataacacggagtggacgttgacgtggtcttgttatgggtggtctataccctgttttcttggctatacctgtaaagttggtggtctagcagccaggtatcaactcagctctgttaccacacaaagggaacatcttaagttacgggattagaacttctaagccgtgtctttaaaagagatgttattctcctatttgggctccagaactatgtttctcagctataccttgggtctgaacaatataaatctacttataagggcccttcagttatctgacccctggcaaagaaattcatcgtgattttaaacatatttgtaaccaaaattaatgggtaaaccccg

SEQ ID NO: 587588 - DNA, 153 bp, Homo sapiens
acgctttcttaagttggtggctgctttagtgcctacttatagggtgttaaattgatttactctactctaccaggtttattcgatatatgtccaaagagctcgttcctcttgtgcgactaacagttcaatttacccaagcttttgggatcctct

SEQ ID NO: 587589 - DNA, 307 bp, Homo sapiens
acggaagtgaacactctccatcatgaaacagatttagactctggtctgatcacaatattcctcattagtatcgtgcccctgtggagagatgcacttccagacggcccctgttgaggagtattgcataatagtgcctgtacagtctgccttcgtaaactcctaggtaggtgctggtagtccctccaatatcccaaaagaatgatgccggactcattcttggtgcagaatgacaggttgatttctgtacctacatcaattggcacaggggagagctccacaaaaccaggcttaggaaagctaactgtgt

SEQ ID NO: 587590 - DNA, 124 bp, Homo sapiens
attcctgtcatttaattagatttgccacaaaaagcaataaggttagctaaccacgctgctctcctcctccacctaacccccacctcccttcatatcacaaacacaggaacccaaagcccctcct

SEQ ID NO: 587591 - DNA, 1130 bp, Homo sapiens
ctgtgggtgtcccccacaattcgtggggactatctgcggtccggggtgatacgtgttccgcgctcctggggggcgctcgtctctcttgtttcgggctcccccccggtctttccgcctctccctggggtacccgtgtcccagaggcggtacgccttcctggtgtattgatcgtctccttccgctgcggctcccgccctgcgtggtctgggcttcaactggtcggtgctcatctggtccctcttattgtttggccggtcttctctgtgctggcccggcacgttcaaggggtccccctcccttggtcctctgctcacatatgccgcgtggtggcctagcccgtggggttcccccttcttgggggttggctttcgcctcttgcctttggtcccccgtgtgtccgcgcgtttccctcggggatctattctctctcgggtctttctcttcgcaatccgagtggctagcgtgcttgcgctctccgtcgcgtgtctgctagtctctctggatacttctctgggctgcgccccctttcgcggtgatttggcctctgacgtcatcgacgacctggtcacggcagcttgtgctggctgggtcgccggggccttctgggtgtctgctgtgcggcgtaccgtgtcccctccgcccctctcccatgcccggcgatctgcatcgggcccaggccgccaccctgcacgtgcgggcgtgagcctgcttcgcccgcggggaagcgtcagaggggcagccctaggaggactagtgacagtcagtcgcggaatcctgcggtgtgactacccacgcacccttgcccagcggattatgggagttgtcactctggtaaaaggatttctgggctgcttccatgcttggggccctcatccctgccctggcaggccttgtctagcaccgatctgcattctacgctgtgggggtcagtcgtgatgcagcagcgccgtgagttcctgtaggctcaagaaccttctccacttgagaagccttcctgggggaggtctgagtgggccaggcctggagccacgtaccaacactttatacccaggggaatggatcgccaagggccctagataacgcccccaacttcttggggttcacaatactcctgagacatctggaatctg

SEQ ID NO: 587592 - DNA, 124 bp, Homo sapiens
cgtgaacgaggagtgagctcacagacagcaggcaagttccatgggacgacagaggttcagactatgggcagcccctcatactgaccttccgggtgccccccggggactccccactcccgtgtac

SEQ ID NO: 587593 - DNA, 293 bp, Homo sapiens
tggtgctgtccaatcatgtcgatcgtggtgccgtgtattcgtcgtagtggtgccaggaatacgacgtcttggttgccggagagttcactcgtgtaggtgccggaattcgtcatggtcagtcaactggggtcttcatcaccatgaagagaggctggggctctttagcaggggggatgccaagaggtgtcataatctctgccccctctactgatgcccccatgttcgtcatgggcgtgaaacatgagaagtatgacaacagcctctagatcatcagcaatgcctcctgcacgacg

SEQ ID NO: 587594 - DNA, 443 bp, Homo sapiens
tcaacgcacacacacctctgaagccgccggggcagtgcgcgaaacacagcggctgtcgtgaaagagtcaatgaccgagtgccccccagacgctgggctgtgcgcaacagaccaagaaaaaggtgttccagtgagaaaacagatatatgcggtatgttagaaagtggttttacaaagtccagccatgagatgtacaagtcattcgctaggaaacagcccaggaatggccatctgtctccagccgcgtacgctgtgcgcagtacccaggcacccagcaaccatcccctaggagaagcgggcaaggaccctcgtgggaagatcgccaccacagcaacacctttcttcagggcggggctcgtcggcagtgtgtgagtcaaggcaatccattccattcaagagggaatttgctctcaaattttgccaacacggaaatattagccttaa

SEQ ID NO: 587595 - DNA, 139 bp, Homo sapiens
gcggccgcctactactactactactgctcgaattcaagcttctaacgatgtacggggacatgaggaaagctgcaattaagaaagactgagcccctcccctgccctctccctgaaataaagaacagcttgaccgaaaaaa

SEQ ID NO: 587596 - DNA, 845 bp, Homo sapiens
gggcaccagtggttgcacgtgggttgggctctgatgcacgagagtttctcttttgaatgtgaagaaataactaatacaatccattgtgaccagaatgtccttaagctgaggaattgggtgtgccttaaagatacaatctcgggatagtctagggggaacctttgttagccatgatagtgcccttgtacagtgctgatggcctggtagttgcagcctaacggtaggagcacgacgttgggacagggcatgggtgtgcaggaaacatcccactatctatccgggagtgcctatcatggacggaaggatactctgggccctttgaggtgtccgtgggtttccgctgctaacttgagccagatggggaattgagggcttgagtatattggatcaagataactttcaatgaagacttaggttgtggccagcacagtgagatatttccattgacgagtatttgggacacctgaggggttctggggggatgaaagagatatgttaaggaacgtctcaagttgtgatgagaatggcccaggggtttcgtaagagagacaaggttattcggggttgaatacgatatgggcatagcattgaaaatggggaggaaactgaagcaaatgtgctttcaactttgtccttgtgcatcggagcgaggtcaagtttttcgtgaaggagcctaacattccacattttgaaggagaaataaattaaagagaaccttaaacaaaggcgcaacattgtccatggtgaagggtgtgaaagccagaagtatgggaatttgcccccataaattgttgttgaaaaactgttatagaagggaataagtacaggaaagttgtttggaagaa

SEQ ID NO: 587597 - DNA, 806 bp, Homo sapiens
ggagagaactagtctgagtttactttatatctttttttttcgccaaaaaaaactttattaccaagctataaattaaagtgcggcggggtgggcggggtgacagccgagcagtcccgtatggggcatctgccctattatctctgtcctcctggggcctggattagagagtcacctcatccaggcgctcctattgctggctggaccacctttgactgcaggtagaaggagccacccacggatcaatcatacacctaaactaagtgtcatagtcctactggacctcctcagggctcacgcttggaccacgtatgaaaatctgttgtgcctcctggaaggctgaggccgagacaggttgaaagcggttgcaaacctggtgtccagcgccgtcccacggagcatcagcatgaggcacccggagtaagacatggaagtggcgccaatgtaggagtagactcaagcccacaacacatcaaaaaaagcaccacacaactacaacacctttgagccctatccacagaactaggatcagggatacacccacgattggaacaacatcgctcgacagaaaaggcccagtcgaaacagtgcctattagcccaaacacaacatatgaaaagcccccaagtcagaaactgtgacatattgggggccacgagtaactgtttggcccacattgagacagcgcgcctccttgcagctctccggaggtcttcaaacactccggagtttacgcttgggcccccagaaggcactgagtgaaaataaacgattatgtaacagaaagagatcaagaacagaaagaaaag

SEQ ID NO: 587598 - DNA, 134 bp, Homo sapiens
aggatcccaactgacagccacgagccattttacaactctttattgatgttaagcatgttcctatgagggaatgggtttcatgttgcaagaaaactgaggtgatatggggactctgaggctccttagcctcctgt

SEQ ID NO: 587599 - DNA, 271 bp, Homo sapiens
  misc_feature (25)..(25): n is a, c, g, or t
  misc_feature (29)..(30): n is a, c, g, or t
  misc_feature (47)..(47): n is a, c, g, or t
  misc_feature (72)..(72): n is a, c, g, or t
  misc_feature (86)..(86): n is a, c, g, or t
  misc_feature (89)..(89): n is a, c, g, or t
  misc_feature (91)..(91): n is a, c, g, or t
  misc_feature (94)..(94): n is a, c, g, or t
  misc_feature (111)..(112): n is a, c, g, or t
  misc_feature (173)..(173): n is a, c, g, or t
  misc_feature (180)..(181): n is a, c, g, or t
  misc_feature (183)..(185): n is a, c, g, or t
  misc_feature (206)..(206): n is a, c, g, or t
  misc_feature (217)..(217): n is a, c, g, or t
  misc_feature (253)..(253): n is a, c, g, or t
  misc_feature (262)..(262): n is a, c, g, or t
  misc_feature (270)..(270): n is a, c, g, or t
tttaattgaagttaatatgaaattntttnntcactttcattaatganttctactctgcatttctctgttgtntcccagaaattganctntnggnattctaaatcatttaanntcaaaacctagtcttagtcgatgcacaatatggggaaacttcaggtcaaggaagagaaganatatttnncnnntagtatggactatagagtctntcacctatttntagtactataatacacagatactgtgaacaattaanacctcagantcctacanc

SEQ ID NO: 587600 - DNA, 141 bp, Homo sapiens
acgcttcggtcagggtatcttttaccagacactgaagcatatggagatagaatagaaagattgcttcgcctcagtttgaacatcgaccctgatgcagaggtggaagaagagcctgagaagaactgaagagacgcgaaaacc

SEQ ID NO: 587601 - DNA, 915 bp, Homo sapiens
gacctgtccggcgaccgaagaggctggacttgacaccagtgcatatcacggccatggggtctcagcatccgctgtgtcgccctcctcctgcaggcgaaagcaagaaagatgatcagggacggttggctggctgaagcgagagcaggaagaagccattgctcagttcccatatgttggaatcaccgggagaagatagcatcaaccttgttctcaatgtgccagggggacaggctaccatttccaacagcagcaatgtaaactggacgtgcgggtggcttgtgatcccacacaggtgaatccaagagattgcgccctcagcaaatcttaacgcaattatgtccctcctgttccatccctgcttgggtctcctgcattctgtggggggtaacttaccttgtttccggcaatcagtccttgtgcatgatgacgggcattcaacagttgctgaaccgtcaccttttacctaaggcaagactcccttgtaattctcaccattaatggcccaccctggaaatcaggaactccacatttctacccggtggcaggtggccagtctgtccagccagatccagtaccttgaacaccatggtggtccgtacattatgttgactactaggggttccttatcacctcggagtgagcaactgggtgaatttaccggggaaggccggaattggaaggaccggttcctaatggacttgctctgcggaacctgcaccctggtgccaccatagtggccttctgcaacgcagggaggattaaaaattgcccagacccgagtccttggaccctactttgttgggggccctccccgcttaacgcatggcttcccgctgtaaaacatttcagcttggcccctggtagggcgttccaacctgagaccgtgatttacagtgcagtacaaacgcgaccaat

SEQ ID NO: 587602 - DNA, 353 bp, Homo sapiens
  misc_feature (221)..(221): n is a, c, g, or t
  misc_feature (241)..(241): n is a, c, g, or t
  misc_feature (244)..(244): n is a, c, g, or t
  misc_feature (314)..(314): n is a, c, g, or t
aaccgttaccgccgggggaaccaacgctttaacgctggcgattgacaaaacggcggcgctgctcgtcgttcataaaggtccaggcaataaagcgactctgcttttgcccctgggccatctcttttttaaccaccttcaccgcgcccacgtccgtcagggcacgatacaacggcggtaagttttcaccacgagataccagtgatgtaaaccacatcacctgnttcgcgaagcttttgctctnttnaatcatctttttgataaaggtgacttcaccgccttcacaccacaactcctgttgctggccgccaaagttnagtgcatcgtctttgttcagccccaggtttacggcgttt

SEQ ID NO: 587603 - DNA, 413 bp, Homo sapiens
tgggggcgttcctgagtttaattgggggcacacccggacgagggccctgcccctaaaaaaaggtgtggggcctcttggtggtgaagcgtggcttgtgctgacggcgcaggacccggtggggcagccgggaacttgatctgggagtctgtggaactggtttgacagccgggccggcggccacttgctgggcctggatctcctccaccttcatcccacgcgtccgggaagtgaattcactatctagacagggatgagactgggtatagacttttaccaaagctttccccacctcaaaaacctcggctggggggagaatctccagtagggggcactgtggacacggttcggcttctgcctcccaagggctggggcttccccgcggtcaaaaaacaaacaagcacacaacaaagcgg

SEQ ID NO: 587604 - DNA, 283 bp, Homo sapiens
  misc_feature (7)..(7): n is a, c, g, or t
  misc_feature (217)..(217): n is a, c, g, or t
ggccgancagcaggatccccggaatcacccgaccctacaaaaaatagaaaaataaaaaacaaacatagattagcatgtggcccagtgattccactcataggtttatacccaaaagaactggaaacaggtattcaaacaatcccttgtatacaaatgttcatagcagcactattcagagtagccaaaatgtggaaggaacccaaatgtccaccaaggngattaatggagaaacaaatggtggtatacataaacaaagggatattattcagccatcgctggtgta

SEQ ID NO: 587605 - DNA, 426 bp, Homo sapiens
gtagctaagaacttcacccctcacctcaatgcagccagtagctgggatcctggtgggcatgatccataatcggttccaaggtaacgatggtgtcgaggtcttgggtggggtggaactatgtaagaaaaggtcattaattggcctgcaattggtcaccagaagggtattaaaaccacagctaagtagctctataataatacttatccagtgactaaaaccaacttaaaccagtaggtggagaaataacatgtccaagaacggtaatgcggggtgggaacatgtaactggtagactggagaagataggcattggagtggctgagagggctttggggtgggaatgcaaaatttctcggctaagacttttccaggtgaccttaccagactgggccaagctagcatctaagcggaagcggatctccaatca

SEQ ID NO: 587606 - DNA, 503 bp, Homo sapiens
acaaagtggccatacgcgggtatcaaaaacccttgttggacacatgtgggaattcaaagacaacagagcaggatgtacattcacagtgtaatggaaaagctttttctgacggcaggaattataactgttactcttttattcctagtctttcatgcgatcaacctcccggagggctcaaatataattgcgaaatcccaattatgcgcggtgcgcgtgatactgttgtgggaacttacacatcttgagagtagtggaaagtggagtagcccatgaccggcttcagctgtgacaggtttagtgtcttgtttttgacacaggtgacagcggcacaggcaatctttacgatatctgtgaaggcatcagtagtagcagttaagtgcggtatgaccttcttacagggtaggaaccaaggcgcgtagaacatgaccaacgggcgcgtcttgttcttcagggtctcccggcagttggacatcaacatgtgcaacacgcttgaccgctggtat

SEQ ID NO: 587607 - DNA, 810 bp, Homo sapiens
  misc_feature (58)..(58): n is a, c, g, or t
  misc_feature (227)..(227): n is a, c, g, or t
ggatcggcttcgttgcggtctgttactgagcagaaatcggccgagaatggtgtccgangtacgacgttgacaaagttgtacgctcgcctggtctaacgatttccacctgaactgagcgacgtcgtgcgatgaagctcggcaataatcccctggtgaaacgattcctgcaagagagaagaattggtacgggtttctgtcttcgtcgaatctggagtgcaatactgaanttccaaacgaggaccctagttatgagtggtatcttttacatcaatgacctgcaagcgacggtagtaaccatcagtacacatcgcatcacgtacttgtctactggtgcctgtgtaggtgtcctcatcgaataggttcgcgatgattctggaaatacattcctgaaagtacagaagtgcttatacacttctagagacattcgggcagctcggggactcattcctatcagtgtcgagaacagtctcgatacaggagagtgactcgattctatgtgccaatcagccatcggagatgatgccatgatattatattatcatagtgtgtgctttcgtctcacttgtgacaaatcctgtctggagaattgcaaaaggaacagagcaaacaagcagagcatgaagaatgcatcaagtccagagagcaggagcagagcagcagctccgtgacaggaagagatgagactaatgtgaagatcgggagtctgagggggcgtgccgggtgactctgcgcgagggacgccggaacatgacggggatgaatgattgaccatgcaagcaccggggtggctcgaccagctgagccggccag

SEQ ID NO: 587608 - DNA, 316 bp, Homo sapiens
ttgagacggatttcagtcttgttgcccaggttggagtgcaatgtcgcgatctcggcgcactgcaacctccaagtcctgggttcaagcaattctccagcctcagcctcctgagtagctgggattacaggcgcccgcaacaaggcccggctaatttttgtatttttagtagagaaagggtttcaccattttggccaggctggtctcaaactcctgacctcaggtgatctgaccatctcaacctcctaaagtgcagggattagaggcgtgcgatcacaccggggcaattagttatttttaaaacatttactttactgat

SEQ ID NO: 587609 - DNA, 588 bp, Homo sapiens
  misc_feature (446)..(446): n is a, c, g, or t
  misc_feature (471)..(471): n is a, c, g, or t
ccagcgccccccacgggtggcagcagatcctggaggatgtgcggggtgcgccggcagaggatccagtgttcaccatcctgggcccggaagaccccccagttcccttcaggatgatggaggatgcgtgaggcccctgggagagcagttctaccagtcaaatgccgggcctacgtgggtgccaacacagcgtgcatgtcgagtcaggcggagcaatgtgctgaggcgataggtgtgagctcctgcagcgaggcggcgacggcacctggagcgggaggtggcccagatgaagcaggcagctattaccggtgcaagctcagtaaagcatgccatcactcaggcgtgactctctcgagagtgcctgacaggtcttgtggtcagcgcagcgaaggtggcctgcacccaggtctttccctgggcggtccgtcggccccagactggcattcacnggggttcccagctccacgagggtgntagacactagggctgccctctcctgattgctggggctggcggttcatccgtccgtctcattcatgccgagttggtgggacccacccagtcggctccgtcctgcgtgacctgagggcc

SEQ ID NO: 587610 - DNA, 127 bp, Homo sapiens
cacccaggcgcacttctggcccctctgagtgattccctagggctgccccgcagaggggcttcccctaagctctgttttgaagcctgcaatgtgcaacagtgagaaggtcagcagggaacacggacag

SEQ ID NO: 587611 - DNA, 216 bp, Homo sapiens
  misc_feature (68)..(68): n is a, c, g, or t
  misc_feature (94)..(94): n is a, c, g, or t
  misc_feature (169)..(169): n is a, c, g, or t
  misc_feature (182)..(182): n is a, c, g, or t
  misc_feature (195)..(195): n is a, c, g, or t
tgaaatttgagagtccttggattatctgacatgtaaagttgtgagccagatgtggtggcatgcacctnctgggattacaggcatgagccaccgnacccagcctggttattggatttatttatttattttgagatagagccttgctctgtcaccaggccggagtgcagtngtgtcatctcagntcactgcaacctncaacttccaggttcaagcgat

SEQ ID NO: 587612 - DNA, 1216 bp, Homo sapiens
tgtgtctcttgccattgtgctctcgaagaaccaatccgcttggtagttgtgcgctgggtaagtgtctggtgtgttccgggggtttccatgcccccctatggtactaaggggttcgtataaggtgaatttgttccctctgtgagtccctcctgtagagtcgccgaggggggctttgttccggtcgtatgagtccgtagttttcttggcgactactagttgagttttgggtgtagagacgtgttagcgcttacgcctgtctctggggagactgtctgactactacgtagaagcgcacttgctttgggcaattacgccaggtacgaggttaatttgtgctcgcttggatgcccttactatgaacgtagtcggacgcttgggggcctgtgcgcgctacgcgggcttgtgtagtccgctgctgatggcaacagctcatgtagtagctgtgtactaagctacgtgaatgtaggatcggttatgaatcatgcgagcgtaggtcagtagatgtgtgcagcgcgtcgcgtcgtactcgagtagagtgcagtgcgcctactccgcgcagcgcgggcgttcataagttacgtttaggcgtgacgctgcgcgcagcagctgcgcaccggagaggcgaagtagtgataactgactgctgtctgtcatgctgtctgctgaggccgctatgcgagttcagtgcttgtcgttgttgcagccgctacggtgggctcgtgagactgggcaatgtgtactatagcagaagctcagtccagctagagcactgcgtatcgtagcagcgagcagcgctagctactgttgttagtcgccagctgtcgtgtagccatcaaggtcaacagcgctacagcccgcttatcgccgcatagctagtgtatgtagtgcgaaacgcagtcagcgctagcgtcagttcaagccaatgatgccctggcgcgtagcgcgctaagcgcgcgtaagcatgtagctgcaggccacgctagctcatgcacctaagttggaagcgccagccgctagcaatagtcaagcgcagttaaccttccctctacacgtgtatcatcttcacaattgctaagttcgtactgagctagtccgtagaaagtcgctgtcgccgtaatccaagcctacgttttacagcttgctagaagcctcaccgacggtgcgggggaggggtgggggtcggtggcgcggggggggggggggggggggggggggc

SEQ ID NO: 587613 - DNA, 313 bp, Homo sapiens
  misc_feature (53)..(53): n is a, c, g, or t
  misc_feature (103)..(103): n is a, c, g, or t
  misc_feature (178)..(178): n is a, c, g, or t
  misc_feature (209)..(209): n is a, c, g, or t
  misc_feature (269)..(269): n is a, c, g, or t
  misc_feature (279)..(279): n is a, c, g, or t
actggttccttttataaaaagattgtggatccttcagattgataattctgccnaaaagtcagggtcggcttgtgaaaagttgttaaaacaacatccttaatgngaaatgtcaaccctcactctaagctacttcccccttttcaaagcattgaatgaagacttcattgggttttatagnggctttctgattttggtagtctatacaagangggaatttggaagttcttgtatattgttgattgtctgcccatgtcctgcctgaaataccntgattgtttntgaaaagaatctttaataaagctggttacagtta

SEQ ID NO: 587614 - DNA, 341 bp, Homo sapiens
  misc_feature (1)..(1): n is a, c, g, or t
  misc_feature (5)..(5): n is a, c, g, or t
ngtangaaaaaggactagatatagctacttatatagtagctgtatctacttataggcatctcttcctgaatcatttacataaagttgaaataacaggattttagaattgaaatttttttttttttggaaatggattttggctctgtgtggcccagaataaaatgcaggggcttaatctcggctcaccacaacctctgcctcgcggttacaatgtgattctcctgcctcagcctcctgagatgctggaattacaggcttgcgccaccatgcccggcataatttttattattttaagaaaaagacggggtttcaccattgtggcgccacggctagaatctcaa

SEQ ID NO: 587615 - DNA, 130 bp, Homo sapiens
tctcgtctttctgcagaagagaggcaaagagaggagcagctcgtctcatttgacaaccatgaggagtggaaccagatgcagaaccaggaggatgaggtgtccatcactgagcaggacatggaacgtatta

SEQ ID NO: 587616 - DNA, 90 bp, Homo sapiens
aggccctcacatacctctgagtacctctgtgccagcaggctagggggagagacccagtacttcgggccaggcacgcggctcctggtgctc

SEQ ID NO: 587617 - DNA, 176 bp, Homo sapiens
  misc_feature (160)..(160): n is a, c, g, or t
gcgtgttgggactttgtactctgccgtgtggactgtcctgggcagcgatttctgctgcagtgagaacaacaagcccaaagacaggtcctggatgaagcctcctcagacgcctccacctgaccccctcccaggctgcccatgctgcccttgcacctccacnctacatctggctccct

SEQ ID NO: 587618 - DNA, 508 bp, Homo sapiens
actcgctattcatcggcaccctcggggcctggctagggaaaccctattacctccaggctcgcttctcatatgtgcggatgaaatatgttgtatcttgctggatagcggaatcagttgcaagctggattatatatgtgcagcattctacctatacagaattatgcagaggaaagggctgtaagaaaataatatgtgacaagtacaagactggagttattgatgggcctgcatgtaacagcctttgtgttacagaaactctttactttggaaaatgtttatccaccaagcccaacaatcagatgtatttagggatttgggataatctaccaggtgttgtgaaatgtcaaatggaacaagcgcttcatcttgattttggaactgaattggaaccaagaaaagaaatagtgctatttgataagccaactagaggaactactgtacccgggggcctggctaaggaaaccctattacctccaggctcgcttctcataggtgccgatgaatagcg

SEQ ID NO: 587619 - DNA, 419 bp, Homo sapiens
  misc_feature (260)..(260): n is a, c, g, or t
  misc_feature (316)..(316): n is a, c, g, or t
  misc_feature (357)..(357): n is a, c, g, or t
tagtctgtaggaggcaccatgaggggagccgtgttgaccactggtcaggtgtcatcagtgccaggcaccttacgggtgatgtcacctgatgtatttttaggcagatggccatctcgttccctttttactcaaccattgggagtttgaaaactgaaaggatttttcctaagatacgagcaggaagcagcagagcccagatgggaacttgggcctgactccagggccggtccttgtcctgcagggccgctcgccgtctccangggctgtgcatgctcggctctcacactgtgtgcctggccgagctcttgctcattangtccccccttggctccagagattcctgctcccttcaacaangcctttcctcagattccagtcccaggctgaccaggacccacgtgtcggctttgagcctcagt

SEQ ID NO: 587620 - DNA, 419 bp, Homo sapiens
  misc_feature (26)..(26): n is a, c, g, or t
acatgactcagcctgagcaaaacagntgagactgtctaaaaaaaaaaaaaaaaaaaaagagagaatggggcacccccgtcttagaactgaaaaattcagttctactttgcttagcagtgaatacttttgtccaaggtactctggcaggaggaaaaggcgtgtcctcttgagttcttgacttgggctctggcctgtaaatattcccatgtgggtgaaaccagaggcagcactctaggtgcccgaacttttaggcagcgcagccctcctagtcttatggaccattcttgaggcagaagaaacctgagttccaccctttttcatttttattagattgaccaaacagatcctggtgggacagtgtacccaaggtcacccagccaaaaggctgagcaggattgtacgtcaaatccgttaacctc

SEQ ID NO: 587621 - DNA, 391 bp, Homo sapiens
ggtagactatagtgacaccgagtcaagtacacctagtagtccttttcctaggtcgaaggaagacttttccgctagaaggacaaacacctattctgtcagggtgtcaggtcggattgataccctgtcgaaatgctcttcctttttctacttctacctaagaatatacaccggatgtcgcctctcttgtgaaaaccgaagactcccggtaacgacccgatccacgtggcattgacgaacacatagaacatttatcggtcggtaaaagtcaataatatggtcttggagaagtgtatctggataatcacgtaaacattgacctaaataaagaattatataaccttccaaaacaaaggaatctgatcatttaatagtatgtctcaaaataaaactc

SEQ ID NO: 587622 - DNA, 305 bp, Homo sapiens
cttctgggcataagagcttttatgcacaggtgccggagacgatgccagttgccccttggttcatgcattaggcgtccagcacagagccgcagtcggcgtgtcaccttgccagggacagtgtggggcttgacgatcctgttcccccagtagcctctgtgcacggggacgatagagagcttggccaggatgatggccccacggatagcggttgccacctccttggagcacttaacacccagaccgacgtgggcattgtaatccccgatagcgacaaatgccttgagctcttattgcccaggctggag

SEQ ID NO: 587623 - DNA, 145 bp, Homo sapiens
ggcttatttacttagctatagatgtttcaaatcatccatattatagcttctgtatgaatttccttatttttgttttttgtttgtttgttttttgagacagcgtttcactcttgttgcccaggctggactgcaatggcaggatctc

SEQ ID NO: 587624 - DNA, 151 bp, Homo sapiens
gctggccggtggccccgtaatatccgaacggggcctcgcctggctcaacaactcaagaacctccgaagctggacatatcggacctcccatgccgtgtccatccttgacttaagtaagttattgggtggaggagatgtgcccaattggaagg

SEQ ID NO: 587625 - DNA, 188 bp, Homo sapiens
  misc_feature (156)..(156): n is a, c, g, or t
tgtggctctagaggatcctaaattgaggtccgggtggacacaagaggaccatattgaatgaccgctgccgaggaggggggcctgcaagcagcagtgccgagacacgggtgatgaggtggtctgctcctgctttcgtgggctaccatgctgctgtcntgatggtgtctccctgtgacagatgtcaactg

SEQ ID NO: 587626 - DNA, 344 bp, Homo sapiens
ctgtctggttcagggtcagtttttttgcctcaggtctgaccagccaaggtggcccaggaattcactgcaggccaggtccggtggctcacgcctgtaatcccagcactttggaatgctgaagcaggaagatcgcttgagccccaggagtttgagaccagcctgggcaacacggcgaaacctggtctttacagaaattagccaggtgtggtggcggacgcctgtagtcccagcaactcgggaggctgaggtgggaggatcacctgagcccagggaagtcgaggcttcagtgagccgtgatcatgccactgcactccagcgtgggtgaccgagtgagatcttttctc

SEQ ID NO: 587627 - DNA, 212 bp, Homo sapiens
acccggcatctggaccttcttcttcctcctttcccccttcctcttctttaacttcaggtgcagttgctttcagtggagacttttgggcagctacttcttcttcttcagctctcgggctcctcttccttttcttctgctgctctctttcttctcttccttcatggaaacggccaattcctctgtcatggctgtcagggcctcttccattcctg

SEQ ID NO: 587628 - DNA, 158 bp, Homo sapiens
atcccctccgcgttgatgagcatgcacctgtaatcccagctacttgggaggctgatgtgtgggatgattggaggatcgcttgtagttcaggaggttgaggctgcagtgagccgagaatcgtgccactgcgactgttagcctgcagtgctagtgacatc

SEQ ID NO: 587629 - DNA, 139 bp, Homo sapiens
gccagcatggatgacatctacaaggctgcgggtagagcagtgacaagaggagcagaaaaatgacgttcaaggcagcttctgacatattcgtgctggcgctgaggatggctgcatcagcaccaaggagctggcaaggtga

SEQ ID NO: 587630 - DNA, 1014 bp, Homo sapiens
cctgtcgtttctgtgtgggtggtttttgtcttctcctcctctagcgcgtcgggcgggcgctcggccgcccgccggcgccgtgagttgtgcgttttttcggtgggtgtttacagttggcggattgcttgcgctgctccgcccacccctcttctgtttccgtgttacggcggtcgctcggtggggcaagtccctgccgctcctcgcgccgtgttcgcccgccccttgtgtggcgttgttctctttgtcttttggcgtccagtcgttgcgcccgccctctctccccctcccctcatcttgggttttctttgtttgcttgccccgcgctccgctaacgtcttcctcctcttctgtgccgcccctgtgcgtctttgttgtattgcgcgctctctctgtcgtgccgacggctttgtcttggttctgtcccccgggtccgcgctttttttattagtgcaggacgggcgcggttctcgttctctcttcctcgctcggggtagcagtcgttccgcgccgttggctgtttccagatatgtggtttccctctcgctcctctcttctttggctcgcgcgtacgcctaaatcaatcggtaattaatcttactcttccaccacgtctctccacaatgcttctatccactctcgttctctctatataagaagaccaatgccttcacacgtggtgctcttccagatactagatatttccttttaaactttttgtaaaaaagtcacaaatatgattggctcatacaaccacactttcacctcttttcaatccatgcatctcccacccagttccacgattagaaatatttttgcttaccacacacactcacggtgactcataatctcattagaaactgaattgatgagaagtataatgggaaaaggaatgagaacctgtggctctagcgcacgcttacagaagggaaatcatctatatatagagccaatggatttatttcatgacagggaaaaggataaaaccagtgcaatttaattagaacaggaaagagg

SEQ ID NO: 587631 - DNA, 609 bp, Homo sapiens
tggaaacggaatcttgctctgttgcccagtctggattgcggggcttgatctcggctcgctgaacctctgcctccggggctcaaaaaattctccctggcttctgcctccagagtagcggggattacagatgcccgccaccacgcccagctaatttttggtattttaagtagcgacggagtttcactatgttggccaggctggtctcgaactccgtggcctaagggtggtctgcccaccttggcctcccaaagtgctgggattacagggcgtgggccagggcgccgggcctccaagaaacttttttatgaagaccacctccgtgggtaccccattgttgacttgaaacagggtctgctaaaaatcaggggctctccaacagagccgatatgcaggggacattctcagcattctctaatgggacacttgtcaaagggaccagaatgttagaatcatcttggcctaggaatgggtagtttaaaattttcacatttatgcggggagggtgtgtatacgttatttttcccgcaaaccaaaaataacttctaaatccccaaaagcggtgaatggacccctgtctgggcccagggatctcaaaggaacctgaaaacg

SEQ ID NO: 587632 - DNA, 167 bp, Homo sapiens
cagtattcgaatcgagctggtaccaaatgacgattgggtatctcctagtagcgcgcaaccatcaactgtcatgtccagttcccaatcagcacaccccctgatagttatctgtcttcgatttggtagtagttagctacgggcaatagcacgagggggatagtcccata

SEQ ID NO: 587633 - DNA, 173 bp, Homo sapiens
cccttgattgccaggggctgggggttaagcagggtggtggaaatagggaatgactctttatgggtataaagtttactttttgggactggaagtttattccagtgttcattttagttccggacctgcaccaagtggtgattggttgtgcaacactgtacgtgtactttagggta

SEQ ID NO: 587634 - DNA, 202 bp, Homo sapiens
gccgttgtaactcagtccttgttcgaggtgccgcagatgaaaatacccgtcactataagagaattctgaagaagtcagaaaaaaaagtcgattttgtcttctccaacaaatagaaagtgggtcaggtaattctgcgaaaagacagcctttatgcatagggatttcgccttctggattacggagccctactacattataataa

SEQ ID NO: 587635 - DNA, 352 bp, Homo sapiens
tctagatccaagagaacaaagaaagaggctgtgacagtctaatatatggttccccagtttcagccttggagtgtaccatccgtctgttagcaaagctctaagaccaaatgggctcccactccagggaacgtcccccttcccacaggggcgggggagatggagtccggggctgtgccgccctctggtagcagcacgtgaaggcgcacaggaggcctcaatgttctccggggccctgggatagccatgcagagaggcggaggtcctttatgtgccagagtaggctgctgtcgagggactgcggttctgctcgaggtgtgccgtatcggtgtatagaagcagaacgtcacatcag

SEQ ID NO: 587636 - DNA, 896 bp, Homo sapiens
ggggaaaatggtagcgatggcggctgggccgagtgggtgtctggtgccggcgttgggctacggttgtgtggcgactgtgcttcaagcggtgtctgctttggggcagagttttcatcggaggcatgcagagagttaggcttttctagcaaactttgcttgtgcagctctggtgatcttctcggacagttcaaccctgcttcagtgtggatcctgatgtgcagaggatgcttgtcaggaggaagcacaattgtgaaacccaaaaagctgtatgcaggagctattcttgaagttgtggatgaacaatggggaaggttccctcaagtccaagctttgttaggagtgataaaccaaatgttcagaggactgcaaaatcaatgtaatgtccgtgggttaagacccgtgtattaaaaggctttggaccgacaattgggaacaatttgcttgaagaactgagcattctcaaattggaacacagacagtgtagaagaattcctgagtgaaaagttggacgcatataaatctgtgttaaattttgtcctatccttttgttaccttatccaatgaatattacatgactaggaaaataatttagttgtgttgttcccattggatcagtcttttactggaggcttaaatatctaattaactcgtgaaaggcagtatgtcagattctaggagttgcaggttaaaaaaccatttttaaatgtcatcttcgattggtggtacactataaaatgtttgaaagacggtggtatatgacatgtggtgggaatgtgcacttggacaccgatttaatgaggggtagagagtaaaagggcgtgggggctggaaggggaaagaaaaatgtggaagttgtgaactttgtgggtaagtatgatgggaagtgtggtaagaag

SEQ ID NO: 587637 - DNA, 1093 bp, Homo sapiens
gttcttgttcttaggggatttgttcttttgctagttgcttgttcttgtgtcttgccttgatgttatcggtgcagtggtgatccttgtgttacatcgttctgctggtgttcttggtgcgtttatggtgtggtgttttgctcttcttatccggtggcttgtttggtgtttgtctgtgtatctctctgtgttgtgtcggcttgttctctttgtgggtccttctttttgggtttgcattataggtcaatgtgtaggagtgctttccggtgtggcttatacgcgctgccctaccttgggagattcttaatggttgtcgttctgcactgctatgtgtgttgtgttagggccagaatatatctgttggttctacatgactgagttgctccaacatgcatctgcccgccggagtaaggaagttttccatctagggtacctctctgtttcgcttatccatggagacttaggcaattgagtgtaagtggctggagtatttcttttacaagatgggttctagatataaggatactcctccgtgagctgtactgtcacaaggttacattggaggcgtcgcatgattgagggccttatggatagcttctgttaatgtctcgcttgctagtcttgatgtctcgaatgccatggttttggaaatcaagatacccgcatgggaacttggagatgagtctgtgtctgggtcctggagctggtgattgacatcgagtttgagctgctgacctgtggattagtgatagtgagagtttggacgatcctggtagcagaagtccatttaccttctgggccagataccaccagtatgcccgctccagattccctcagaccttttccggtcccattattggtccatggtggtacagccagtgccaacttctctgccaactttggtgcctttggtttcttctgggcttgagtgagatgttggatattgctatcaatcgcagtagtctttcccctgtgtgagtcctgaagcctcagattcacttcgtaaacacagctattctagagagccacatcctgtgaactgatactggcatgcaagataaatttattgctgttccttaatcctgtggttgtcccc

SEQ ID NO: 587638 - DNA, 327 bp, Homo sapiens
tccagaatagtcaccgcggcaaattacctccaccacctccaaagttccctccgcgaccataaaattgccagatccacctccacataaaagggaaaaaaggcaaagaaaaaaaaaaaaaaaacaaaaaacgaaacaattgaaaaacaaaaacacccctaaaccccccaaaacaaggtagtgcatttccccagggggaaggggattttacactggagccgttgggaccggaacggagatctcccggctacagaaccctgcgaaggaaagacactcaaagacagaaaaagaaccacaaagggaaacaaaatagatcaccaggcaatctgg

SEQ ID NO: 587639 - DNA, 939 bp, Homo sapiens
atacggcaggtcgaggcccggttttaattcggcaccgaggcttagcagcaaagggtgatcagatgatttctgttaactgtgtgtataaaggtggcccatgtcgccctcagtgatggtgcccattgatgctgtggacggacacagaaggacctcctgggagccagtggggctcatgctgctgcttccccccaaaatgaagagtgaggacatggcagaggaggacgtgtactggccgtcggcttgatgcggcctcatgcagctcctggctggctaagcccttccagcctgcgcttcctctgatggttcttgtgcctagcccaggagggtgacgccgttgagaaggaaggtagaagatggtctgatgctacagggacttggtttcagctaagctgatgtcaaattacactgttagccggaggatccctgataccgattaatgatctacaaggtttcaactaaggttctgcaagcagtgctgtggctggtttcgccaactgcgccccattcccttgagctctgctgccagactctcattcagtacgtcgaagacgggattggccatgagtttagtgggcgcttcttccatgacagaagagagaggcgtctgggcggtccttgcttctcaggatgcctggggccatcattgactgtttaacaggtgtgctgcagttccttggttctgtggtgttcctcctgaacaagctggtgtgaactgtcccttggctgtcacgtgagtttgtgaaggcaccagggggccagcccgggttggtttcctcacctggggctgggaattggcccagaagagactgggcctgtgttaaagccacggcttgtggtccgggtacccacagttcccgcgaatgggccttctcaccccttgggggcccctcggttccccgcgtggtcccctgggtggcacaacccgtccaaatccccgtc

SEQ ID NO: 587640 - DNA, 644 bp, Homo sapiens
agtgccgggtgttgtgtcgccttttttcgctggcggtggcatctccttgtcccccattgttttgttgccattgattgttggggttcgtctggtgtgtattgggggaggcttttctgcccgttgtggttgtgccggcctctcctcgttatggcgtccttgtcccccttttggtggtgccctctttgcccgctcgatgcccccgtgtatcgggaacccagttcgcgcctccgctcttgttgattgtttataaggatggctgtttacgcggactgcgtctcgtccgcggcgatttgaggtcacctctgctggtggaattctttcgtgctctcccccgccacatttcatcctctggtttccctcctactttgtgccccctcgcgctactcgtctacgcgccttccctttttacgcgtcctacccgcacgtcggtcggtgcacactcgtgtttccctctcctcctgtgcactatcagatctagtgtggcccccaatggttgttggaccactgtgggctcctgctgcgatgttgtgggtggacgtatattcttttctcatgtcgcctaccgaagatttctccgccgctcgtttttgctctgtagcccccggcgggcactgtggctctctcggccgaacaatagtcagaaa

SEQ ID NO: 587641 - DNA, 390 bp, Homo sapiens
tgctcatcacccagtcctggccattttcttgcctgaggctcaagaggcccagggagcaatgggagggggctccatggaggaggtgtcccaagctttgaatacccccagagaccttttctctcccataccatcactgagtggcttgtgattctgggatggaccctcgcagcaggtgcaagagacagagcccccaagcctctcgcaaggggcccacaaaggggagaaggccagccctacatcttcagctcccatagcgctggctcaggaagaaccccaagcaacattcaacacaccacaagggaatttccaatatataaaacatgccaccctctaaatacacaacctaaagttgtaaagagataattaattaaaaatgaaaacagtattccc

SEQ ID NO: 587642 - DNA, 107 bp, Homo sapiens
gtcccatcagccttgcttttagcaggcaatgccaaaatctacccaatttgtgcttgcatctctttctccagaatacagtactttttatttttgagattctaaaccta

SEQ ID NO: 587643 - DNA, 295 bp, Homo sapiens
cataactgccactaactgctctctcctcaggattcctggcctccatttggccccagtccctgccaatccccttggaaataaaatttctgctcctcacagagtgcccaggccgggccttccttgcagccttcttcatccatgtcactgacgcctctggattctctcaacgacgaacctctcacctctgtgcggccgcgctgagcatcagatgtcctcagcaaatccttagtccacactcagtttcagtatcacatattctaacagtgggcatcatcagaaggggggccacggtaca

SEQ ID NO: 587644 - DNA, 819 bp, Homo sapiens
  misc_feature (344)..(344): n is a, c, g, or t
  misc_feature (377)..(377): n is a, c, g, or t
  misc_feature (379)..(379): n is a, c, g, or t
  misc_feature (383)..(383): n is a, c, g, or t
  misc_feature (393)..(393): n is a, c, g, or t
  misc_feature (396)..(396): n is a, c, g, or t
  misc_feature (406)..(406): n is a, c, g, or t
  misc_feature (420)..(420): n is a, c, g, or t
  misc_feature (427)..(427): n is a, c, g, or t
tgctggcggaggttcgaggacgggcgaggccctctggccctggcctcagaacttccaaactccgaccagcgctacgtcctttagcccgaacaactttcaattccagtacgatgtcagctcggcgtgcaaggccgggtgtcagtcctcgagcgagagccttccagcgctatcgtgacctgcttgtaccggctccgggtcttggcccgtctcttacctcacagggaagcggcatacactggcgaagaatgtgtggtgtctctgtagtcacacctggatgtaaccagcttcctacttatggagtcaggtggagaattataccctgaccataaatgatgaccagtgtnactcctctctgagactgtctggggagctctccnangtcnggagactttnagncagcttgttnggaaatctgctganggcacantctttatcaacaagactgagattgaggactttccccgcttccctcaccggggcttgcgtgtggatacatctcgccattaactgccactctcatagcatcctggacactctgagatgtcatggcgtacaataaaattgaccgtgttccatggcatctggtagatgatccttcttccatatgagaggttcagttttccagaggtcatgagaagggggtctaaaccctgtacccacatttacagccggtgtgacggggtcttgatacgccggtccgggttccggtgtggcaagttggaccctggccctttgcggggcggtccggtatggcctgactgggggcctggttgcggagccagcaactagttggcgcttaaagcgcccttttcggggggc

SEQ ID NO: 587645 - DNA, 792 bp, Homo sapiens
gataaaccacgagtcacctgcctgtcgtatagtagaagccggtgcaggtagcccataaccggggccatctaaggctgacctagtgagctaggggattatgatgtgatttgagctatctcggtccatgagagagaacatccgtcagtacaatagaggcgtacttactgaatgacagctagccatatacacgaggtgtcggcgctacatggcacccgagacagcacatggcaagggcgacgaaggagaactgtccgataacatgggtgcgttcggggtgactaactccctattgtctctttcgtcatgatgttgcctgtgcgtccagctgcgcatctaagcctgcaggcgcttttccacccatgtccggtggctcagccggttcaccagccaccgtttgggatgccactttgggccctgaagtcgtggcatcaggcgctcgccttttatctgccttaccattctccctctggtagcctctcttcgcccttgggtccaactcccgggtgtgagggggttgacccttttcccaggtgttatttagaacctgatgggggctccacccctaatagttattcaaaggtagctttccgtaatttcacgtgaggtctcatatatttaccctccatacaaagcctcagagtacttcgagttctccctttcaccatttccgacggaatctacggctcaaaattatttgtaggcacaggctttccacggaactccaagtcattataggatcaagtgtcgtcacatctgctacaccgacaataatattcagttacatccaactct

SEQ ID NO: 587646 - DNA, 794 bp, Homo sapiens
tcgccgtgtaccaggcagggttctgccaggctctatcgccaatggagcaggggctccacctggggcctaggacgcctgaaatagccctcttttagccccaagggcctggggcttcagcgctccccggatccctcgctctgcagtggtcttcccggtaccgcgcaggccgcttggggaagctgctttcgctcttaaccttgcaggtgcgtggtgccgcgggcgcccggggcaggcaggacgcagaggaggaggcgcccgccaatgcccggcctgggttccccgcctcggttcccgtccgccgcccccgggaacggcctgttgcagccccttgtgaccgaggaagaggctggcggctggcggcggagggatggaggagggtgccgcccctttggcaagctccccgacccggcggcctcggataggaacccattggcggattcctcgcccgactgtccctgcggaacggcgggcccccgggcgccgggccctcggcccccctcgcgagacgccgaggcatcgcgctcccgggctccgagtccggagggagcgccgagcttgtcgtttgacgccggggccccgtaaccaaaggaccccggctcgatacggggaaagacactgccagctgttgagggctgcccgttggggccgcgggcgtccatcgaagcacgcccagtgtggagcaccgggtcccgtgcgggccgaaccccgttgcagagcatcgggctcaagtaaggggtgtcacattggacacaggattacaaggggcaaaaaactgttcccaagggatgggatat

SEQ ID NO: 587647 - DNA, 188 bp, Homo sapiens
acaccgtgaccaatgtccactcagaacacctgagagcaccagacaatctactctacacatcaaccaggatacagaatcatcattctgccatcagcacatatcagacttgcatacaagtaagacctgctactatcccttcaacgaggaaaaacaaaacaaaaccccaaaaaacaaacccaccaaacccc

SEQ ID NO: 587648 - DNA, 392 bp, Homo sapiens
  misc_feature (128)..(128): n is a, c, g, or t
gtatatgaggccataccttaattagcctcaattataacccattcccacaaatatacatatttcaaacatcctgcccttcccatgcaccctacacatcaagaattactgggagaataggccgggcacgngtgtcacgcctgtaatcccagcacttcgggagactgaggcaggcggatcatgaggtcaggagttcgagaccagcatggccaacatggtgaaacctcgtctctactaaaaacacaaaaattagctgggtgtagtgcgggcgcctgtaattccggctgcttgggaggctgaggcaggagagccgtttgaacccaggagacggaggtttcagtgagccgagatcgcaccattacactccagcctgggcgacagggtgagattctgtc

SEQ ID NO: 587649 - DNA, 860 bp, Homo sapiens
  misc_feature (24)..(24): n is a, c, g, or t
  misc_feature (70)..(70): n is a, c, g, or t
  misc_feature (98)..(98): n is a, c, g, or t
  misc_feature (101)..(101): n is a, c, g, or t
  misc_feature (114)..(114): n is a, c, g, or t
  misc_feature (146)..(146): n is a, c, g, or t
  misc_feature (148)..(148): n is a, c, g, or t
  misc_feature (168)..(168): n is a, c, g, or t
  misc_feature (194)..(195): n is a, c, g, or t
  misc_feature (211)..(212): n is a, c, g, or t
  misc_feature (219)..(219): n is a, c, g, or t
  misc_feature (222)..(222): n is a, c, g, or t
  misc_feature (228)..(230): n is a, c, g, or t
  misc_feature (233)..(233): n is a, c, g, or t
  misc_feature (241)..(243): n is a, c, g, or t
  misc_feature (250)..(250): n is a, c, g, or t
  misc_feature (257)..(257): n is a, c, g, or t
  misc_feature (284)..(284): n is a, c, g, or t
  misc_feature (288)..(288): n is a, c, g, or t
  misc_feature (305)..(305): n is a, c, g, or t
  misc_feature (314)..(314): n is a, c, g, or t
  misc_feature (321)..(321): n is a, c, g, or t
  misc_feature (332)..(333): n is a, c, g, or t
  misc_feature (337)..(337): n is a, c, g, or t
  misc_feature (342)..(343): n is a, c, g, or t
  misc_feature (365)..(365): n is a, c, g, or t
  misc_feature (395)..(395): n is a, c, g, or t
  misc_feature (399)..(399): n is a, c, g, or t
  misc_feature (481)..(481): n is a, c, g, or t
  misc_feature (493)..(493): n is a, c, g, or t
  misc_feature (495)..(495): n is a, c, g, or t
  misc_feature (634)..(634): n is a, c, g, or t
  misc_feature (641)..(641): n is a, c, g, or t
  misc_feature (646)..(647): n is a, c, g, or t
  misc_feature (650)..(650): n is a, c, g, or t
  misc_feature (696)..(698): n is a, c, g, or t
  misc_feature (700)..(702): n is a, c, g, or t
  misc_feature (704)..(705): n is a, c, g, or t
  misc_feature (708)..(709): n is a, c, g, or t
  misc_feature (712)..(712): n is a, c, g, or t
  misc_feature (730)..(730): n is a, c, g, or t
  misc_feature (752)..(752): n is a, c, g, or t
  misc_feature (773)..(773): n is a, c, g, or t
  misc_feature (784)..(784): n is a, c, g, or t
  misc_feature (806)..(806): n is a, c, g, or t
ttgaaagtacaagctccagagganaattgggtctttaaatatacacaagtatttccatcaaatgaatttncacccttacatccaaatagacctaggcngtnaaaaacataaganaaataagacctattagctatgtattaactgananaccacatacaaaccaaagantatggaagccagaaagacggcctggnnggccacccgttggcgnnggggggnggngtgacnnngtngggggcgnnncccatcncacttgntgtactaatggctccaatccatttaantgtnggccagttaaacttagnccttaaaangcggggnggggggggggnntaancgggnngggcatagctttcacctaagangtagctccttcggggtaaaatggatacagncacngcttcatgttcttcaccttgcttttcataactgttttgtgtttaaatggattccacttaaaaataatctcctataggggagnggggccttttcncncccatccaagcacacaccatacccaccacccccccccccccttgctgttatccaaatttaagtcaataagaaaagcttttagtctcacacctaggtaatgcctgtggagctggtcttgtcacacacacacttctctgcnagggggnggtgnnggngcgagaagtacagtatttctagtttgttgttccaagtatgtacaannngnnntnntgnngtntcaggtaaacatgtgcanaggggaagatgaggcgtgggcncatagaaagcagtcaaatggnaatcaaaaggnctttctctttcagagttccccnatctttatttgtagaggttatccaataatttctttaattacatcgcattttttt

SEQ ID NO: 587650 - DNA, 340 bp, Homo sapiens
aaggatcccccctggcttgctcaggtctgccacagtttctgcagtccattggggcctggaagtggccagggcactctgggccggggtccacggagcagactccagtcctgagtcccctgtgccccatgtacccactctgcccaccatgatggtgctgcaggctggttcctcccggccctgtgcacgaggtgctgaaggacactggtcgtcttcgatcccctgccatgccctcccgctgctcaatgtatcttcctcccagtcaccctgtgtctgcaggatgcaaatcctgcagaccggcgatgtccttcgctggcccctgtaccaatcgtacccgccgttg

SEQ ID NO: 587651 - DNA, 1416 bp, Homo sapiens
tgcctccgggtcgcggtcattttgagcccctgtctggatgacttcttgcggctgttctacccctccccctccccgcggtaccttgcacttttctccctccctgccccctctcgagtccaccctccgggccttctgcccctgatcgcttggttttccttgcagtcgcctgctgctgtcgtcgggaggaaagatgaatgggagggctgattttcgagagccgaatgcagaggttccaagaccaattccccacatagggcctgattacattccaacagaggaagaaaggagagtcttcgcagaatgcaatgatgaaagcttctggttcagatctgtgcctttggctgcaacaagtatgttgattactcaaggattaattagtaaaggaatactttcaagtcatcccaaatatggttccatccctaaacttatacttgcttgtatcatgggatactttgctggaaaactttcttatgtgaaaacttgccaagagaaattcaagaaacttgaaaattccccccttggagaagctttacgatcaggacaagcacgacgatcttcaccacctgggcactattatcaaaagtcaaaatatgactcaagtgtgagtggtcaatcatcttttgtgacatccccagcagcagacaacatagaaatgcttcctcattatgagccaattccattcagttcttctatgaatgaatctgctcccactggtattactgatcatattgtccaaggacctgatcccaaccttgaagaaagtcctaaaagaaaaaatattacatatgaggaattaaggaataagaacagagagtcatatgaagtatctttaacacaaaagactgacccctcagtcaggcctatgcatgaaagagtgccaaaaaaagaagtcaaagtaaacaagtatggagatacttgggatgagtgaaaaattacatcattggacatgaaggagtttcaacatccagcttcatctaggtggtcatgattacctgcatgctttgagctcagcagcagtcttcataaacacatttaaaacaagatcctgggtttttgtggtttgacttctatggtgttttaaaaaaacacagatttttagtgttaatattgtgtaaatgtactcaccttagggattcatttgaatgatggtattataccatgattgtatacagtttgtgaaattgttgcaagggcaaagataactcttaaaaaaccgtcgagattacaatgctctagaatcagcatataagaaaataaatgatatctgcatgttgaattggggtggatggggggagcaagcataatttttaagtgtgaagctttgcatcaagaaattattaaaaagctttttttctccagtattttctgtattatcttaatgtttatggcaaataaaatgtaaaggaacatgccaaa

SEQ ID NO: 587652 - DNA, 1407 bp, Homo sapiens
gattgcctcgagccagattcgcacgacggagacttcttgcggctgttctacccctccccctccccgcggtaccttgcacttttctccctccctgccccctctcgagtccaccctccgggccttctgcccctgatcgcttggttttccttgcagtcgcctgctgctgtcgtcgggaggaaagatgaatgggagggctgattttcgagagccgaatgcagaggttccaagaccaattccccacatagggcctgattacattccaacagaggaagaaaggagagtcttcgcagaatgcaatgatgaaagcttctggttcagatctgtgcctttggctgcaacaagtatgttgattactcaaggattaattagtaaaggaatactttcaagtcatcccaaatatggttccatccctaaacttatacttgcttgtatcatgggatactttgctggaaaactttcttatgtgaaaacttgccaagagaaattcaagaaacttgaaaattccccccttggagaagctttacgatcaggacaagcacgacgatcttcaccacctgggcactattatcaaaagtcaaaatatgactcaagtgtgagtggtcaatcatcttttgtgacatccccagcagcagacaacatagaaatgcttcctcattatgagccaattccattcagttcttctatgaatgaatctgctcccactggtattactgatcatattgtccaaggacctgatcccaaccttgaagaaagtcctaaaagaaaaaatattacatatgaggaattaaggaataagaacagagagtcatatgaagtatctttaacacaaaagactgacccctcagtcaggcctatgcatgaaagagtgccaaaaaaagaagtcaaagtaaacaagtatggagatacttgggatgagtgaaaaattacatcattggacatgaaggagtttcaacatccagcttcatctaggtggtcatgattacctgcatgctttgagctcagcagcagtcttcataaacacatttaaaacaagatcctgggtttttgtggtttgacttctatggtgttttaaaaaaacacagatttttagtgttaatattgtgtaaatgtactcaccttagggattcatttgaatgatggtattataccatgattgtatacagtttgtgaaattgttgcaagggcaaagataactcttaaaaaaccgtcgagattacaatgctctagaatcagcatataagaaaataaatgatatctgcatgttgaattggggtggatggggggagcaagcataatttttaagtgtgaagctttgcatcaagaaattattaaaaagctttttttctccagtattttctgtattatcttaatgtttatggcaaataaaatgtaaaggaacatgccaaa

SEQ ID NO: 587653 - DNA, 983 bp, Homo sapiens
gaaccggtgtttgacttgtcggagctcgcacaatttccatgaccactattgaaccgctgcgtgcgttgtccctggcatgccagtctactccggaagtcacagcagttatcgtgaccagacattgataattgcacctctatatcgtgcctatcgaccatgttctgctcgttggactaggatgatcgccccgctggtaatgctgactgcgcatcgtcaaatggccgaacaaggaacatcacccaaaggaaccatggatagaataaatatgctattctgtggaacaagtcgtactagctcacccagtcacccgtacatgctcgctacaaggtcacctcctggagtgatcatccccccttggaccgcaactgaacggtcagcctaaggatgattctctctggaagatccatgcatcattaaacgcaaggcaccgattctagaagagccattggatgcaaagatatcttgattgaatggagaatgagcaaggaacgagagtcgccgaaaaccatacgtgggattttccctccccaggaagagcctggccaggtttctcaaggcatggctcctaaggtcttttcgattgcagttgacatcagttattcaaagggaccgaggacagatgtagagcccgggaggccaggcaatggccttatagttgtctacgcacgtggcagagaggaccctcagggacgttactgacttctatcacgcgaactatttcctgtggtccccgacgtggcgtccccattataagttccatttgctttttttggtactttcaccccagtggttgtggacgcggacgatttacaccacaccgttggggcggccctggcgcaaaaaaacgttgtttacccttgggggggtcccctgggggatagggacccttccccttctgtttggtgtggtgcccatttggtgcccctatttgcctacgaatatttagcggctgcctacggccgtcgtaatcagcgcgactggga

SEQ ID NO: 587654 - DNA, 1308 bp, Homo sapiens
tgcctccgggtcgcggtcattttgagcccctgtctggatgacttcttgcggctgttctacccctccccctccccgcggtaccttgcacttttctccctccctgccccctctcgagtccaccctccgggccttctgcccctgatcgcttggttttccttgcagtcgcctgctgctgtcgtcgggaggaaagatgaatgggagggctgattttcgagagccgaatgcagaggttccaagaccaattccccacatagggcctgattacattccaacagaggaagaaaggagagtcttcgcagaatgcaatgatgaaagcttctggttcagatctgtgcctttggctgcaacaagtatgttgattactcaaggattaattagtaaaggaatactttcaagtcatcccaaatatggttccatccctaaacttatacttgcttgtatcatgggatactttgctggaaaactttcttatgtgaaaacttgccaagagaaattcaagaaacttgaaaattccccccttggagaagctttacgatcaggacaagcacgacgatcttcaccacctgggcactattatcaaaagtcaaaatatgactcaagtgtgagtggtcaatcatcttttgtgacatccccagcagcagacaacatagaaatgcttcctcattatgagccaattccattcagttcttctatgaatgaatctgctcccactggtattactgatcatattgtccaaggtagaaacttctcttgaaatgaatttcaacattttatggtccaactcaaagtaaacaagtatggagatacttgggatgagtgaaaaattacatcattggacatgaaggagtttcaacatccagcttcatctaggtggtcatgattacctgcatgctttgagctcagcagcagtcttcataaacacatttaaaacaagatcctgggtttttgtggtttgacttctatggtgttttaaaaaaacacagatttttagtgttaatattgtgtaaatgtactcaccttagggattcatttgaatgatggtattataccatgattgtatacagtttgtgaaattgttgcaagggcaaagataactcttaaaaaaccgtcgagattacaatgctctagaatcagcatataagaaaataaatgatatctgcatgttgaattggggtggatggggggagcaagcataatttttaagtgtgaagctttgcatcaagaaattattaaaaagctttttttctccagtattttctgtattatcttaatgtttatggcaaataaaatgtaaaggaacatgccaaa

SEQ ID NO: 587655 - DNA, 129 bp, Homo sapiens
caatatgagagtgctggagcatgtgcgagagcgtgtgcgtactgtgaacgtgtaacagacatgtgagatacatgtggtgtagagcctgtgaacatgtaatgtgtgtgagagcatgtgtaggaggcgtac

SEQ ID NO: 587656 - DNA, 572 bp, Homo sapiens
gattgcctcgagccagattcgcacgacggagactctgcgctgtctaccctcccctcccgcggtaggtaccttgcacttttctccctccctgccccctctcgagtccaccctccgggccttctgcccctgatcgcttggttttccttgcagtcgcctgctgctgtcgtcgggaggaaagatgaatgggagggctgattttcgagagccgaatgcagaggttccaagaccaattccccacatagggcctgattacattccaacagaggaagaaaggagagtcttcgcagaatgcaatgatgaaagcttctggttcagatctgtgcctttggctgcaacaagtatgttgattactcaaggattaattagtaaaggaatactttcaagtcatcccaaatatggttccatccctaaacttatacttgcttgtatcatgggatactttgctggaaaactttcttatgtgaaaacttgccaagagaaattcaagaaattattaaaaagctttttttctccagtattttctgtattatcttaatgtttatggcaaataaaatgtaaaggaacatgccaaa

SEQ ID NO: 587657 - DNA, 1264 bp, Homo sapiens
tgcctccgggtcgcggtcattttgagcccctgtctggatgacttcttgcggctgttctacccctccccctccccgcggtaccttgcacttttctccctccctgccccctctcgagtccaccctccgggccttctgcccctgatcgcttggttttccttgcagtcgcctgctgctgtcgtcgggaggaaagatgaatgggagggctgattttcgagagccgaatgcagaggttccaagaccaattccccacatagggcctgattacattccaacagaggaagaaaggagagtcttcgcagaatgcaatgatgaaagcttctggttcagatctgtgcctttggctgcaacaagtatgttgattactcaaggattaattagtaaaggaatactttcaagtcatcccaaatatggttccatccctaaacttatacttgcttgtatcatgggatactttgctggaaaactttcttatgtgaaaacttgccaagagaaattcaagaaacttgaaaattccccccttggagaagctttacgatcaggacaagcacgacgatcttcaccacctgggcactattatcaaaagtcaaaatatgactcaagtgtgagtggtcaatcatcttttgtgacatccccagcagcagacaacatagaaatgcttcctcattatgagccaattccattcagttcttctatgaatgaatctgctcccactggtattactgatcatattgtccaaggtcaaagtaaacaagtatggagatacttgggatgagtgaaaaattacatcattggacatgaaggagtttcaacatccagcttcatctaggtggtcatgattacctgcatgctttgagctcagcagcagtcttcataaacacatttaaaacaagatcctgggtttttgtggtttgacttctatggtgttttaaaaaaacacagatttttagtgttaatattgtgtaaatgtactcaccttagggattcatttgaatgatggtattataccatgattgtatacagtttgtgaaattgttgcaagggcaaagataactcttaaaaaaccgtcgagattacaatgctctagaatcagcatataagaaaataaatgatatctgcatgttgaattggggtggatggggggagcaagcataatttttaagtgtgaagctttgcatcaagaaattattaaaaagctttttttctccagtattttctgtattatcttaatgtttatggcaaataaaatgtaaaggaacatgccaaa

SEQ ID NO: 587658 - DNA, 1663 bp, Homo sapiens
tgcctccgggtcgcggtcattttgagcccctgtctggatgacttcttgcggctgttctacccctccccctccccgcggtaccttgcacttttctccctccctgccccctctcgagtccaccctccgggccttctgcccctgatcgcttggttttccttgcagtcgcctgctgctgtcgtcgggaggtgggtgaggtgacgcaaacagccccgttgttgccctccgcgtatcccctcaccacctttgcggccatccacgactttcgcaccttccgccattttcctgcctgtgagggtggacagatcgcgctcgggtctcggcctcctgagtgccggtgactgcgggaggcgacggagtgcttctgggggtgtgagctggggaagttcgtggtcacggatgcgtgtggggttgctgctcagtctgtaacggcaggaaagatgaatgggagggctgattttcgagagccgaatgcagaggttccaagaccaattccccacatagggcctgattacattccaacagaggaagaaaggagagtcttcgcagaatgcaatgatgaaagcttctggttcagatctgtgcctttggctgcaacaagtatgttgattactcaaggattaattagtaaaggaatactttcaagtcatcccaaatatggttccatccctaaacttatacttgcttgtatcatgggatactttgctggaaaactttcttatgtgaaaacttgccaagagaaattcaagaaacttgaaaattccccccttggagaagctttacgatcaggacaagcacgacgatcttcaccacctgggcactattatcaaaagtcaaaatatgactcaagtgtgagtggtcaatcatcttttgtgacatccccagcagcagacaacatagaaatgcttcctcattatgagccaattccattcagttcttctatgaatgaatctgctcccactggtattactgatcatattgtccaaggacctgatcccaaccttgaagaaagtcctaaaagaaaaaatattacatatgaggaattaaggaataagaacagagagtcatatgaagtatctttaacacaaaagactgacccctcagtcaggcctatgcatgaaagagtgccaaaaaaagaagtcaaagtaaacaagtatggagatacttgggatgagtgaaaaattacatcattggacatgaaggagtttcaacatccagcttcatctaggtggtcatgattacctgcatgctttgagctcagcagcagtcttcataaacacatttaaaacaagatcctgggtttttgtggtttgacttctatggtgttttaaaaaaacacagatttttagtgttaatattgtgtaaatgtactcaccttagggattcatttgaatgatggtattataccatgattgtatacagtttgtgaaattgttgcaagggcaaagataactcttaaaaaaccgtcgagattacaatgctctagaatcagcatataagaaaataaatgatatctgcatgttgaattggggtggatggggggagcaagcataatttttaagtgtgaagctttgcatcaagaaattattaaaaagctttttttctccagtattttctgtattatcttaatgtttatggcaaataaaatgtaaaggaacatgccaaa

SEQ ID NO: 587659 - DNA, 326 bp, Homo sapiens
tcagaaccccctgcatacgcgtagcttatagtagatctcccgactaaacacataagataggtggcctagactaacagggaatgtagggagccaggtagagagccttcccggatatttaagcgtaaaaaattctaccgggagatactccttggatcaatataatgtctctcagtcaaagatgtaaaagcactttagccttaaaaagaatgttctgtttctaaatagagtcaacgttgtcctcctcattggaattcactatgagtcagaatcattagactgacttttttttttccatagtaatagtatatggcagagtctcacagagc

SEQ ID NO: 587660 - DNA, 982 bp, Homo sapiens
tgcctccgggtcgcggtcattttgagcccctgtctggatgacttcttgcggctgttctacccctccccctccccgcgtcgcctgctgctgtcgtcgggaggtgggtgaggtgacgcaaacagccccgttgttgccctccgcgtatcccctcaccacctttgcggccatccacgactttcgcaccttccgccattttcctgcctgtgagggtggacagatcgcgctcgggtctcggcctcctgagtgccggaggaaagatgaatgggagggctgattttcgagagccgaatgcagaggttccaagaccaattccccacatagggcctgattacattccaacagaggaagaaaggagagtcttcgcagaatgcaatgatgaaagcttctggttcagatctgtgcctttggctgcaacaagtatgttgattactcaaggattaattagtaaaggaatactttcaagtcatcccaaatatggttccatccctaaacttatacttgcttgtatcatgggatactttgctggaaaactttcttatgtgaaaacttgccaagagaaattcaagaaacttgaaaattccccccttggagaagctttacgatcaggacaagcacgacgatcttcaccacctgggcactattatcaaaagtcaaaatatgactcaagtgtgagtggtcaatcatcttttgtgacatccccagcagcagacaacatagaaatgcttcctcattatgagccaattccattcagttcttctatgaatgaatctgctcccactggtattactgatcatattgtccaaggtagaaacttctcttgaaatgaatttcaacattttatggtccaacgtatgtatcaaactttatttgatgacctttttctgcttggatatcacctgtgtgttctaccatcaatcatcaagctaaagtcagcatgtttgttccatttgtttcttcattccttcaacttttcttgagacca

SEQ ID NO: 587661 - DNA, 1699 bp, Homo sapiens
tgcctccgggtcgcggtcattttgagcccctgtctggatgacttcttgcggctgttctacccctccccctccccgcggtaccttgcacttttctccctccctgccccctctcgagtccaccctccgggccttctgcccctgatcgcttggttttccttgcagtcgcctgctgctgtcgtcgggaggtgggtgaggtgacgcaaacagccccgttgttgccctccgcgtatcccctcaccacctttgcggccatccacgactttcgcaccttccgccattttcctgcctgtgagggtggacagatcgcgctcgggtctcggcctcctgagtgccggtgactgcgggaggcgacggagtgcttctgggggtgtgagctggggaagttcgtggtcacggatgcgtgtggggttgctgctcagtctgtaacggcaggtgggagacggacactgggtggaggatggagtgcaggaaagatgaatgggagggctgattttcgagagccgaatgcagaggttccaagaccaattccccacatagggcctgattacattccaacagaggaagaaaggagagtcttcgcagaatgcaatgatgaaagcttctggttcagatctgtgcctttggctgcaacaagtatgttgattactcaaggattaattagtaaaggaatactttcaagtcatcccaaatatggttccatccctaaacttatacttgcttgtatcatgggatactttgctggaaaactttcttatgtgaaaacttgccaagagaaattcaagaaacttgaaaattccccccttggagaagctttacgatcaggacaagcacgacgatcttcaccacctgggcactattatcaaaagtcaaaatatgactcaagtgtgagtggtcaatcatcttttgtgacatccccagcagcagacaacatagaaatgcttcctcattatgagccaattccattcagttcttctatgaatgaatctgctcccactggtattactgatcatattgtccaaggacctgatcccaaccttgaagaaagtcctaaaagaaaaaatattacatatgaggaattaaggaataagaacagagagtcatatgaagtatctttaacacaaaagactgacccctcagtcaggcctatgcatgaaagagtgccaaaaaaagaagtcaaagtaaacaagtatggagatacttgggatgagtgaaaaattacatcattggacatgaaggagtttcaacatccagcttcatctaggtggtcatgattacctgcatgctttgagctcagcagcagtcttcataaacacatttaaaacaagatcctgggtttttgtggtttgacttctatggtgttttaaaaaaacacagatttttagtgttaatattgtgtaaatgtactcaccttagggattcatttgaatgatggtattataccatgattgtatacagtttgtgaaattgttgcaagggcaaagataactcttaaaaaaccgtcgagattacaatgctctagaatcagcatataagaaaataaatgatatctgcatgttgaattggggtggatggggggagcaagcataatttttaagtgtgaagctttgcatcaagaaattattaaaaagctttttttctccagtattttctgtattatcttaatgtttatggcaaataaaatgtaaaggaacatgccaaa

SEQ ID NO: 587662 - DNA, 1309 bp, Homo sapiens
tgcctccgggtcgcggtcattttgagcccctgtctggatgacttcttgcggctgttctacccctccccctccccgcaggaaagatgaatgggagggctgattttcgagagccgaatgcagaggttccaagaccaattccccacatagggcctgattacattccaacagaggaagaaaggagagtcttcgcagaatgcaatgatgaaagcttctggttcagatctgtgcctttggctgcaacaagtatgttgattactcaaggattaattagtaaaggaatactttcaagtcatcccaaatatggttccatccctaaacttatacttgcttgtatcatgggatactttgctggaaaactttcttatgtgaaaacttgccaagagaaattcaagaaacttgaaaattccccccttggagaagctttacgatcaggacaagcacgacgatcttcaccacctgggcactattatcaaaagtcaaaatatgactcaagtgtgagtggtcaatcatcttttgtgacatccccagcagcagacaacatagaaatgcttcctcattatgagccaattccattcagttcttctatgaatgaatctgctcccactggtattactgatcatattgtccaaggacctgatcccaaccttgaagaaagtcctaaaagaaaaaatattacatatgaggaattaaggaataagaacagagagtcatatgaagtatctttaacacaaaagactgacccctcagtcaggcctatgcatgaaagagtgccaaaaaaagaagtcaaagtaaacaagtatggagatacttgggatgagtgaaaaattacatcattggacatgaaggagtttcaacatccagcttcatctaggtggtcatgattacctgcatgctttgagctcagcagcagtcttcataaacacatttaaaacaagatcctgggtttttgtggtttgacttctatggtgttttaaaaaaacacagatttttagtgttaatattgtgtaaatgtactcaccttagggattcatttgaatgatggtattataccatgattgtatacagtttgtgaaattgttgcaagggcaaagataactcttaaaaaaccgtcgagattacaatgctctagaatcagcatataagaaaataaatgatatctgcatgttgaattggggtggatggggggagcaagcataatttttaagtgtgaagctttgcatcaagaaattattaaaaagctttttttctccagtattttctgtattatcttaatgtttatggcaaataaaatgtaaaggaacatgccaaa

SEQ ID NO: 587663 - DNA, 397 bp, Homo sapiens
gtcttagtcactggtgtcactgtactgatctctctttgatatagcaagtatatttattttctctattgaaatacattttatatttgattattttcactgtaatttcattatctttaccctaatgtaggccctcgttcactcatgccaagattacttccacagttggccatccgacctttttggttctaacttctcctttctccaagccattttcactatagctgttctaataatttttaaaatgtttgtttattgggaaaaaagtctatctattgttttaataaactttttgtttttgaaatagttagagatgtatagaaaatctgctaagatagtacagaaagttcttgtagaaactttacccaccttctcctgatgttaacatcttacataacta

SEQ ID NO: 587664 - DNA, 203 bp, Homo sapiens
ggggggggggggccccctttttcccccccttattcccccccccccccttggggggggggttttttcccccggggggggtccttttttttgggggggggatttccccccccttttttttttttgggggggcgggggtgtggggtttttaaaaaaggttttttttttcccccccccccccctttttcccccccctttgggtgtta

SEQ ID NO: 587665 - DNA, 731 bp, Homo sapiens
  misc_feature (552)..(552): n is a, c, g, or t
  misc_feature (721)..(722): n is a, c, g, or t
tgcgtgtgttcacaaacgtgtgcagctacaccccaggatgtgtgagcaagggaagtcctgccagttccccagcctggcatccggaatgggctccggctggccctgctgctatctgggtctccttcctctcacttcccggtgctggcatcggcctcctcctttcttcacctgagcctctttcccaaagaacattagatcctaaaagaacctaaggtaaaggaatatacttctgtcattgaatggagtcagctctacttacaacccacagcccagactcttggtaacactgttcttcgaattgcatttctggaaaaccaagggtcaacccagagcctcttttctatttttgattcctttcttgctgtagtaggcaacgtctatgcagcgtttcttggtacagagaaaagaacagatccgggtttccaatttagactcctccaagctgtgtgtcttcagtctaatcacccctccactctggtcttcccttccctcacctctagtaataaaggaaatggagtaatcagagcttctcgaagttctccatctaaacanccctcagcagagggggccagctgattggcaaattgggggcagaacactaaagaaatagcccaaagtaacctatctgtagtgtaaaactctgaagtctcctgttttggctttgaaattcatgcttctgcattctattacataacatttgtcttaatataaaaacatcgtnntgatcgaaa

SEQ ID NO: 587666 - DNA, 386 bp, Homo sapiens
cgattatgttagtattcgggccccattgggatactgggcaatcattctgtgattctcacgtgtgcacgttaataaatctgtatgctttttctctatgtgcctttttttttcttttgagatggagtctcgctctgtcgcccagtctggagtgcagtggcgcaatctcggctcacttcaagctccgccttccgggttcacgccattctcctgcctcagcctccagagtagctgggactacaatcgcctgccaccacgcccggctaatttttcgtatttttagtagagacggggtttcaccgtgttagccaggatggtctcgatctcctgaccttgtgatccacccgactcagcctcccgaagtgctgggattacaggcgtgagcaacg

SEQ ID NO: 587667 - DNA, 527 bp, Homo sapiens
  misc_feature (392)..(393): n is a, c, g, or t
  misc_feature (401)..(401): n is a, c, g, or t
  misc_feature (421)..(421): n is a, c, g, or t
  misc_feature (431)..(431): n is a, c, g, or t
  misc_feature (512)..(512): n is a, c, g, or t
attgcaaggcccctctggtattgactgtgctggcccactagtaaggagagccctcttcctggtgatatcgagcaagcgagatggacgtccgattgtgcggtacactcacttgacgaacgtacgtagtcgtcgcgattgagtcaggacacggagacagaggctggggctgatagcccacgcagctagcagctgtgctggcggcggctgtcggagcgcggtgtgagtgctggctggacctgctgctgcagtgcatccgcagggcgcggcatgatggaggtgacgggggtgtcggcacccacggtgaccgttttcatcagcagctccctcaacaccttccgctccgagaagcgatacagccgcagcctcaccatcgctgagttcaagtgtaaacnngagttgcnggtgggcagccctgcttccngcatggaacnggagctgtatggagttgacgacaagttctacagcaagctggatcacgaggatgcgctcctgggctcctaccctgtagatgncggctgccccatcca

SEQ ID NO: 587668 - DNA, 108 bp, Homo sapiens
  misc_feature (73)..(73): n is a, c, g, or t
gcagcggaaggtgagctccagcttcagcacctgtccttgccccatccagtcgcggaatcgtgtcatcaccganacgtcggcaccggcaaagcgattgatcggctgcca

SEQ ID NO: 587669 - DNA, 157 bp, Homo sapiens
tagatcccctcacgcacaaaccccctctcacccacaaaccccctctcacccacaatccccctctcacccacaaaccccctctcaccgacgaactcccctttacatcggggtcatctgcgggggtttgtgggtgaagggggtttgtggggggtaccga

SEQ ID NO: 587670 - DNA, 143 bp, Homo sapiens
taattgagattgctcgggggaataggttatgtgattaggagtagggttaggatgtgtgggaaaaggcacataaagaatattgcggcgcccttggcgtgaaggtagcggatgattcacccatattttacaactcaggtggggtg

SEQ ID NO: 587671 - DNA, 230 bp, Homo sapiens
agcatcattcatgaaccaacagtttctcatgcacatctttgtacagtcttagttcagcaacaatgtcttcattttagtacagcatcaatcacttcaggagtggaatcattgggtcatctggttcactcatatgtgtgcacttcagaagcacctttcaaagtgcttcctgaagtggttgtcaccgtttgaaaacattccttccttcacagagagctccagttgctctgtat

SEQ ID NO: 587672 - DNA, 655 bp, Homo sapiens
gagcggaggcagctgcgtcagcccaagggccccggcgccaaggggcggcatgggaaccccaaacgcaaccgggtctggagggatccccgagacgagccagtcttcgtcaccgccatccggcgcagcgacccatgcgggacataggcaaggatgcactggagactgcacggagaagtgagattttgcagagccggaaatcacagagagaagaacaaacgaggaagcacgcacaggaaccaaagacccaagatgaaaaatgaaaacggacggcagagaaagcagcagacgagtaggaagacagaaagacaagagacacaagaatggacacaacgagaaagaggacaagaggacgccaatgggacagcggcgaacggagacaagaggagacaagagccaagaaaacagcgatgcaagataagcaaagcaaaaagaagtagaaccgaaaacaaccacaccacagaaccagaaagagcgcggaaggagaagacgaaaagaccaagagacagacaaagagagaaagaagacacaacaacaacgagaaggaaggaaaactagcacgaacgaaaaagcgccagataaaaaccgtaccgagagcaagcacggaagcaccgaacacagaagtgaaacgccgcaaaacacaacaacaccaaccaca

SEQ ID NO: 587673 - DNA, 430 bp, Homo sapiens
  misc_feature (162)..(162): n is a, c, g, or t
  misc_feature (232)..(232): n is a, c, g, or t
  misc_feature (354)..(354): n is a, c, g, or t
  misc_feature (401)..(401): n is a, c, g, or t
gaaaaacaaaggcccaagaaaagccaaacagtgtccctcccctcctaccgtagcaggcccagatggcgttttaggcaaatacacccacaactgcacagccaggtccccatctcaaagggctttccacggagcaaaagcagtttcgatcgtattgtcatcacncaccatcaactttttttttccactcacatgatgtatgccaatatcattattctcgttatttgtataaccntcatcatcatcaatgtctcgtgaatttttgcgtgttatttttaacatagcatgtaaacagcacctccccacaaaaaaaactagctcaggataaacatctctaagagtatttcataggagctnatagtttgaccaacaaaaaaatgttttcttttcccaaaataaagttnctgtggtttgtctcaggaaaaaaaaaaaa

SEQ ID NO: 587674 - DNA, 826 bp, Homo sapiens
agcggagtccgactggaaagagcgagctgagtggttgtgtggctcgtcgtctcgggaaaccgtgtggctgctgtgctggatggctgtaccgaactgtacgtgaagcatgtcacgattgctgaattcatgagaagcttattcactatttgacacacatgatggtgatggaactataacatacaaaggaccattgggatactgttacactcgagatctcttggagtcagaattcccacagaatgcagagttacacgtgatcatggactttattggtaacgtaaggatggcgtgtagttggttagatgtgctactaatttgaagtatactccgtgtaactatgtcgttgtagcaataatagaattggcgaaagtacaataattgacaagcactacagaactagggaatgaaagcacaattgagaggaaggcagttccgatgtgtattgattagatggatggcaattggctattatttaagtgctgcagtaatttcgtgcagtgttgattgtacaagacgctttgtgatgatgaacgttaatcagactgataggacagttgatgaacatgatcatggggaagtcgagaagtattgagtgagtgatggtcacagttagaacgtcttggaagaggttaaggtacaaactgaatgtctgccaaagatgaagagcttgttacgagacatgtgtataaaggttgcgttggtacaaccatgtcgctttacttgggccgtctttcgtttgtcagtagacttatatctgtagcaacggttactatcctatctgtcaacaataaatatgcgtgtatagtacataggaattcattcctcc

SEQ ID NO: 587675 - DNA, 185 bp, Homo sapiens
ctgactacggcggaagagagcgcttgactgatagagaggctcttgaactgatatgaaaaacaagagcatcccgagcggagggaacatcactcacagctcagaggcgggacgacactctgaggctctaagaaatgaagagacaaatgtggctagattggaggatcgaggcagggctaagagagtaa

SEQ ID NO: 587676 - DNA, 154 bp, Homo sapiens
attggacggagaggtctccgttgagagtgctgtgggagcccaggctgaatggacgtggtgaagggactggacagatgtcatgtgtggctcctcagtgggtgactgctgtcctgtggaagtgtgctgtgattgtgcagcaatgctggcgagagtg

SEQ ID NO: 587677 - DNA, 124 bp, Homo sapiens
gccccaccctaccaccagacaaccctagccaaaccaattatccaaaaaaaggatatggcgaaagaaaattaaaccctgcgcaaaatgaaatatgaatccgcaagggaaaagaggtaaaaatttt

SEQ ID NO: 587678 - DNA, 292 bp, Homo sapiens
cgagaggggccaaccaaaatttttattttattttttttagtttcagggtctcactgtcacccaggctgctcgagggcagttttgtgatcagagctcactgcaacctcaaactcttaggctcaatcaagtgatcctcttgcctcagccccctgagtaatgaggactataggcgtgtgccaccatcctcagctaattgtttttattttttgtagagacaggggtctcactctgttgcccaggctggtctagaactgctggcctgaagcaatcctcctgccttggccttatcgag

SEQ ID NO: 587679 - DNA, 365 bp, Homo sapiens
  misc_feature (4)..(4): n is a, c, g, or t
cganctctgctctgcgtcgaccttctgctctgcgtcgaccttctagctactaggctgacctgtctgatcttcactttccgaacttcattggcctggaattcaggtagtacagtatgtggtggatgaagccaactaccgcctgtaagctacaggatagaaaagagactactactaagtgacaagaagcaggactgaatgcctttgggggaaaggcggatggagtccttgctccttttccccaaaccccatggggctcaccgccattgctatggccatcccaggcttctgttgactgtgtccattgggagaaggaaaaccagtggggtcttaagaagtgattttcttggtcagagcagaaagtcgag

SEQ ID NO: 587680 - DNA, 332 bp, Homo sapiens
gtccttgcagtccttgtgtcacctaaatatccctcagttctgaatcgctccgcacctcggaggggaagtgtcactggagcgctgtaactcagcccgcattcttaaggatcccattcactgcttatgatggtagagctttgaattagatgtcaggctgttcacgtcatccagactctggttttcacgcttctgtgctgagacgagtgttttgatacgtatcagaggatgatgttcctattggacaataacttgctgtatgttctgagatactatactgcgttcatattgtaggcaccatcatcgtataaaacgggcgcctttaacaggtttca

SEQ ID NO: 587681 - DNA, 111 bp, Homo sapiens
gtacattcgcgtggggtcgtcttcgcgtgggtcgttcttcgtgtgggtcgttcttcggtgggtcgttcttcaggtgggtctgcttctcgctggtgtcatctccaagaaaca

SEQ ID NO: 587682 - DNA, 280 bp, Homo sapiens
ctggtgggagaaaaagagattgagggccccaggatctttcaccattgaaaacccaacagtctcactgcccctgcagataccacagctttagctgctcaggaccccctggaatctttgttaatgttgacctcagctgacagaaatgcatggagggtacactgctctgtcttcaccaaagctggaaccatccaactctacccttctaacagcctttttcccacccatggagtaagatttttttttttttaaatcagtgaaagcattctgtaaagtttcaaaa

SEQ ID NO: 587683 - DNA, 845 bp, Homo sapiens
gcagtcctagctgctggcatcactatactactaacagaccgcaacctcaacaccaccttcttcgaccccgccggaggaggagaccccattctataccaacacctatctgatttcggtcaccctgaagttacatattcttatcctaccaggcttcggaataatctcccatatgtaacttactactccggaaaaaaagaaccatttgatccataggtatggtcttgagctatgatatcaattggttcctagggttatcgtgtgagcacaccatatatttacagtaggaatagacgtagacacacgaagcatatttccacctcccgtaccataatcatcgctatccccacggagtcaaagtatttagcgtgagttcgcccaactccaggaagcaattatgaaatgatctgtgcagtgtctgagccctaggattcatctttcttttcaccgtaggttggcctgactgcttggtattagaaagtcatacattagacatcgtactacacgaaagtactacgttgtgttcacttacatatgtcctatcaataggagtgtatgtgcaacataggaggttcatcacctgtttcccctattctcaggtacaccctagaaacaagctacgcaaaaacccattactattatatcatcgggtaaatctacttgcttccacacagttctcggctatcggaatgaccgagttactcgaatacccgaggataaccaatgaaatccatcatcggaagcatattccacagagattaacactcagaggagctgtccagaagccataggacctaggtggttttgccccaccatgagcgttacacaagggcccccgtgcgcgttta

SEQ ID NO: 587684 - DNA, 486 bp, Homo sapiens
ggctccacgtttctgagcgtcttcttcgcttttgcctcgaccgccccttaccagacatgtctcgggatcggtcggatcggtggcggtggcggtggggcttccacaggcgtgaggaggcggcggcgggggctccagattccgttctccgccgcccggatgggcctcaatcagaatcgcggcccatggttcctggccgggccaagcggcctaagcctccgatcccgccaccgcctccagaccaacagcagcaacagccaccaccgcagcagcaccgcgcagagccgccacgatcagccgccgcgcatccacaggcgcatcagcagcagcagccgccgcaccgtcgaggactcttccaagcccgtcgttgctcaggacccggccccgctcccggagtaggcagcgcacccaaccaaggccttccaggcttcggggccccccggcccccggggccaaatttccccaagccaaaaaaacccttcggggggg

SEQ ID NO: 587685 - DNA, 292 bp, Homo sapiens
tccccacttaacacagcttgcttaatagaggtaatgtgcgaaaaatggggaaaaaattaaaacactgacttaagattctggttccttatctatccacttttggctgagtaaattataccagatatttaacctttgtgtgccggggctttcatcagtggtcctagtagttcgcctcctgcactgtgtcaggttaggctaaactctgttgcaataacaagttaccctctgaatctcaggtccctaggccatgagtttggttcccggttcccagggaatccaccatcatcggcag

SEQ ID NO: 587686 - DNA, 146 bp, Homo sapiens
cgctgctacaattaacgcacactcctccccatgcgccgattactccgctgcctgtatattgttggtgaccctagtgtaggtactggcggcgagccgcagacgtccggatcatccgcaccaatacacaagccgcttcacgggtaccg

SEQ ID NO: 587687 - DNA, 475 bp, Homo sapiens
gccacatgcaggccaaggggtgctgctgactgatggctccgagaaggacaagatgggcaaaggcggcaccaagaccctgatgaacaccatcatgcagctgcggataatctacaaccatcccaacatgttccagaacttcaagagagtcctttgtcgagcacatggggctcactggaggcttaatcagctggctggacctgtaccgagcctcgggtaaatttgagcttcttgatagaattcttcccaaactccgagctaccaaccacaaagtgctgctgttctgccaaatgacctccctcatgaccatcatggaagattactttgcgtatcgggctttgaatacctcaggcttgatggaaccacgaaggcggaggaccggggcatgctgctgaaaaccttcaacgagcccggctctgagtacttcatcttcctgctcagcacccgggctggggggctcggctgaacctccagtcgg

SEQ ID NO: 587688 - DNA, 259 bp, Homo sapiens
cccagtattctcgagctctgacatgtcgggcgagcgtacgcgtatcgatggcgcagtgaggcggcgcataagcatctaggccataaatattccggatatacgtagccggaatgtaacaaccgtactctagaatatagctagatgcgcaaattaaagcgctgatatcgatcgcgcgcagatctgtcatgatgatcattgcaatgggctccatatatagggccggggtaataataacctcaggtcgacgtcccatggccat

SEQ ID NO: 587689 - DNA, 367 bp, Homo sapiens
tgagacagagtctcgctctgttgccaggctggagtgcagtggcatgatctcggctcactgcaacctgcaacctccacctcccgggttcaggctattctcctgccttagcctcccaagtagctaggactacaggcacgtgccacctctcccagctaatttttttatttttagtagagacggggtttccccatgttgggcaggatggtctcaatctcttgacctcgtgatctgcccgcctcggcctcccaaggtgctgggattaaaggagtgagccatggtgcctggggagcaagtaaccattttaaagaaatactctcaacgagttctttttttatggggtatttcagttgttaacaaagttaaaata

SEQ ID NO: 587690 - DNA, 484 bp, Homo sapiens
gcttgcgagttctcgacggcgagtataacgtgctggttttacatgtgggtcatctatcacaggccagtagctcgtaagtcacgtcgcggcggtggacaccggggcagtgtgcccgagggctcagagggtcagcacacgatgccatgctgctggagggacatggaattggccctggacgtggcgagccgcgatgtggttcagaatcctacacagccccatcaaagtctccactgtactgactcccccacactgccgatcactttctgtgtacctcatgggctcacaggcctcagtttcctcatctatacagtgggtgtaccaccagccccacgcttgtggggagacaatagcccatgcttcagcgcccttggcatcaggctcaaatagtgtaagccattactagagctaattataattgaatgtttccacatagtccaggaagtagggaagattcccctcaacattttgccgaccaggaaacagg

SEQ ID NO: 587691 - DNA, 315 bp, Homo sapiens
  misc_feature (124)..(125): n is a, c, g, or t
  misc_feature (169)..(169): n is a, c, g, or t
ggtttggggggggccccttccccaaaaaataaggccccgggtggtatgtccccaaacccccccaaatttcctttttaaaaaaaatctttccccttgaaaggcccgccccccccccccggtttgnngccaaacttgttaagggaagggccggtttgttttggatttcccnccccccccttaaaccagggtttgggccccagggtgttcccaaaaatttgttgcgggaaaaaaaaaatgaactaaacccgtcttttagggatttccttttaccccccctgggaaaattaaaaaaatgcggggaaggaaaccgttcta

SEQ ID NO: 587692 - DNA, 538 bp, Homo sapiens
  misc_feature (435)..(435): n is a, c, g, or t
  misc_feature (457)..(457): n is a, c, g, or t
  misc_feature (510)..(510): n is a, c, g, or t
ttttttttcctgagacagagtcttgctctgttgcccaggctggagtgcaatggcacaatctcaactcactgcaacctccaccccctgagttcgagcaattctcctgccttggctcccgagtagctgggactacaggcgcccgccaccatgcccggccaatttctgtattcttagtaaagacggagtttcagcattttggccaggctgattttgaactgctgacctcaggtgatccacctgcctcagcctcccaaaatgctgggattacaggcatgagccactgcgcccagccgagagttttaaagaaaggttgaaagctcttcccttttccctaacctagcctggcttgattctgtttaataccaacctgtgttgaattggagttggaaaagccaaaattgcctgaaaggggaacccattgcccagaagggaaanaaacacaaacttccaaggccanatgctccaccggaactcctccaaaacagcccaagcccaggaaagaacagtccnggaaagaaccattaggcccagccccacc

SEQ ID NO: 587693 - DNA, 182 bp, Homo sapiens
tgcggtcatctagagagatcccgtccacatgtagcatagtacccatcagcatgcatgagagttccaggtgctccacatctttgccaacatatgatgttgtcagctttccgtctttaattaatcagctttattgaggtgtaatttgtgttcgaaaaaaacccttttaaaagtctgcacataca

SEQ ID NO: 587694 - DNA, 498 bp, Homo sapiens
cactgcatggtaagagccatgttaaatgaacctacattgctctaaagggatttcatatgctgatctttgaagacgatatataagacatagtccctgcttctggcgttttgggagttaacaatcgggattggaaggagttgggacgcctggagttattaaggactgactacggacatcattagtttgtttttatacttaggttaccaaaaaaccgtttctccatctttataacgcagttagtgcagcccacattccaagaacattgcaaaaaataatttgaacagctactacattcagcgagattgaagacttctatgggctggtccatactccatagataacggcttctgtggcaaaatgcgtttgaatttccaataaacaagtttacagcggcattcctggaaaataactccgaaatatgggaagcacttacacacctgcatggaagtactgactgagacttactgcttacttgctgcattttttagatgagttcaa

SEQ ID NO: 587695 - DNA, 731 bp, Homo sapiens
tatttcactgtcagcaaaaatcttttaaataaaaaagtaggatccaggtttagttttggtagcctcggttggcccgtcggcctctggcacgcctcgaccttctccggccctttggagcggacgttagggttgggtgtggctgtgcggggttcccgtggggcctttgccgaaattgcgcggtacaccttctcggccctttgcgaggacccggagagcaggcacagctgcccacagccccttagggggagctccaggggcccaagttgggttccaaaaggttgcagggattcttgtgcccctctgtgccctgtgaggatttgcggcttgctgggccccggtgtggttcaacgccgcgagtgtgccacattaccttctcacgttgggattaccctcctgtgaacccggcacattcatcgagttagtgttccccgaaaaccagcggccgtcatgagtttatcccggcacagaaagcttcatcttccggatcatccgggaaagagggacagaaggcggccggttggtgcgactcataaacaacctcttcaacacaaccgggtcgaatgtgcgcagtgggtactcctgggccaagaaacctgtataacttgtgacccaagcagccctacaggtaagatatccgggctctgggggctccttgcgccagaaccattcggaccttgatatggcgagatgtccacatcccatgatgggcgctccctgctccgggggagaca

SEQ ID NO: 587696 - DNA, 375 bp, Homo sapiens
ggccacttgccaaacctagattcccatcactgctcaaatgctccttttaaaaactaattttaaacattcatttacttattcatacagtcttttaaatcaagcattaatcaagtgccttggcagtaagaatatagtaatgattaagttagacaaaatttcctgtccccatggaataaaaatttctagctattggagacagataagaagcaagcatgggacagaaatgggagacagatgggtgaagctggaaaagcagctgtggttcccaattgggtgtcattaggggaggttgcccagccctgaaatactggagtgagtgaccatgccattcaccagcacaaccacaccactaagcatgccactaccagtcgacgc

SEQ ID NO: 587697 - DNA, 985 bp, Homo sapiens
  misc_feature (17)..(17): n is a, c, g, or t
  misc_feature (152)..(152): n is a, c, g, or t
  misc_feature (380)..(380): n is a, c, g, or t
  misc_feature (387)..(387): n is a, c, g, or t
  misc_feature (391)..(391): n is a, c, g, or t
  misc_feature (397)..(397): n is a, c, g, or t
  misc_feature (406)..(406): n is a, c, g, or t
  misc_feature (818)..(818): n is a, c, g, or t
  misc_feature (835)..(835): n is a, c, g, or t
  misc_feature (838)..(838): n is a, c, g, or t
  misc_feature (905)..(905): n is a, c, g, or t
  misc_feature (907)..(907): n is a, c, g, or t
  misc_feature (980)..(980): n is a, c, g, or t
gtgtctgtttgttaatngtggtggttgggtgggtattccgggatgcttgatacgctccatactgggagaggcttctgggtcataggtcagtctgcagagggatcttgtggctggtagtgaggtggctccacacggtcgttgctgctaccggngctaggttctgggcatcaggcacggccatgatccttcgaggctcttctgggtgtggctgctggttgctggttcccaaggtgtgatcgatggtgatatgtggctggtcgatgggggtgctaccaaccagggttgcgtggtgatgttcttttgaggttagtggggtactgtgtgtgatatttgtgggatttgattgatgctagtgttgtctgctgggttctgggctttgngaacgcnaccnaggctntgggcaganctgccttcgggcaaggatcaggccccatcatgctggacgaggtccagtgcacgggaacgaggcctcactggccgactgcaagtccctgggctggctgaagagcaactgcaggcacgagagagacgctggtgtggtctgcaccaatgaaaccaggagcacccacaacctggacctctccagggagctctcggaggcccttggccagatctttgacagccagcggggctgcgacctgtccatcagcgtgaatgtgcagggcgaggacgcctgggcttctgtggccaacggtcatcctgatgcaactggaggccaggccctgtggaaggagccgggcagcaatgtcaccatgagtgtggatgctgagtgtgtgcccatggtcagggaccttctcaggtacttctactcccgaagnattgacatcaccctgtngtnagttaagtgcttccacaagctggcctctgcctatgggggccaggcagctgcagggctactgcgcaancntctttgccatcctcctcccccaggacccctcgttccagatgcccctggacctgtatgcctatgcagtggctanagggg

SEQ ID NO: 587698 - DNA, 413 bp, Homo sapiens
  misc_feature (344)..(344): n is a, c, g, or t
  misc_feature (357)..(357): n is a, c, g, or t
  misc_feature (373)..(373): n is a, c, g, or t
  misc_feature (411)..(411): n is a, c, g, or t
aaagtaacaacattttattaaattaaacgtgaatgaaattattgtgaaagtgtgtttacgtttaaaatgttggattcgcttgcaggaaagaaaaacctgtaagaaagaacagttgcatttaaaatggatgatctgacaccttccggttccttaacacaaaattacaaagtaagttccctttaaaagacaaaatgtaaatactctttatatcatgcaacaattcccatgtttaagtctaccattcatcttttaaatgaaaaatacacattttaaaatgctaacaacggttttgacagaggaaggcaaggctgtatccaattaccgaggatgtttccagtgttaantcatatatttccnctatttcggggtaccntttttctacccgtaggggtacccagtccttaaggtttntg

SEQ ID NO: 587699 - DNA, 171 bp, Homo sapiens
ctatctagagtatccccccgcatctgggggccaggagaagttggcgcttgctgcccattcctccgttggcgcactcactcacccgcctcgctgatgttgtcatctgggtgctccgcctgggggctgaggaccctcagacccaggtggtactattcaacgctttgcacgatg

SEQ ID NO: 587700 - DNA, 786 bp, Homo sapiens
  misc_feature (181)..(181): n is a, c, g, or t
  misc_feature (188)..(188): n is a, c, g, or t
  misc_feature (192)..(192): n is a, c, g, or t
  misc_feature (198)..(198): n is a, c, g, or t
  misc_feature (207)..(207): n is a, c, g, or t
  misc_feature (619)..(619): n is a, c, g, or t
  misc_feature (636)..(636): n is a, c, g, or t
  misc_feature (639)..(639): n is a, c, g, or t
  misc_feature (706)..(706): n is a, c, g, or t
  misc_feature (708)..(708): n is a, c, g, or t
  misc_feature (781)..(781): n is a, c, g, or t
caccaaccaagggcccgcgtggagatcttctacaagaggccaagtggggcacctgtgtgtgacaacactgtgggacctgaactgatgccaagcgtcgtcttgccgggccctttttttttctttctcttgtgtttgtgttttgtgttgttgttttttttttttttttttttttgggctttgngaacgcnaccnaggctntgggcaganctgccttcgggcaaggatcaggccccatcatgctggacgaggtccagtgcacgggaacgaggcctcactggccgactgcaagtccctgggctggctgaagagcaactgcaggcacgagagagacgctggtgtggtctgcaccaatgaaaccaggagcacccacaacctggacctctccagggagctctcggaggcccttggccagatctttgacagccagcggggctgcgacctgtccatcagcgtgaatgtgcagggcgaggacgcctgggcttctgtggccaacggtcatcctgatgcaactggaggccaggccctgtggaaggagccgggcagcaatgtcaccatgagtgtggatgctgagtgtgtgcccatggtcagggaccttctcaggtacttctactcccgaagnattgacatcaccctgtngtnagttaagtgcttccacaagctggcctctgcctatgggggccaggcagctgcagggctactgcgcaancntctttgccatcctcctcccccaggacccctcgttccagatgcccctggacctgtatgcctatgcagtggctanagggg

SEQ ID NO: 587701 - DNA, 329 bp, Homo sapiens
catcctacccgacgaggtgtcctcacattgaagtcactatgacatttatgccaatggtatactcaatgtctctgcctgtggacaagagtacgggaaaagagaacaagattactcatcactaatgacaagggccgtgtgagcaaggaagacattgaccgtctggtccaggaagctgcgaagtacacagctgaggatgaccagcagagggcctggtgtcatccagcaattcactgtagttcctatgccctacaacgactgaaagcaactgttgaaaataagaaacttcatgagtcatgattaacgagtgagggacgtgcagaacattctgg

SEQ ID NO: 587702 - DNA, 447 bp, Homo sapiens
cagtctagaggaaattccttaatttgattgggaacttgtatatttttgttaaagcctgtaaatttctcttcttgccacatctttacaagcaatagtctttgaacgtctgtattttttggtgttaatatctgtgctttttttccttttgttaggaagtgaatatgaggttattactttctttaaggattgtaggatgagctggtcacggtggctcacagccgtaatcccagcaccttgggagaccatcgcagaattgcttgagctcaggagtttgagaccagcctgggcaacatagggagattccatctttacaaaaaattagtcgtggcatgtgcctgtggtcctagctactcgggaggctggggtgggaggctgcagtgagccatgattgcaccactgcactctagcctggaaaacagagtgagaccctgtctcaaaaaaaaaaaa

SEQ ID NO: 587703 - DNA, 852 bp, Homo sapiens
tcaccgcgtgagcagacgcggagtgctgtgtggccctgtggcgagatgccgtacgccaaccagggtaccgtgcggatcacggcagctcactgacgagaatgtcaagttcatcatcgagaacaccgtacctggtcggtggccaacttcgattcggagggtcttcatcgctgaggcttcccataatagccattgactgggcttcagattgatgccagattcctcagtcccttcagtgagtgaattcatatgctcacagtgcttgtgattagattcccctctattcagtgatgagcattgtggacaacgcgtgcagtactcgtcgtggactgcgacatgtgacggagttcctgcgccccgagctgcctctggtggaggttcacgcctcgactgtgccggttgcaactgaatgaccacgacgcggaactcttgtcgaccgttcgtcgatgcacgctcattctcgcatgacaagtgcgcctcgggatcgatatcgcgtgtgtactattccctgtgaagccgcagattaacttgatgcgcccaattgaacgtacctgtgtgacgctcacggcatggacattccttcagctcggtccaatgtctgacgcaacaggcgccatagggatggcttgaggaaccttcccgcaggcgcctattgtcccagtaaatggcgcctatttgcggccaagcgtacggcacttgtcccagaggattgtggagtggcctcgtaacgtcgtcaagcggcgatagggcctttgtctggatagtagcgactacccaagaagccaaattggccccgtgagggggcatgtcactagtgttgttaggccccccatgtgcgcgccgatgggtaacttg

SEQ ID NO: 587704 - DNA, 179 bp, Homo sapiens
  misc_feature (40)..(40): n is a, c, g, or t
cggttcctgtctgttataaaaggacaacgaatcaacaggnatatactagtggaaaacacaatataaaactaaaatgccatggcttctttaattggctaaaagcaaaaatgtaacaggcagaaagtctgtgtcacccacttaacaaagctaggggtttttttaaattcgttcccaaactc

SEQ ID NO: 587705 - DNA, 395 bp, Homo sapiens
gcatcgatgaggcttggctgcccatctcagtaggccaagtaagtaaactaggtaattgtagaaaactgacagaggagattctcccagtgttgccacatgggaaaaggagcaaagagagccagtgacccctataccagattttagggtccttaatacaaggtttaggcttaaacagaggagaagacagtagttctcaccttgtaacctctttgggggcatctaatgacttttcacaggggtcacatatcagatatcttgcataacagatatttatgttacaattctttgttcgtttgtttgtttgtttgtttgttcgaggtcagtctggtctacaaagtgagttcccagacagccagggctacacagagaaaccctgtctcgaaaaaagtcgacgc

SEQ ID NO: 587706 - DNA, 269 bp, Homo sapiens
acacatggcatacggctcatgcagacattcagatacaaaaatgggtgtgacatatttccacgaagaggaacagagaaggacttgcaaaagatatgtaggcttgccattcattctcgatatgacgacttcgataatggatggcttcaatgtgttatataacaagaagcctgtcatatatcttagtgctgctgctagacctggcctgggccaatacctttgtaatcagctcggcttgcccttcccctgcttgtgccgttaggccgatctga

SEQ ID NO: 587707 - DNA, 101 bp, Homo sapiens
atcttagaggaccccctcctttcctcccttctctctccttcatatcatccaatttctgctgcaccattgtatctgaaaagtctaatttttgaacagcactc

SEQ ID NO: 587708 - DNA, 181 bp, Homo sapiens
tagggcccgaaaaatattcccgcccctaaaaatatttatttttttcccttttgagaatgagaaccctggataaccccttttgttttcccctttgcccctgtcctctgattttatgcttttcttaacctacccatatgttctttttggtagaattaatgccaaaattaatatatagtggtga

SEQ ID NO: 587709 - DNA, 350 bp, Homo sapiens
tgagtggcatgtgaacagtggatgactgtaatatgcaaagaaaaagatactgcattagagatcataccacttaaatagtctcaaaatgagatgactagactttagataatgaagctggataattatgcagcagattagttatgggtaatatagggtaatacaaatgatcattttaaaaattctttttaatttcttcaaaagacaacagctaaaaggaaagttgcagtgttatattatgggttgtatcatgtatgtacgttaacatatataacacatggctgggcgtaagtggctcacgcctatatcccagcactttgggaggccgaggcgcgtggatcatgaggtcagga

SEQ ID NO: 587710 - DNA, 676 bp, Homo sapiens
  misc_feature (115)..(115): n is a, c, g, or t
  misc_feature (170)..(170): n is a, c, g, or t
  misc_feature (199)..(199): n is a, c, g, or t
  misc_feature (236)..(236): n is a, c, g, or t
  misc_feature (285)..(285): n is a, c, g, or t
  misc_feature (361)..(361): n is a, c, g, or t
ttagtaagcttccaacttcttagatatcatgcctaatactgccatctagcgttctaattagatatttaatcctcagagtaaagattgatcaaggaagcaagataacctaattatngtctaggtgctgtaatatctcatgtattaaggtaccaaaaggataggacataatntaagcaagatgtatatgcgttccaacttntcactcaggaattcttctacactgtctgtgttccatntagaatggctcagttcttcagcaatgttcccattgtcgtccaaaagctntaatacagagtctgaaccacggacatactagagctggtgaggatgtggagcaataggacctcttaatcacttgatntgcagtcctctgaacagtcatccacaaacttcaagaatagctcctgcatacagctttttggtttcaaattgtgcttcctcctgacagcatcctctgcaatcaggatccagctgaagcaggttgaactgtccgagaagatcacaagagctgcaaagcaagttgctagaaaagcctaactctctgcatgcctccgatgaaaactctgccccaaaagcagacaccgcttgaagcacagtcgccaacaacaaccgtagcacaaacgccggcaccagacacccactcggctcagccgccatcgctaccattctctcgtgc

SEQ ID NO: 587711 - DNA, 723 bp, Homo sapiens
  misc_feature (67)..(67): n is a, c, g, or t
  misc_feature (70)..(70): n is a, c, g, or t
  misc_feature (74)..(74): n is a, c, g, or t
  misc_feature (78)..(78): n is a, c, g, or t
  misc_feature (81)..(81): n is a, c, g, or t
  misc_feature (91)..(92): n is a, c, g, or t
  misc_feature (102)..(102): n is a, c, g, or t
  misc_feature (113)..(113): n is a, c, g, or t
  misc_feature (116)..(116): n is a, c, g, or t
  misc_feature (119)..(119): n is a, c, g, or t
  misc_feature (128)..(128): n is a, c, g, or t
ccacgcgtcgtcgacccacgcgtcgctgcgtcgctccgggagctgccgacggacggagcgcccccgnccncgcncggncgncgccggcgcnncatgcccttntccaacagcanagncantgaagctgngccccggccgaggacgagattccccgacactgagacgcccagcaacaagccacatggccaaggatgctgacccccgagactgatacgcggagctgcgcgccaagagcacagccgagcggcatacaacgctaggacgacagatacaatccagacaggcgtggacaaaccgggccacaccgctacatcactgaccagttgggctgcagatggacggagacgcacgcggagttccataacgaagcagataacaaggactctcatgtcgaccccagatcagtcgaggaccggccaccagcggactacgaaggccccacgcggatgagcaccaacggaccagaccactcaaccgccgcaaccgaaacccatgcaacggcgccaggctcaagaacagaacacatggcgagaccccgcgaaacgtaacagttttgactgaagccatcagccagcgagatgccgccacatcgaggcccagaaaggcaaaatcacacgagtgagcactcgacgaccatacccaccacggccaacgtagaacgcaccggacgggggaggcaagcgcagcagcacaacaaacaacacgccgtacaaccgcgcggaa

SEQ ID NO: 587712 - DNA, 258 bp, Homo sapiens
aggatctgggaggcaggaactgcataacaaagctttcttcccctgcgacacagtctcgctctgtcacccaggctgagtacagtggcgcgatctcggtcactgcaatctccactcccgggctcaggcgattctcctgcctcagtctcccgagtagctgggactgcaggcgcccgccaacacgccctggctagttttttgtatttttacgtggagacggggtttcactgtgttcaggatggtcttgatctcctgacctcg

SEQ ID NO: 587713 - DNA, 892 bp, Homo sapiens
  misc_feature (2)..(2): n is a, c, g, or t
cnaccgcttgtgggtcgggcggccccagcccggctgtttagtcccgcccgccaaccagctggggaaacgcccccgttgtggcgcaggcacgtttttcggccgcagctgggagaaccgctttgtgtgcgcggccacaacgattcattcccggtgacttgcttccgccttatgtgtgggacacggtggtcgcggtccccccacttgttgtggacacagctcctgcagagaatgtctttcttcgggccggcgcaatgtagaccgttacgggccacccgcgctgcgaggggggggtcatctcctccctgttctcaaccgcgcccctcttgcgggccccttccttgtagtgcacgtgccgctctgggcggtgtcctcaacgtgagggagaaattgtccgcggctgctgcagacgagtaaaattgctattaacagaggggatgttttgttctggcgacccgcaagaatttatagactatgcgtccttcccgctccctggccgaactcctccgctcctttgtccgtttattatgccacacccccctgcggaggccgcgtctgttctcgtaggggcgccctgtttcaagtggcgcgcccccctatgtgaataagggtaaaaaagcgacccgcgggtgcacaacggggcgcccccccccctttgtggtttaaaacggcgcgcacggatgcgtctgtaaaattcgtgaggcgctgcgcatgttctgcctctttctcctcaggaacagaattgtgcggggctcacctctgtcgtcacagctctttctgaagctgcggaatgtcgcgtctgacaaactatcacgccagcagcagtcatagtcgtgaccgagtggccggtcgagtgtattaaaaaaaaaaccactttctttttttcaaccataac

SEQ ID NO: 587714 - DNA, 266 bp, Homo sapiens
  misc_feature (157)..(157): n is a, c, g, or t
  misc_feature (191)..(191): n is a, c, g, or t
  misc_feature (212)..(212): n is a, c, g, or t
gctgcgcgcgttctagaggatccctagcccagcgaacaaagttccgtgcagaggaggttttttaggggggtggggatggagagcagtagggaaggcataaccaaggaaagaaactttctagcttttcaattctactatcttctaaagtcttatcctngtcttcacaccgtttggttcacattggtactcangtgttcagaagagtgtctccnccttattttactcaatcatatggctggttattcatttaagtaggatttaccaaa

SEQ ID NO: 587715 - DNA, 574 bp, Homo sapiens
  misc_feature (109)..(109): n is a, c, g, or t
  misc_feature (113)..(113): n is a, c, g, or t
aacatagggcaatctcacccacttccacctggttgggttttaaagctcgcttggtctccacccaggttcccacgaggggtacatacctcctttctggggcagagactgntccntacccatatagttgaaagtcgtttaggaactttccccctccctacctacctcccctttaatagcagaaatcctattctcccccgtgattatgcgtatgatcacccctgcaacactattatgtatctgagtgtgcgtgtgtgtgtatgtgtgtgttctgggggaagggcggcgtctcctaaaatttctgcggtttgtgcctttttcttccatacattcgttcacaccatcccatgcccagggaccactccctggcactatcgcatgctgggatcatccgggcgagcgtacgcacgctcaccactgtcctttgttttcgacatttttatcttcgcataagtactccatcccatccagatacctgactaactgtattcccctttcccctctggctgctggtgtaaataaactccatctccccattggtaaacagtaatcaaattttaaaaaatgaaaaaaaaaa

SEQ ID NO: 587716 - DNA, 254 bp, Homo sapiens
tctacccagaaagatcaccaatcattgattcgctcatttaacaaatatgcagcctccgcacgatgagctctcctgcagacaagcatggtctgaaacattctttgagcaatatcatatagagtgcctactatgtgttaggtactgtgccaggaactgataagccagaggtaagggacaacacagctctaaccgtcacctcattctccaggtaacaaaggccaatgtagcccctttgaatctagcagagaaagtta

SEQ ID NO: 587717 - DNA, 961 bp, Homo sapiens
gtcattggtatacagtcccaggtgtcaaatgctgcagcctgccaagctgtgattgggtgaggctcgtccctatgtaggatgctccagaggccgcctggcacacatgaaggagtgtagcaagagagagctgtgggtctacccatatgcggtgccgaccaaaggtggcttgcgtcaagcaaactaacctgatgtacactctgtttggaactgtctatgttccccgtactgtaggatggacgtctcgttttctgatggagagagtccgaggatgcggatggaacaatgtcctgggttcacatgctcaggcatcccccactatgggctgttcgatcatcttcagtgcctgaagctgcacgacctgaagttcgcctgcatttatcaggccctctttgtgcgtgtccttgccaccttggggttcctgctggtgaccatgtgtggttgtggcatgtgtgagcagaagggaggatgaggacgaagagcagaaagcccggtactgacaagctgttatgagtgccactgtgtgccatcatctaagccactgaatcaagtgtatttcaggcttatgtcaacattccaatgccctggttttcctgcctgaatctgttcgtggtcacggttggggggaatttgtgaccctggaaatccccagagtgaaagatggagctgggcacatcatgaataggcttggccccgatctctcaaagcctaaggtgctctgcgggactgctgactgccctgattggaacaggccggaaattcctcctctggttcaatgtcaattccccattctaaggcaaacgggttacagctccgtatgagggggtggggaggcttggacctcggttaagaggggcggaacttacaggcagttgacaccccacacagtagggttgcaaacacggtgaccagacacaaaggacattctgcaacaggatgagggaggagaacacagagaggagga

SEQ ID NO: 587718 - DNA, 1098 bp, Homo sapiens
gagtgcgttggagcgctggaaatctggaacctgggatggcgacgtctacactgagtcgtgagtgcgaagtgagcttattccacgtgtgaacagcctctagataatctgagttgttgaaaatacgaagcctgttactctgtgaacatgtggctgacaacagtgttgtttgtgagcctggctgtctgcttggacccagaggtttcgtctgccagtggttttttggttgtatttatggatttcatgggaaaagtgtccaagctttcagtgttggagcagtgtatgtgactgacaaatggctgaccctgagcaatgagtgatggcacctaatgtgccatcaaacccaccagcaaagagttcaggaaaacatggggttttcgaatggaccactatctgccaagcgagagggcgcaggggactgcggagtgctgacccactggagccgccacccccacagcagctgcttgggcctgtccctgctggctgcagttgggaggcatgcccaagctgcactgagcgctgtgggagcagttcctggaccatttgctgctggctcctgcgtgcatggcaggagcatgcctgtctccctggagggattcttgtgtgagcccactgtcctgcccctgacacatgacgccgagacatgcctccgaggggcaagacgtggaaagctgcttctgagaccagaaagcggccacagtctggttccacagatgtgaaggaacgaccagactcttctgaacaggtgaccggaggggatgaccacgattgaccctccgatggtgacagctatggcctgatcctgaaagagcttcagaatctggcttcgcaggagccgtgaacaggggcccaactgagaagccccgaaagggaaccagaggcgcctcggaaagagctccgggcagcaaggaccggagacaaatgtgagaccgaaggcagtaaacttagtgcgaggcgccagcccagatacagacacggaaacacgagattgtgcacaagggtaacatgtacaaactaagtagaaaagatacgcaaacagagaaaggaaagaggcaagcaaataggaaacccagactatatacagacaaacagatgaagcca

SEQ ID NO: 587719 - DNA, 1281 bp, Homo sapiens
tggtacctctttttgtgaagctggcagctgatggagactccgtgctgctctgccatggccctgactgaaaagcccaatggaaggatgtcaatgacctgacgaacacacgactcatactctaactcttgaacggtggctggggcaggcatggcttcctgtgcgctgcacgctttacacgcactctcacgcaggcactaccacccacctctacgctaacacctaacttgcaacgcctacttgctgacactgacacgggcacttcgtcacactgagcgcacgactcacgacttccgactcttgaccgtggcataccaactcaactgcaaacacgaccacactctgcgacagctctcggacacactggacgctgcactgacacgcactaccacactctgactgctgctctccacacatgcacatgcacccggcgacgggttgcctccatactggcaacccacggcgacacactgcgtctcatccctacctcgcagcacatcacatcattgctttcttctctacccacgcaaccccacaggcaccttaacacattccctaccacctctacgcacagcaatcctgctaagttcatgcgtactcgctacccaagcaattcgctttgaatcgaaccatcacgcgggttacttagcctattctctccttccattacgtatagcgcatctttcaaccctaaccaaccacgtcgaccatttccacccccagaatctccgcccgtctacaaccttcagggtagaccacttaatacaccgtctaccacgcctgggggcatcaatatattaggttagccacccaccatggcacgcactaactctgagcccagcttcactacgctacacagagctgccagcaaccagaataccccccgctgcacgacgtgaccgacccccaccccaccaatgcgggaccgcaccagcgagcacccaccggcgggacgctgtgtgaccccacccctgcacacacatctggaccaaccaccccacacggcgtgccaaccgttgcggactacggaaccaacatagacgacacgcggagcaacaccgtacacggagccggaagacaccccaacacagcccgccgccacacatacccaccgccacgccacaacaagacaggggcacacaacgcagccaccacacaccacaacggaagcccgacagctcaccactcatgtgcagcagacaatcactgaccacagccgacgcaacacagccgataccaatccacacagctagcctcagccacccaccggcggagccccagcaa

SEQ ID NO: 587720 - DNA, 500 bp, Homo sapiens
  misc_feature (24)..(24): n is a, c, g, or t
  misc_feature (96)..(96): n is a, c, g, or t
  misc_feature (105)..(105): n is a, c, g, or t
  misc_feature (111)..(111): n is a, c, g, or t
  misc_feature (136)..(136): n is a, c, g, or t
  misc_feature (142)..(142): n is a, c, g, or t
  misc_feature (146)..(146): n is a, c, g, or t
  misc_feature (149)..(149): n is a, c, g, or t
  misc_feature (167)..(167): n is a, c, g, or t
  misc_feature (194)..(194): n is a, c, g, or t
  misc_feature (205)..(205): n is a, c, g, or t
  misc_feature (221)..(221): n is a, c, g, or t
  misc_feature (228)..(228): n is a, c, g, or t
  misc_feature (288)..(288): n is a, c, g, or t
  misc_feature (361)..(361): n is a, c, g, or t
  misc_feature (425)..(425): n is a, c, g, or t
  misc_feature (493)..(493): n is a, c, g, or t
aaaaaagcaacaagaaaataattncagagtttatacaaaacatctttacattattttttttccaaaaagactagtatttacacaaatggcaacagnaaacaaaancaaaancccttccgactgccacccggaaggngctggntgtnctnctccctctcccacctggnactggggtgggcagctggccagggggnagtgtggaggnggatggtgagaggttnagcaccntccatggctgctcatgggagagcctgcaagggcactcaagtggcagtctgttagcaccgngctggcaaggaactggggtcaaagtgcacagcgggctggcccagccccaggcagcctcttcctctttccaggncccagacccaagactgggacagcagcaggagcagggttgggtgggggttacccacctgtgctanggcccagaaaaggagcaggccacctggtctaaaaccgctaggtcctccacccctgggccccatgtttncccacca

SEQ ID NO: 587721 - DNA, 231 bp, Homo sapiens
  misc_feature (12)..(13): n is a, c, g, or t
ttaaactgagcnncggaacagcggggtgtctccaaaaaccccctggtgggccttaaaacgtggcccaataagcctctttggccaagggtttccaatgcaaatagcttttaactgtaaagatgtttgtaagaatgcattgagaaaaaaaactcgtgtaagtttcctctttatctgcccccgtaaaaaaattacagtggtagatttttctgataataaaataatatgatgttg

SEQ ID NO: 587722 - DNA, 180 bp, Homo sapiens
  misc_feature (1)..(1): n is a, c, g, or t
ntagctgtcagtcgatctcagagttagctgagtgatcagcagacagttcctatgaagtgaacaagtcccagaggaccttactgattaggtccacaggtcttcctctataggctcagtagatgaaggcgtttctgagggcttgcttaccacttcaaatgcacgtctagacactcaatgctc

SEQ ID NO: 587723 - DNA, 267 bp, Homo sapiens
ctgcgggcgactcatagaggatcccggctgcctagcactaccgatggtagtcgccgtgtctaccatggtgaccacgggtgacggggaatcaggtacgattccggagagggagctgagaaacggtaccacatacaaggaaggccagcaggcgcgcaaataacccactcccgacccggggaggtagtgacgagaaataacaatacaggactctttcgagggcctgtaattggcatgagtccactttaaatcctttaacgaggatacata

SEQ ID NO: 587724 - DNA, 955 bp, Homo sapiens
tttgccgatccgccgcccgtcacatgccgaccggcagactcaccatggatgatgatatcgccgcgctcgtcgtcgacaacggctccggcatgtgcaaggccgggttcgcgggcgacgatgccccccgtggccgtcttccccgtccatcgtggtggcgccccaggccaccagggcgtgagtggtgggcatggtgtcagaaggattcctatgtgggcgacgaggcccagagcaagaagaggcgatcctcgaccctgaacgtaccccagtcgagacacggcatcgttcaccgaactgggacgacatggcagaaatatctgggcgaccacacgcctttctacgagagagctgcgtgtggcgtcccgaggagcatcccgtggctggtgaccgaggtccccctgaacaccgcaagggcaagcgcgagaagatgacccagtatcatgtttgatcgactccttcatacacgcaccagcacatgtacgttggctagtccatggctgtgcgtctccctgtacgctcgtctggcgcgtgccactggggcatcggtgatgagactccgggtgcacgggtgtcgcccaccagtgtgccccatctacgacggggtatgcccgtcccccgatgccgtccgtgggtctggacccttggctggtcagggtagctggactggactatctcagtggatgatcctcgaccgaggcgcggggtacaggttcggcacccgaggtccgacgcgggaaatcgtgtgtggcatggaaggggaagctggtgctacgtcggcctggtaattggagcgagagatggtcacggctgtttcagctcctgcctggggaaagggctaggagctgactgaggccgggtaatgccattggaacgggcgggtcgttgcctgaaggccctttacaagcgtcttccgggtgggggcctggggggccgggaagaccttaggccgactgaatgg

SEQ ID NO: 587725 - DNA, 219 bp, Homo sapiens
tggagtggtgggaggatgacttgagcacaggagcccagagtagcctgggcaacacaggaagacctcgtttctacaaattataaaaaaaaaaaaaaattagctaggcattggtgcctgttggtcccaactactcaaaaagctgaggtgtgaggatggcttgaacctgggagttctaggctgcagtgattgcactactgcacttcagcctgggtgacggtg

SEQ ID NO: 587726 - DNA, 111 bp, Homo sapiens
tttttttcttttagccaacgtaacggtagtatatttaacgaaaatactacaagcacaaagttagtctggacgtataatatggatcacaaaataatatttaatttcaccagg

SEQ ID NO: 587727 - DNA, 346 bp, Homo sapiens
ccaggtgggtcacgcgggtctcgaactcctggacttcaggtgatctggcccacctgggcctcccaaggggtggggattacaagcgtgagccattggtgcctcgctgagtcacctttttttacataaacaacttctataatacatagtccagagtttccgggttttaatcccataagggggatcaagaaacggagtatacaagttcaggaattttccctccccatctttaacctaattctatagctctttttctttctttctttttttttaaagcagctcatcggtgggttccctaaaacattctaactttatcagttatcaaaatatcaaaacttctttattacac

SEQ ID NO: 587728 - DNA, 538 bp, Homo sapiens
  misc_feature (184)..(184): n is a, c, g, or t
tcttgaaaccgggactttatttacaaatatttagattaaatagcattttgttacattaaatgaagagtacagcagtctgaataaatcctttagtcaaaaaacaataaaccactgaactaacttgggagtcaggtattgacctaacaagccgcagtcttttagttgtgattgctacctttatatnccaatgggtgggttggtttgttttgttttttgaaatatacacacacaccagcaggtcatgtcccctgggtgagtcccttgtgatgcaacagtgtaagcaaaatggatcactgtaagtctttaacagaatataccaatctactccagaaatcttattttttttcgtgccgaattcggcacgagggaacactgatgatcacttaaaacatttaaatttaaaattactactaaaaaaaaccctgtacaatcacacaaggccaatgcctttgtggtttttacagacatagaatttttgtaggttttgggccctataaacaattttatttaggactggaataccaaataccggaataaa

SEQ ID NO: 587729 - DNA, 402 bp, Homo sapiens
atttatagactattgccacataatttttttttgtaatgaaaaaaaaggagacaaagactttacggctaacgttaatttctgcagattccaacttaaccagcaatggggtcaatccaaaaactgagttaagcatctttggcaaaaaccagaaaaccacagtcacaaaaaagactaaaaattctatccttatatggaaaagataggactttattcaaattagatggcaatattttacagttataaagctatatagtttcatggaattgatggggtacaggaagtgctaccccaaaatatgtcatctaggcattttagaaaacagaagcagaaagaccactctcacaaaccacccccaaaatctcctatgaagcaggttataaacctacacctgtaatccctgct

SEQ ID NO: 587730 - DNA, 264 bp, Homo sapiens
atccccagtttaggctattctatagaaaaacgcatatactttctatcaaaaagtgagcaaaagagatttagaaaaggctgcaaattaagtgaatctaggctcagcgtctacctttagctacaacaagtcataattagaaccaagccatgtgttgtggcacacacctggtgtccacggtagtcactcctttttagcaatctctccccactcctttctctcagcttcttacaaccatttatctgctttctgtctccattgatctcg

SEQ ID NO: 587731 - DNA, 386 bp, Homo sapiens
atgtgcctgtggtctcagcagctcaggaggctgagttgagaggatcacctgagtctgggtggtggaggttgcagtgagccgagatcacgccactgctttccactctgggtgacagagtgagaccccatctcagggaaaaaaaaaaagatccagtatttgatagcacagcagggtaactatactaaaaaataatcatacattttaaaataattgaaatagtataattggattgtgtgtaacaaaacggataaatgcttgtgatggagaccccatttaccctgatggtgataattatgcattgcatgcctgtatcaaaatctcatgtaccccataattatttacacctactatatacccattaaaattttttaagttaaaaacataaa

SEQ ID NO: 587732 - DNA, 845 bp, Homo sapiens
  misc_feature (305)..(305): n is a, c, g, or t
  misc_feature (451)..(451): n is a, c, g, or t
gttttttagggggcaccacaaattgatttttcgcgtgggttgataaatattataattggccaaaggagagtagtcctctgataactctagcactctatcatctccatcatgtagagaagaatgttttattggataattaggggcgatatacaacacacattactacaatagggtgccccaccaccattgggggtgggtagcacgggggggttcaactacacacccccgtggttgggaaatattctcgtatggccatggagaagattctttggtgatacttacccacaataatactagagagcacncgccgcttgaggagagacacccgtcttgccccacccctctgtggtgatatcacaaagcccatcacagaggaggagcgccgctctctgtcccgacaaggtaaatttgtcctactatgagaaaagcgtgagcccggagatcgcccctnttctccctgtgatattgggaaatatagtgagatgctataaaggcgcgttatacctgggggaggggaccacgcgcggttttcttggcgcgcacacagtgtggttttctacatcctagagggtatatagagagttaaaggaatggctcaagcacacttgctcacttcttggatggctcttctgggccacaaaactgcacgtcacctgagatgagccacagaggcacgcaccgaaaggagacttggagacctatccctctgtaaaagagtttcctctgatgggtaatggggagccacaaagcctcccttttcagtgacctttgtgtacagcaaccaagtgggctactcataatgggcttgattttttggggataataaaatgaaaaaaaacttttta

SEQ ID NO: 587733 - DNA, 253 bp, Homo sapiens
agggatctttacaggacaatccaggactacctttaagaattatccctgaacgatatgcattcaaaactcttctcagtgcatccccagggactctgagggctagaagcactgtctgattgctttctctactagtaactccatagccctagcttggaaaatcagcaccaagttggaactcgctgacagaggtctcgaacaatgcgtatgataatcacacaggactgcagcaccattagctctagcctggaaccac

SEQ ID NO: 587734 - DNA, 221 bp, Homo sapiens
gctgagggtcgattcttacacgatcttgggagggcagcacggtgctcacgtgtcgacggaacttgtccaggaggcatgcaccgcagtggtgaatacacgtcgaccaggctccatgtttgcgttattgggaggtgagcatggtgctcatgtgtctaaggaacttgtctagaaaggtatgcccggccgtggtgaatccacgtcgagcatggaggcatgcattg

SEQ ID NO: 587735 - DNA, 428 bp, Homo sapiens
cagactgttgcgcaccttcagtggagctggaggtgggaaaccttgagagagaggaagacaggttcactagagaacttagacatcatcctagagatctctcttccccacccctcacaagcagcagttcagtgagtctcctaggggcagaggcagagggatagggcaaagtgtatactatacataggtataaacagtatgtcagtctattgacatgtatatggagctgtcagactcacttcacactgaaggatactaaggataataatttggtctcttaggagaataggatttaactacatcagttcatgggccaagcatgatgactcacgcctgtaatctcagcactctgggaggccaaggtgggaggatggcttgagctcaggagttcaagaccaacctgggcaacacagcaaaaccctgtctcttaa

SEQ ID NO: 587736 - DNA, 126 bp, Homo sapiens
tataatacaaaagtgcacctctaatctacattaaacatattagaaataactgtgtaaatgtttgctgtacaactccaaaaagtcaggtgcgtctgctcctgccacatcagcgggctggtcttggag

SEQ ID NO: 587737 - DNA, 365 bp, Homo sapiens
  misc_feature (351)..(351): n is a, c, g, or t
gaagaactttcataattcatgaaagcccagttttgaagattcacgtatccctctggagacctacaggaagaaagtgattgggttcctctggtttttgcctgcttccctgtggatgggaaaaggtgacaacctcagtctccctttggggcctgttccaggggaggcaaccccctttccctttccccaaattgaggaggccctgggctttttacccattttttttaattttcaaaattaaaattggggttacattgatgagaacaagagttaaagccccaccctttggtgggctgtttgtattgagttgcaatgtgaccagcgaaagctgcatttaataaatgaaagcccagnctgttaaaaaaaaa

SEQ ID NO: 587738 - DNA, 168 bp, Homo sapiens
caaagaccctactggcctgtggacaatcataatgaaggacctggaccagtgtatgagatcgcaaagtgggcttccagagcttcttttccctaattgcgggcctcaccgattgctatgcaactgactagttttagtagtacacattacaagcagtaagggaaaagaagt

SEQ ID NO: 587739 - DNA, 1318 bp, Homo sapiens
gcgggaaatcgtgcgtgacattaagcgagaacgctgtgctacgtcgcccatggactctccaccaagagatggccacggctgcttccagcctcctccctgcgcacacagagcctccgacgctgcctgaccggcccaggctcctcaccacctggcccctgcacgcggcctcccgcctgcccctgacgccctccttcccgcctctcccttcccctgggccctgcgagtcccctgcggcactacccgactacctctccttctgcctcacctcacctgaccgtgctgacgctggctccctcccgctacgcaaccctgtccggccaaccacccgccctgctcgccctgtgccggaccccccccgcggtgcccttggctactctgcccgccccggcctcgaccgacggccccctcccctgcccctgccgccccccatcgttcgcgtctgccaccctcgcggccgcaccttccgcttgttccctggcgccgtccctgctgctccccctgcggtcggcccttggccagccgtatcacacttcagctgtgggccccctggcgcgtgcttgccgtgcctgctgcgctcgtcgtcgacctcgtcgtgcctcgctggcatgccgcgcacccgtggctgctcccgaccctcccgctcagccctcccgcccgctccggcgcgcccgcgccccggccgcccgcctccccgccccctcctgcaccgccgcgccccgccgcgcctccccgcgccgccccccgctgcgtccccccgtcgccgctctgccgcctgtgccgccggcccgtccggcgctgccgcggtcgcggtcgtccgtccgtccgcgtcggcccgcccccgccccgccgcgctcgccgcgctccgtctctcttcctccgcgccccgccgcgtcgcgctcctcgtctgcgtcgtcgtctcgtctcctctctcgcccgcgtccgtgtctcgcctgccgccgctcgccctccgcgcgccccgttgtcctgcctcccgcctgcctctccccttctgccccccctccaccaccccgcgccttacgccgtccccctccgcgctcggcgtcgtccgtcctcctcgccgtcgttctgtcccgccgccgtcgtcgccgtcgcgtcctctccggtccgccggccgtcggtcgtcgcgcgcgccgtctgtccgggcctgccgccggccgcgccctccgccgtcgtcggcgcgtgccgtcgtcgtcgtctcgtcggtctgccgttctccgccttccgtccccggtcgctccgtccgctctcttctgctgccgccgcccgctcggcgcgcgccgtccgtgctgtctcgcct

SEQ ID NO: 587740 - DNA, 399 bp, Homo sapiens
gtctcattcttctagtataagcaaggaaatgtatatttatacctcaaatcacctaaatgatacatgttgccaaccaactcatatatatttagtcctcacttgccctattgtcaggctgccttccggccctacacttaattttctactttctgattactaaacacagtggaatctaatatgctgaggtgtgcagctggtacctggccccagtaggcactctgtgttcttacctttaaccggcccgagtgtatcaccaccttgtgaggttaagtggcactgaaaagaccatttcattttgtggctgttccctaacaccttccagggcttttcatctactgggcactggtaagcaagtcttaactctttaccctctccttaatacatgccttctgcccaccc

SEQ ID NO: 587741 - DNA, 288 bp, Homo sapiens
ccgatcaccgctggtcaccatgaaccacatttgtgcaaaccttctcttcctgtcaacagcggccagctctcccaactacgagatgctcaaggaggagcaggaagttgctattcttggggtgccccacaacccttcttccccgatgttcaacgtgattcacaattcgcagcgagacacttcgcttccttacacaagtgtggcttggtccctgtttcaaacacacctctttaatgagacacactctctggctctgggctttcatatgccatattgcggggtctctcgcgt

SEQ ID NO: 587742 - DNA, 507 bp, Homo sapiens
atagaaaggtctcgaatggaatgaaattaatggaatggaatggaatcgaataaaatgagtcaaaaggaatggaatcgaatggcaatgaaatcgaatgtaatggaattgcaaggaattgatgtgaacggaacggaatggaatggaatccaaaggaatggaatagaatggaatggaatcgaatggaaaggactcgaatggaaatcactcgaatagaatgcactttaataaaataggatcaaatgtaatggaatggaatggaaaggaatcgaaacgaaaggaatggagacagatggaatggaatggaacagagagcaatggtatagaatggaatggaatcatctggaactggaacttgaatggaatggaactacatatgaaatggaatggaatggaatggaatggaatgcccttgaattacatggactggaactggacatagactcgaacagagtggaatggaaagtgatgagatagaatggaatggactcctttggaatggagtagtat

SEQ ID NO: 587743 - DNA, 139 bp, Homo sapiens
cacaagctctaacctgcaatttgggcatagtcacacatttcctcaatgcgttgggcctcttcacatcttatcacctgtcagttcatctatcctctcttctacgcctacgaatgctggtattcaactctttacactttct

SEQ ID NO: 587744 - DNA, 561 bp, Homo sapiens
  misc_feature (76)..(76): n is a, c, g, or t
  misc_feature (80)..(80): n is a, c, g, or t
  misc_feature (95)..(95): n is a, c, g, or t
  misc_feature (99)..(99): n is a, c, g, or t
  misc_feature (140)..(140): n is a, c, g, or t
  misc_feature (152)..(152): n is a, c, g, or t
  misc_feature (156)..(156): n is a, c, g, or t
  misc_feature (158)..(158): n is a, c, g, or t
  misc_feature (164)..(165): n is a, c, g, or t
  misc_feature (184)..(184): n is a, c, g, or t
  misc_feature (196)..(196): n is a, c, g, or t
  misc_feature (202)..(202): n is a, c, g, or t
  misc_feature (215)..(215): n is a, c, g, or t
  misc_feature (219)..(219): n is a, c, g, or t
  misc_feature (224)..(224): n is a, c, g, or t
  misc_feature (235)..(235): n is a, c, g, or t
  misc_feature (259)..(259): n is a, c, g, or t
  misc_feature (267)..(267): n is a, c, g, or t
  misc_feature (294)..(294): n is a, c, g, or t
  misc_feature (299)..(299): n is a, c, g, or t
  misc_feature (308)..(309): n is a, c, g, or t
  misc_feature (315)..(315): n is a, c, g, or t
  misc_feature (326)..(326): n is a, c, g, or t
  misc_feature (329)..(329): n is a, c, g, or t
  misc_feature (383)..(383): n is a, c, g, or t
  misc_feature (405)..(405): n is a, c, g, or t
  misc_feature (418)..(419): n is a, c, g, or t
  misc_feature (424)..(424): n is a, c, g, or t
  misc_feature (445)..(445): n is a, c, g, or t
  misc_feature (449)..(449): n is a, c, g, or t
  misc_feature (451)..(451): n is a, c, g, or t
  misc_feature (455)..(455): n is a, c, g, or t
  misc_feature (553)..(553): n is a, c, g, or t
tggctggcgccaccacctggccgaaagggccgagtttgagcccagaggaaggagctggagcaggtgtgtacccccntcancaccggactgtcccngggncccggtggtcccgggcctgggggcttggggctcagggtccncagggagggttngggncnggcccnnccattaggaggtggattangggcccttgttntttagnatgtttgtctttnaggnggacngttgggacccnaggactttgctgctgttttcctangtcatttntgcttcagctctttgcggcttcccttntttgnaaagttggnncccgangggaattagcnggnttccttatttttgtaggcccccccaaatgttccttaaaattctttgcctttaangttgaaacgggaagggggtttngttccccttaaannaatcncccccccccccctctggacgnggtngnttgnttttttttttttttttttttgcttggcgaaacccccccaaaggctgggaatgtatgtttttataatttgtttatttaaaaatgaaaaataaaatgttnacctttta

SEQ ID NO: 587745 - DNA, 423 bp, Homo sapiens
  misc_feature (375)..(375): n is a, c, g, or t
cgccagctgaaatatcatgattgttattctaatatttcctccacaaagacttagtgaactgcatgtccattttagaaagtaggagtagatattttaattttttcttgcttcttgagaactactatcaacaataaaaaaagctttgattttaacgtgtatatcttaagatttcttttgatcaatactaatgaaaataaacctgaaacgcgaatcattggacaaatgtgagatttttcctttaatttatacattaattgatgtaagatagtatttagaaagtttcaatcctttccagttacaattgtaattgtcacttacctcaaactaaacaaacggactctttcccatatttttctacttggtgaaggacattcnaatcatctagatgcctaagtcagaaacctaggcatcatcccttcattc

SEQ ID NO: 587746 - DNA, 227 bp, Homo sapiens
tcgaatcgagccggtaccataagaataagcgtacaggaactagtgctcaatatacatgtataaattggtggaaatctctgggatgtgaatggttacttcaagtggcttttattaagattttctcagacttactgggaggttaaagcaaacccaaatgtgtattatttggttacagagctctgctttataatttggtaataaagtttcaatacagacacctgtcctgt

SEQ ID NO: 587747 - DNA, 739 bp, Homo sapiens
taagagacaagtcctggaatgggcattcccaagaaccattgggtgctttactgtcctgtgttgagctggtatctaaggtgtaagacaaagcccactttacttttccctccacttttctctagcaggaatctgtgcctgtgtaaccaccacagctgggaatgtgctggctgaatctgaacctgaaaccgaaagaccgagtctcacccaaggccctcagcatagtacccaggtatctctgctggttattcagggaccaagggctcttcagttaacaggcaatgaatgcagccaagactgggtcctttccttcaaggcagggggttccctttcaggccagggtggtgtttaaatatggtgggccagagagaagagaaaatcgtgaaaatatgtggaagactaaatccagcagcatattaaaagcattatacaccatgaccaagtgaaatttatcccaggactgaaaggtcatttaatatatgaaaatcaggcaagcacagtggtcatcatgctgtaatccccagcacttgggaggcaagggggtggatcacctgaggtcagaagttcaagaccagctggcaaatatgggaaacctgtctctataaaattacaaaaattagacgggtatggtggtgggtgctgtaatcccagtaatcgggaggtaggaggagaatgttaaactggagggggggttgcagtgagtgagattgtgcatgatcagtggaaagaatgggattgtttt

SEQ ID NO: 587748 - DNA, 362 bp, Homo sapiens
ataatcagtcttttgtccaatcacatttctacacggtcatagtgcctatgtaatgaagcctccataaaaacccaaaaggacagcacttagagagcttccagatagccgaacatatgggtgctcctggaaggtagagtgcccaggaaggacatggagactctctactccttcccccataccttgccctacacatctcttcattgtatcctttgcaatatcctttataatatactggggtaaatgtaagtaagtgtttccccaagttctgcaagccactccagcaaattaattgaactcaaggagaagctggatggtcagaagttctggaagagtagatcattgactgatctataggagtggtg

SEQ ID NO: 587749 - DNA, 445 bp, Homo sapiens
  misc_feature (30)..(30): n is a, c, g, or t
  misc_feature (33)..(33): n is a, c, g, or t
  misc_feature (35)..(35): n is a, c, g, or t
  misc_feature (37)..(38): n is a, c, g, or t
  misc_feature (40)..(40): n is a, c, g, or t
  misc_feature (52)..(52): n is a, c, g, or t
  misc_feature (60)..(61): n is a, c, g, or t
  misc_feature (63)..(64): n is a, c, g, or t
  misc_feature (72)..(72): n is a, c, g, or t
  misc_feature (76)..(78): n is a, c, g, or t
  misc_feature (258)..(258): n is a, c, g, or t
  misc_feature (338)..(338): n is a, c, g, or t
  misc_feature (344)..(344): n is a, c, g, or t
  misc_feature (383)..(383): n is a, c, g, or t
cacccctaacaggctttggagcgaggagancgnantnntnagtgcttctcgncctcgacnncnnactggaanaccnnngccctgagaaaaccacatcccacactccccaccaaaatcagagtttctggaaacggggcttcttttgttttgtgcctgaagcttctctggtgattctaatttgcagctaggctaagaaccaaccacgaccccaagtccaggttttatactgcacccatcatccggtccaatcccggcaangacaaagaggagacccagagaaaacaggaagtcttttccccacgcagacaggaagagctaaaggctgtaggtccgtctgncacaancacaactggaaggggaaagcccgtgagccaccctagcanaacacacactgcatctgacatcaagacaggaaggaaaactctttagaatggctactgctgga

SEQ ID NO: 587750 - DNA, 223 bp, Homo sapiens
gggggggggggtttttaacccccccggcccttttttaaaaaccctttttccccccaaaaaaccaagggtttttcgggggggggggggggccccttttttccccccctttggggggggtaaaccggggggtttttttggcccccggaatgggggggccccgtggtttggtttccccccttgccccccccccggggggggggggggggggggccccctttcccca

SEQ ID NO: 587751 - DNA, 126 bp, Homo sapiens
agatcctgagcagaatgtgaggcaggaatgattcgtctgatctgtggatgcaggtaatgtggtgcgcagacagcatgtgttgggtacaggtctttggggatgtcagttacattatgatggagttga

SEQ ID NO: 587752 - DNA, 360 bp, Homo sapiens
tggtcttgtgctggtacgaccatgtggagttcgagatggcttctggaggaaggcgcccctccgagggcccaacactggccaggatgacaacctggtatgggagccaggagtcctggcatcattagtcccagatagctgcattactcacttgctgcgagacttcaggccgcttctgcgggtccaaactccctgagcctatcgtctccactgacagccgcctctgggttgaattccgcaacagcagcaattgggttggaaagggtttctttgcagtctacgaagccatctgcgggggtgatgtgaaaaaggactatggccacattcaatcgcccaactacccagccagacaagaaccacacg

SEQ ID NO: 587753 - DNA, 105 bp, Homo sapiens
aggagagtgggctctagcaggtggagatacactacggctttgacacacttatagaatggtggagagaaaagaatggttccctttgttccccgcttattatcgtgt

SEQ ID NO: 587754 - DNA, 1408 bp, Homo sapiens
  misc_feature (139)..(139): n is a, c, g, or t
  misc_feature (389)..(389): n is a, c, g, or t
  misc_feature (637)..(637): n is a, c, g, or t
  misc_feature (641)..(641): n is a, c, g, or t
  misc_feature (782)..(782): n is a, c, g, or t
ggcagagttcatcaaacgcacaggcactccatggagcatgcgagaggcccatgcagtgagaaggaagagcgagtagagacgcatgagagtcatacaacagtgcgagcacaaagttctggcgcgtagagatggtgcgagnatacttcgactatcgacctacgcgaggaagagcgtgcatgatggcgcttcttcaaggtggcagaccaagccgaataggctgaccatccatgtgggatcgctgtagctcactgatggggaagggacgttcgaagatcaacgatccttgagagggtagaaggatacgctcaggtaggattctgtactgaatgagggcgtaaggactttaccattggaagagtgcgcaggtaggcaccttagagagtgcctcntacacaacggtgtccctcgcctcgcgatgggtgtagattggcgccatgcgagcgcactattggacctattcgcctcgatcgtaatccctagaggctggaagaatccgcgttggggctttgtaacttccgtccgcactccgcgtgaggagcgtggttacctctatgtgagtcacgcagtggcctgggtaggcattggtggaaaacaccgtccgaggcttgcgacttgacgaacgttggtgacacacccntgantcttagtcgcgtggaactgtgtgtctttgcgaacgcaaaatgacttgcatagatatcttcgagatactagaggagcgtgaggacagaaggaatgagttcgattcggggagaccgcgttggggtgggaaaatggtgaagtgntctggattgaacgaagtgcatctaggaaaggatggaggaaggaaggatggcacaatgttgagtcgaaagcaagaatgatgcagtagtggcaggaccaggggcctttcatttgaccccaggtgcggaccaggtggggacctctggttcaagtgcctcgtgaggccctctagggcgtccacagtgcacctgcttggcaaatggctggaaccccctgtgcatgtcattgcacgactcgagggaaggcagagagagcaattgggaaggcatgagtggaatgtgacgtgtaacagattgaaggatacctttgcgagattcttgtggaccgtgtcgtttggcccagtaggaaattaaaagagactgtgcgacatgttttcgcgctgtaggtgcgggccccatgtacagtgggggagcttcaacacccaacaatttttatgttaccagggtcccccggagtatttaaggcgcgaaaggagacacgggttccacgtaatacagtcgaacgaggtgtgtcgacagtggcggccgtggggagccccgtaaaagatgtgtgaacgggaaccagatgatgacgaggaccaccacacaatcattggaagcctgctctggaaaacagaccagatatcacg

SEQ ID NO: 587755 - DNA, 262 bp, Homo sapiens
tggccccccctgtgggccccctgctcagcctgactgcctttgggccagcctccatgatcagcccaacccctgcaaggtggtttgacccccgtcccatcatcagaacttgagtttttggtggctccttccaaggttaaggccgagcccagagcctcccattgcagcccctggcagcccccccttccttggggtcctccccatttccttgcagcccctgcatttctgcccccagagtccccatttaagccctgcagttgctgga

SEQ ID NO: 587756 - DNA, 611 bp, Homo sapiens
  misc_feature (19)..(19): n is a, c, g, or t
  misc_feature (40)..(40): n is a, c, g, or t
  misc_feature (49)..(49): n is a, c, g, or t
  misc_feature (63)..(63): n is a, c, g, or t
  misc_feature (73)..(73): n is a, c, g, or t
  misc_feature (117)..(117): n is a, c, g, or t
  misc_feature (126)..(126): n is a, c, g, or t
  misc_feature (363)..(363): n is a, c, g, or t
ttagtaacaaattttaatnagtaatatagtttattagtgnctttggganatttatttagagantgaattttanatggattggattttaaatatttataggggttttatttggaatanttttaaatnggaaataatttagatgttttataataggtatatggttaaataaattatttataatttggaatattgttttggaatgaaaaggaattaattgttgatataagaatttggttgtattttaggggtattatggtgaataaaaaaaaaattagttttaaatggttatatattgtatgattgtatttatataatatttttgaggtgataaaattattgaaatgaagaatagattaatggttnttagggatagggattggagggggtgtggggtatgtatgattataaagggatgatgtaaggagtttttttgtgttgatggaatagttttatatgattatgatgattatgatgttgattataatatttgattatgaggttaagtatatgagtttttatttgtgttgaagttgtatggatttatatatatataaatgaatgtatgtaaaatttggtgatattgaataaagtttgtagtttagatagtagta

SEQ ID NO: 587757 - DNA, 960 bp, Homo sapiens
agcgggctccacgggctgcccggctccgtgcccctcacgcccaccagccgccttccacctctgcccacccgctccacactgatccgtattcctgccctccgcagctggtcctctccccagtaacgacttgccccatcttttccgcctcatcctgcgtgacccgttgccccatagccgagggggcctcggggtgctcgtgacctcgtcctcttccgtacgtgatggtgcaggatatcgattggtgctcctatgaacgttggccaacactatagtctcactcaacgctgccggactgtgaatgctgcctgacctaatccctggtcgcaactgacgacgcatagcattcctagcgtgctcctgacgggcacattgccatgacgctatagttacgcatgcaactcgagacaagtggacatttagtcgtgcagccacatattccgacggccatttggtacttgctatgtgcatacttatatcaatcgggccagagtccggtgtacaccatgccctcaagtggcccttggtggcatgcgtagcatgtaccatagcccgctcgattgcacgcctttgatgcgctattgccaggtacgatccgaggatcgtgctccgctcgaatttgatacgccacaaactttggacctaaaccaggacttgaccatggcgccacgttcgaaccaatatcgattgggccagcacgcaatccaaatcagataccaacttttgcgcataaaatgcctttaaccattgaatcaaagctacttcgcaaagggtttgacccccgaattagcggcacccaggaatgaccccaaagactaagtttctcgttgtgttgggcaccttccagttctgccgcacggatgtttaacttgggtgagaacgcccaattggttcacccccaaagcgcaccttgggcaactccttggcactttgttcctgtaccccgaaacacacaaactgggg

SEQ ID NO: 587758 - DNA, 284 bp, Homo sapiens
gtcgactccagacattggttcaggagctacgaaactggctgacactgattgctctgtggttgtcggtgtcttctcatcgtcatgccgctcagaggcttaggacattctgtttactatgattgaacactggaacttgctacaggctttccttggggtctgtaccacccctggtttagagatatatgtatgcttctgttattgaactgtgctgaaatcccaaatatgggttgactttcttaccagcttatggggaaagcgcacaacctggcgacagaaggtcgacg

SEQ ID NO: 587759 - DNA, 236 bp, Homo sapiens
tgcattctgctggtctctctacgagtatcccccggccgccacaggtctcggccgtcacagcttctcggccgccacagcgttctccatggccacataggtcctgggtgtatgtgtgggcagagtgtgcggggtgtcttctggtgcctgaagtctgcgcggcctggatggtggtgtgagttcctctggttgcgagggagagcgcacatctcttctggtccggtcaccctgatcgattg

SEQ ID NO: 587760 - DNA, 1025 bp, Homo sapiens
  misc_feature (1025)..(1025): n is a, c, g, or t
ggagggctggtggtgggagcggagtggtgtcgggcggggccgagcctgggccgttgtggccgtgtggtggtgccgggcggtgtgcggtgcctgggctggacgtgcggtgatgggctgcaccgtgagcgccgagtgacaatggcgggcggcgagcgctctaagatgatctgacaagaacctgcgggaggacggagagaaggcggcgcgggagtgtgctggggagtcagggaagagcaccatcgtctagcagatgaagatcatccacgtagggatgtgtctatctccgaggaggaatgccggcggtaccgggcggttgtctacatcaacagcatccagtccatcatggccattgtcaaagccatgggcaactgcagatcgactttgccgagccctccagagcggacgacgccaggcgagctatttgcactgtcctgcaccgcgaggagcaatggcgtgctccctgatgacctgtccggcgtcatccggaggctctgggcttgaccatggtgtgcaggcctgctttggccgctcaagggaataccagctcaatgactcagctgctactacctgaacgactggagcgtattgcacagagtgactacatccccacacagaagatgtgctacggacccgggtaagacacggggatcgtggagacacacttcagcttcatgacctacacttcaagatgtttgatgtgggtggtcacgcggtctgaagcggagagaagtggctccaaggttatggaggggcgttagagcgcatcatttcttgcgtagcctgacgctttgaatttgtgacttgaaggagaggtattagccgtgcttaaagtaggtttgcaccattggaccatatggtccgacgacatcctactctccacacacggctctggggcatccaccgcctcacctgtcactaacggtgacatttcggcgtcccatagttcgacaatgaacagtatccctgtcgcaacattttacactacaacaacgcgtgtacaccaggagaggcctccgtgttgacan

SEQ ID NO: 587761 - DNA, 1176 bp, Homo sapiens
  misc_feature (256)..(256): n is a, c, g, or t
gcggtgagtggcccctgctggaccgtggatcccgggtcgggcgtgcgcggcgagcagtgctactgaggccttctactcgcccgtgtgctgtccggttgtggcctcgccttctccctgtggatccctgtcgtcaacactctagggcactgcgagctgagcttctaccatcagtggaacctagttcgttctggtgcgccgagtagagacttgctcaggaggagctatccgttgtcgcgtgaagaagctcagtaggtgncctcgtgaagcacgtgtcgcatgtcgggaagactggatccgtgcagtcgacacgaatactatagatcccaaggatacagaaaactcacgttgcaagacacttataagagtggccaacgcaacggccaggatggatgctagttcgcatctatggcagacaatagacttggtgcgcactcctggcgctatgtgcgcaacgtttgtagttcgatgcgggccaacatcgcaggcttgtgtccctctaagaatcctagacgactctaatgtccatacagagttctggatgtgcacaaagccattgatagcggtgtcaccaaaggcgcattggagcaccctatgatacagtacatgcctggagagttgccccagagtcacagagaggattcatggactcgggagttttgaagtcgtggcaggacagcagaatcagtggcactcttgaaggcaggaacgcattgtatgccatggaatggccggtttgacaggaatggtgcatggagatgagtggaagagaaggaaatggaaataaaccgaaactctgagtggcatgatggattgacaacacgtgagggttccaagtgcaatgaagcaatggggcaaggttgcagtaccctaaaaacagaaattggacacgggtacataaggcctttcccacgtcagaacatggagggggaatcatggattaaacgcttggtatgacagccttgacaacatggttgacggtgaaaacacacatagttgcagaaggcctgggaacgacgaaacatggaccccgtagggccttcagaggtgccctcgaaagtggcaaagaaaccactacggaaggcaacaaattcgggatgataaaggagaaacccaagttgcagcaaggttgaacattgaaacattaaccacccctacaaaaatacggagaaattcacc

SEQ ID NO: 587762 - DNA, 296 bp, Homo sapiens
tagctagtgctcagtttggtctgagtgcctgagccccgcttccagagttgagtcccacctcctacctcattcccccttcagagagttagatactcctccttaatcttaagggggctgcagaagggcggagatctgttttccgtaactacttcctgctgagtttatggacgtaggccctgcctggcactggaggagtaaaaatctctggatacctgatctaaggagcccagaggcaggacgatttcattctccgtgtcagtggacaggatgggctggaagacctgagcaagccaggt

SEQ ID NO: 587763 - DNA, 119 bp, Homo sapiens
agaatacagcacccatcgtaggcctgatagcagcctccaattgagatacgcgttcaagctcaacacccactacctaaaaaatcccaaacatataactgaactcctcagcacaacctgga

SEQ ID NO: 587764 - DNA, 490 bp, Homo sapiens
ttaagaaggatgtagactgacgatgtcatggctagcccagcctggagactactgatgttgactagcccatagcacaaggacactagatctaccatccagggcgagacgctcttcccttgagctccacactccctttacaaagctgaacctgcaccttctgggggaaggagggttcctggaggctctctggcccccttgtcttccctacctcccacttctttccttcctttgcagctggcagatttgggcctgtccacatttcagggaggctcacagtcagggacagggtccggggagccagggggcaccctgggctacttggcccccagaactgtttgttaacgtaaaccggaaggcctccacagccagtgacgtctacaggtaaggatcccggaccaaacacacagccaggattcctacacttctctgggccctcccaggggatgatgtataggaaaggagtcttgccagtgattggaccgatcagcac

SEQ ID NO: 587765 - DNA, 936 bp, Homo sapiens
  misc_feature (362)..(362): n is a, c, g, or t
  misc_feature (747)..(747): n is a, c, g, or t
tgtcggcagctgtggcgtcgccgaggaggtactctttgttgttcgtggtgtgacgccgtggcgcgggttggtgcccagagggccgacggcgtcgtcctggtgggttaaaccgtactgagtggcgcgtcgtgatataagaggggtgattgctcgcgtgcgtgcgaggttgctatgaggtgtgccgccgctgtctagagcgatgtcttcgggcgtattgttgtcttgtcgcctgtttgcatcggcagtgtgtgttgccgggagggcgttctccacccaggtggttccgtctggctcgctcacatgggtgctggtctccgcgccgcagcgaacacgtgtgtccacgcaccaaccatcatcggcgngcccccacggcctgcgggtgtccgacagcccgccgggacttggtgtcgtgcgcgctcacacgggatgtttattctgtgagcagttcttatgatgggccataccctgttcccccccgtttggatgctgtataccctgcggggcctatccccgatgccctcgggtgatgtcggggaacagaagcattagtggatgttgtgcgccccgttgtcttactgtgggacacagaccagggccgcatccgacttattggccggtatgcttgcccccgccgctgatattcccacagctgtgttgtttcttcatgacatgcttcaggtcgtggttacacttagataaaagtggttgtcgtgaagctcgcgggggacgccggtgaggtagctcgcntagtgcgttaagatgcggcgttatatcctgttaggagctccacacaattaccactagtatctgactctaagtagcacaccgcacggtggcgctttgtctataccccaatgcaaagtacagggcgtttagttaccaccgatactttgttcaccagagcatcatcaactagtgatacccccaaacaaaaca

SEQ ID NO: 587766 - DNA, 669 bp, Homo sapiens
cagcaatatatggtgggcgcataggctcaaaaagaatcgccggatattactgtccatctccttatatccgcacgttcccataaaatcaggtcaacgtgacagtatccgtgtgtaagtcctcctcaatgtgattcacgacgtgaggatagtagggcagctcactttgaaccaacatcgatgacacgcatgagtgcatatccagaacctctgtcagggtgtacagcttcccacatttcaggacctgtaagactgagctagttatacgacagattgtcataacaacgggcgtcaggacagccagaccaatcatgtatcctatcagagaggcaagagtgtctcagtctatcaaattaaagtactaggtcatcaagagccagttcaattcagtcaagcattctggactataactcgttcacgaaatccagcgataataggttactggcttccatatccaaggcactggtggatacagtgtcatggccattcaggcatatgataaggaatttaggtccacataggcgtattctagtacgcatcaaaggtgactaatccttctgagcccttgatcacagtcgtatgattcagagttcatcatgtgcctgatcaccagcagagcatcccatcaggcacacacctacgctccctcacagcctgtgcacagggaatgat

SEQ ID NO: 587767 - DNA, 179 bp, Homo sapiens
acttcattaaggagtctgcgcagaagaacgaattcactttctgaatactgtggtgagctcatctctcaggatgaggctgatcgacgcggccaggtctatgacaaatacatgttcaggtttctctttcacttcaataatgattttgtagtggatgctactcgggaaggacacccaattcg

SEQ ID NO: 587768 - DNA, 427 bp, Homo sapiens
tgagctcacgcctaccatcccaccaccctgggaggtcgaggtgggcagatcacaaggtcaggagatcgagaccatccttggtcaacgtggtgaaatcctattctcgcaccaaaaatatcaatcaattatccggacatattggcacatgccctgtttctcagccactcaggatgtcgatgtaggagattcgcacgaacccgggaagcagagggttgccgtgcaccaataccacgccattgcactccagcctgtgtgagtttattttctctcaagtcacagagaccaataaaaaaaaactttatgcttagtgaaataagccagacacggaagggcatatatgttataatttcatttttatgaggtacctagaaatagttaattcagagaccggaagtagaacagacattaccaaagggtgatgtctgcg

SEQ ID NO: 587769 - DNA, 179 bp, Homo sapiens
  misc_feature (179)..(179): n is a, c, g, or t
ggacaattataccctagccaaccccttaaacaaccctctcccacatcaagccgaatgatatttcctatttcgctctacacaaattctctcgattcgtgccctaacaaactcaggaggcgtgcctctgccctcatttactcattccatacctcatacctcagcgaatagatgcccccatn

SEQ ID NO: 587770 - DNA, 528 bp, Homo sapiens
tgttgaagtggtgtacaaagggagagaaagtctgggatgggcagggcttttgaagagtgggggctggtgaaacacaagtttagaaatgaatttaaccatctgagccatgtatgaaattcacttctagaggtggcccctgatttccccaagcctcactcaggacagaaggcaccattcagttcagccttctgccccctttgcctgacccccaagcctgggtaccgcaaacaccaaggcctccagacagtgcagggcaggtgccagggcctgagatgctgacagcaggttctgcagcatccacctttgcccaacactgcctctcgtcctcttccagagagtgagcgtcctgacaactgagccacttcacttccctgggaaactcaagcataggtgtcctttctcatttaaaaatgtagattttagcatttgatgttcttatggtggggaactcatgggcactgcagcagttctcggagcaaaaaaatggccatttgttctctggggacagtattaaataaagtgagcatt

SEQ ID NO: 587771 - DNA, 322 bp, Homo sapiens
gaattggaggggagaaagtgagattggttaaagggcacaaaggcacaagttagatagagggaataagttctagtgtcagatagcacagtagcctaattcgagttaacaataatgtatgtacatttcaaaatagctagaagaaaggatttgaaatgttcccaacacaaagaagtgataaatgtttgaagtaatagatatcccaattattctaatttgaccactacatattatatgcatgtatcaaaatatcacatgtacctcataaatatgtacaattattatatatcaataaaaataataataactttttaaaaaacagttt

SEQ ID NO: 587772 - DNA, 352 bp, Homo sapiens
gattttctcaagactaattaaacataaaaatgttgaggctccaagtcgctaatatagcattggtttataaaacatcgaagtataaatatgcctcgtattactgtggtattgctcctttgtgatttatgatacacgtaatgttctttccacttaacagaagtgcagttcatcatattaagtcattatcctacctacagcgtattggacaaatttcatatatacttttcaattagtaagaaaagcaagtattgcagcagtcacctatctgatacaggtccttacagttgaatcagctctgcccatctgtaaattatgtttgaggcttgaacttttccctgtacttccagttcca

SEQ ID NO: 587773 - DNA, 166 bp, Homo sapiens
tgttttttttccccctccccctgttgggggtttttttgttttttcccctgtttttttttccttttcccccccctttttttttccctttttcctttttggtttttttagccccggtttggggtggatacccccccccctcttgggattaaattgtggggtcgggcga

SEQ ID NO: 587774 - DNA, 312 bp, Homo sapiens
tttgccattatttttatttttaaagaaaaattgttggccgtgtgggtggctcattcctgtaatcccagtgctttaggaggccgaggcaagaggatcacttgaacccatgagttagagacctgtgtgagtaacatagtaagacctggtctctacaaaaaaaaaataaaaataaaaattagtcaggggtagtggcacacatctgtagtcctagttgcctgggaggtttaggtgggaggattgcttgagcccagcagtttgaggctgcagtgagttatgatcgtgctgctgtgacagaatgagtccctgtctctg

SEQ ID NO: 587775 - DNA, 154 bp, Homo sapiens
ttgaggatccacacatgaccagcagcgagaatatcttattcaagacaaacacagacaggaagtgaccgagctgaacgtgacagctgtgaagattcagagacttctgagccccgatcttgggcactcaacgggccttgggggtagaattgtgtgg

SEQ ID NO: 587776 - DNA, 963 bp, Homo sapiens
  misc_feature (1)..(1): n is a, c, g, or t
nccttctaataccccccgttttatatatataaccgcccgtactccgggtcaaattttttaccctcagcaaatatcgctcgcaaatagtgccgttcaaactcttttacccccccatgtgttgcggcactaactctgcccgtcactattccgctttaaaatgggtctttcccccttgaacccgtagtacttgcccccctaacctcgtcgtatatttcactcacgtatctccaaaaaaactttcccggccgtgcagtcttatttcctgcctcgctaactaaagaccttatcatcacccctcttcctgtgtcatgagcaaatgctctgcctgtttacaatgcacagccgctccattttaaccacagtgattctccctcggaaggttgctcatacccctgcactcgtgcgcctggtacaccgagtggagtgtgggtttaaaggcccagtcgcgggggaagtcaagacactttcctaacagagtcattttggatatctcaacgggattactgtttgatactcccatgaagaatagttgcgagacgcacgcaattttatggtgtcgtcagcactgctctataatttctgcagccgccgcaccaatgtgacagttttcccgccccggaggattatatagacgagttagttttggtagctaggtcattgcccatttgctcttggcctctggtctctttcactcgctcattatatttctcccttacagttaataagacccgcctaatttctgtacaccccctagagtcagttttctcatgttccgttccacattcatttttagattacattttacttacctcttcatataccaaagacccatataaatagtattgttagcggaggaacaatcacccaactaagtaattaatacacacataggagataaaaataccctacaagaagagaataacacatataacaaaaaaaatataaaccaaacaccacaaaaca

SEQ ID NO: 587777 - DNA, 201 bp, Homo sapiens
aggtagactaactgtcgagggagtgagagcggtacttggcagcatattgtcactgtacctgtccacatcttgagaataaacgataatagaactagtgactactttccttacagtttctgcttggtccacccactgaagtagctcatcgtagtgcggggcgtattagaggcagtgtggtacgttagactcagactggaaagt

SEQ ID NO: 587778 - DNA, 225 bp, Homo sapiens
gggaaccatggagggtgtagaagagaagaagaaggaggtcctgctgtgccagaaacccttaagaaaagcgaaggaatttcgcagagctgaagatcaagctcctagaaagaagtttgcccaaaagatgtttcgaaaggcaagaggagtttattcttgaaaagcaaatgacttcacaaggtttaggcagttgacagatcgattcgttcgcgagtagcagaaatcggc

SEQ ID NO: 587779 - DNA, 936 bp, Homo sapiens
gccggagcacggacgatctctgccggccttgacgtgcacctcgagggtctgcagcaccctccgtgttcctctcctaggcgacgagacccattggactagagagttcaccatgtctatactcaagagccatgccagggagatccttggactctacgacgggaatccgcagctgttgaggttcgactctcttcacgctcacaagaggtctcttcagagctggctgtgcccagtggtgcttcagctggtatctatgaggccctagagctccggcgacacagtgatcatgactcgctatatggggaacggtgtctcaaagggctgttcagagccctatcaattacacacactattagcgctctgctcctggtttacgcaacgacatactgaacgctcatcactaacaccgaggaagcttgagcaacacactgattgactcgtagcactggactggacacacgcaacatataaagtctagagttcaggttgctgactcgccagtgtcgtgctgggttgtccctgtgcccgtctgcaaaacgacttggttgccctgtatcgccgacagaggcgcgtcctctccctcggtacccgccgtcactcctgctcgcctttgggcgtgcgtagggcttcgtcgactagtcattgtccttgctccgtgtttctcgcggttgcgtttgcatcgttggtctttacctaaattcgggccgggtatccttgcgatcgcgttgagccctatcggcatttgctgttgggcgccaatagggcaagtgtgacaagtgtcctattggaaattaccccttccactcgaagattcggtggattgccaaggttaatccacctattccgagcaggcaatgggcccatgtgcctggcgtttctgagcacgcccaagaaggtgtgttatatcgccacccaaagccctttcgataacgaacaatg

SEQ ID NO: 587780 - DNA, 553 bp, Homo sapiens
tggacagcttctttagactccttccacagtgctccgtggcaactttacttcattccattttttttaaggttgtatactgttgttcctggagtgttcaagtcaaccagagggcatcaaatccagtggatcttaggtgccatctgtggaggcagaaggaaggacagacatggcacagcctgcctagttctgccgtcccactgtgggaacatggagacatgctttttaaagtgtggtgttggtcagacaacttaatgtcaggaattggcaaaattgttcacttttgttttcttggacagcggggactgaaattgatgggttttgtcgcatagataaaacccatagtcagtttgtggtccaacttctgcatctgaaaaagccaaaggagaaaagcctttgctttgatttttaaagctatagaacatatttataagtatggcagcgtccgccgcagaatgatgtgtgtgaggctctttgtagcagggctttctttacctacagatcagctgttacatgtgcccagccaccccccccacccccctttcagtaacagcct

SEQ ID NO: 587781 - DNA, 172 bp, Homo sapiens
agcaaagcatgcaggaacacatctgattaggtccccacagccaaatcctgggtaggctgcctccaccatcctgccttgccatatgattaactcccctacaactgtaggattgggatactgtggcatcccagtggcagcaaagaagcaaaacagataaatctcctccccccga

SEQ ID NO: 587782 - DNA, 242 bp, Homo sapiens
agggaattgcagacgcgaagtctgcacatgcacagactaaaacaccaaccctttcgtctctcaccttggacagaaccaacaatggatagttaaaaaaatgaatgaaatgcagtgagcacttcatttacgaaaaaaaaagaatatcaaccaggaaatccttccaccatgtgatcatggcaaactgcgctcttcattaagtaaccaggagaatcctgaaggcactctattgattttccccacac

SEQ ID NO: 587783 - DNA, 115 bp, Homo sapiens
tgagtgttagtgaggtagcgatggaggtaggataggtgctgtgggtgaaagagtatgactggggtggtggttgtggtaactttaatagtgtaggaagctgaatagtttatgctgt

SEQ ID NO: 587784 - DNA, 1039 bp, Homo sapiens
  misc_feature (1033)..(1033): n is a, c, g, or t
gaaacattcagagtggcgcggctgatcgctgttcacttctctggctccgggaccgtggtgggcctgggatgagaaccggcggttggtatgctgtgaaattcaaatggggtgatgcgaaggagtcttcgaaagtgaaaactttagatgaaatgcttcacgaaaagaaacgaaagaaggagacaggaggagaaaacagagatcccatgcttaaaaaaattctgatgacctggataccataggacggagtaattgccttgtaggaggggagtcgtctgacagatcacctgccctggtagaatcgacatactaaggatacctccgcctgtactatgcacatgagaaggactctatggaagacgcagaggagagagaaaatgatcctttggcatcaaaaacacgccacggaatgtgtcggcaaaggacaaagctccatcgacagcaaattcgatgaactgagaagagcgcaatcgtagtcatctgtaccatgcaccagaaggtggaagccctgctacagtgaagcggaaaaaagaactgagacgcacgaatgtatgaaaacggcatcgcaaagaccaggataggagcctcgccatgcgagtgggcaacgacagaagcacgccttggagatggcacagggcagcattccgagtatgagaacaggtacccgcttgtacccatgttaccaagggaagctggacctcggagtccaaacttggggcgccagaagaccggaccagggtggagcggaatgaagcgaaagcgggccgaaggacggggtaagaagggagtgcgcaggtaagtgatggcactctgaaggatttatagactaggtaacaggtacgcagcctgagagaaagcgttcggctcgaaagagtatttgggaagcggacacgcaaaaaaaaaacagggggggtcaattgcaaggacgttaacacaattaaggcaaaaaaaaaaaagggtgttatagggagcagattgggtagaacaaagaaaaagggtgtgataaaaaatttttttatttttctttatgatgggnagggcg

SEQ ID NO: 587785 - DNA, 349 bp, Homo sapiens
ggagaatctatcgaatccaggaggaagaagctgcagtgaaccaagattgcaccactgcactccaacctgggcaacaaagcgaaactctgtctcaaaaccgaagcgaaaagatccagagaacactcgaagagataattagggactcggaaagacaaagactgaaggattggtggcaatgagttatggggaaaaactatgtgaacgaaccacagcgagccacagagtgagacatatttgagctcaatacgaatgctcaccagactatcatcacgaaggtgatctagatatgaaggtatgacacaatctctttcaccaggcactacattgcttgctctagccatgtaggctt

SEQ ID NO: 587786 - DNA, 966 bp, Homo sapiens
caatctggaagactggatggcctcaaagtggggaggaggaggagtgtgggataataggaggaaaggagcgtggagtgacgtgtggttactcaaatgagaagcagctaagaattttgcatatctggactgagacggggcggtggtggggctgagcaaaaggaggaggagcccggagacatcggtgaatggtacccagtgagttccgtgacgcccgtcttccatcgcagtcctcggtgggagggcggggcataagagatcccgacaggcccgcgaacaagtatatacatattaatgaggaagcatcgagatcttcgaagaaccagcttagcctagaggagcctaggaaccatctcgcttcctcagcgcgtaaccgtgtccagcgtaaggactctggcggattggttgagccatcgatggcaaaccagcttactagccacgaacgcaaaagtccctggagaatcctgatgtatagtagacaaagtgattgcatgcagataatctgagtcgccccatcgtccacaactaatcacagtgggcacttggagagcgtggactgagttgcccttgagaagtccttcgtggcatggctatcagctaatgggtcatgtgctggccgtccaagcgttgagctggaccatctggactgagtgccggggctgggcagatgcggttgcgtagtgcagagttgtactccctgagtggaaaggggtagaaggcactctgccccgggtcaggagcgctagtccctttataatttgtcgtgtaggtcaacgtctctgggggacaacccgaggggtaacgtaacgggccacaatcctgcgcaaatgagtgcaattgtgtgggcaggggtccccttgaggtgtcaccacttgtataccacggcccaaatttcgatccagctccaaatcgggcactggtcacgtcgcaagaattcttcttcccctttgagggagttgaagacaaaag

SEQ ID NO: 587787 - DNA, 1176 bp, Homo sapiens
gttcgggtaacaactcactgtgttatggtttccttagtggcttttccacaggatccactagagactacttctttgggggttactcctcgcccgtaatatccggaatcgcggtgcaacgctaccagttttcccaaggctccatgggacctcatagggctatgcatttcactttggccatacgtggtccctcttagtgccatgtgtgactatccaagtccttcctatacgggcccgttgaaattggacgctctctgtgctcccgcaagttcgtacttcccgcgttgcgtgcttcatggttgccctaccccgtcctacctggtttcacagtcagtgaaagtgtaccttgatcccgggggagtccatggctgtctgacgcctgatctcccaggggagcacggaggcagattctgagctattgtaggggactaggcccagcctgtcaaagttgtactgagattggaacgcgcgcgtccgtcctctgatgcatgctggcgctcagatgtcgtctcagctcttgcttctgtgcctgtaaaatggcgaatacccatgtcgaggtttcaagggcaaacctcgctattcattagtcaggggttctcgacgtcccagtatcctcccagggatgagttcccccctcctcgttctcgacttctgtactgacacattccttgggtgccttttggtgaggtctgcacaccctcgtccatgcttagccccctctcctaataggcccctgaatataactccgcctccaatggagactcaggcagggcagagtacaatggctgcaggaaaatcattcagagcgggacatgctggcctgccctcccacgcactagtcacgccatgtgggccctcacatgcccttcgtgattcagggcacaccttgggctcctgctagcggtatataggcatggacaggtaagaaaccactgggaacacagcccttaaggactaatatgcgtagtcacaagtgccattcttcgtcaggtctctgtgggtagccttgtgtaggcctgtaccgagctggcatggctaattttgtggtttatgtagcctatcacagtgctctacttttaagacacttctaccagcaactgtcggttacgggagtgtaaattttagcaatattgttctgcaatgtggcaatattcaaaatgtaaaaggcacacatactta

SEQ ID NO: 587788 - DNA, 260 bp, Homo sapiens
taaaataagttttattattgtggagcagagcaattaactagataaatgactacagatctaaaccttaaggtatgcgaagagtaaaatatttgtggggatatgaaagcaaacattcccttatctttatatcatatacatttttgtatattagaaggctaggactttttgcagtggcacgtagaaatccagggaagttttcttttcacccagggagatgatacacgaaataagattatattgactttttttttttttttttt

SEQ ID NO: 587789 - DNA, 861 bp, Homo sapiens
  misc_feature (51)..(51): n is a, c, g, or t
  misc_feature (658)..(658): n is a, c, g, or t
ttatccctccaaacgcattcacaatgaactgacagatccctataggactgnccgttctccccatggagccctgctgggactgaggacatgaaaatattttgcttctaccatatgcttttgttggcattatgcaggaaccattgacatccgttggaatgaattatgctctcattacctctttggttaaatctagacttaccaggctctgctcctcacaccttggaccttctgaaagaagacgcccgacaacaccattatcaagaccacgtcccccctccccgacctctcccccccaatcgccctaccacctccgccacatcacccccgcacgccgcagcccccgtctcctcacagaccgtaccgccccccccccaatcttgtcagtccccccacccgtactccaccctcaatccttaccctaccgcccatacacacgcccacctccatcgtcacgccccacccataccaccatgctgccccacctccattcagtctcgagccacgtacgagcgatacgcgcccccctcgctttttcctccccccctttcctccaccccgccagtatctcttgccagtcaggccttaggcacatcaaatctttatacagcccctccctgatccaccgcccgccccaccggtctcccccccgccccactcncacctcccccactccctaacactttcgtcgtcgttaacccaccacactcacggactccttcatgctcttgcaccacataccatacatctcgcacccgctcatgttcgccctcccactcccccctcacccgcacctcctccaccctccattcactaacagccctatcgatcataagcacgtcctcacgctctacatccccagta

SEQ ID NO: 587790 - DNA, 359 bp, Homo sapiens
ctcgagaatcgcaaatatttgagtacgtgctgttcatgcattcctcagccacttttgtgtccagaactttccagatttgtgcgagatgtatgaagtctctggcctatgattgtgcagaatgtgtgtgtctggctgatagggttatcgatgtgtgatgaggtcgatgtgacagctgctatcacgtcatctcatgtctggggtcggaatgatgcctctgttaagcacgtttgggatatttctcttcttaggcatgattagtaggcattccagtatgtcagtacacacttattttgctgtgtatgagagatcagaatattttaaacgctactataaagacttgtactggccgcgacatcgca

SEQ ID NO: 587791 - DNA, 669 bp, Homo sapiens
agtgtaggctatgcatactcacagtgaatggaacaagtgaagaataaggataagaagcaataaaatatgtgtctgaattgctagtctgtaaaactgtgatccgaaggttttcagaagaagaccagcttcagctcgccgaatgtgtctatccgttcgtaaacttatcgtggtgcattctccgccagcccagccgcgattagtataagggctatctgtcagatggctgttaacctccccaacaaataattgccaagtgtccaatgagaacttatcatgtaggtgtgtaggtaaatcgggcaaatatgatagtgtcttacatcgggccttgatttcaagtcgtcatatttgtacaatcgagtattttagaaattcacatgacacatgaaaccagtttttgcaattttttttaaactgggcatctggtttctaaacaatttatttgaaacaatctagaattttcttggtgcaaagtgtatcacgtggaatatcctcatattcttaccatattttaagaactttacagcacgattaactgtaaataattcattgatcggtgcagtctaatccctaaatcatactcttacatcaccgaatgtgtggacgaacagagccatgtcatatcactttgctcttaacattcttttgaatcaggctcaatccagcctcatg

SEQ ID NO: 587792 - DNA, 121 bp, Homo sapiens
gcggccgcctactactactactactgctcgaattcaagcttctaacgatgtacggggacatggaatcattttgaagtacattggaatggccaagagggagataaacaaacttctcaaaaaa

SEQ ID NO: 587793 - DNA, 890 bp, Homo sapiens
cagggagtcagcctcgcccccaccccctactgtgttcatgcaagtgttatgactggagggcgagaattttactagctactcatctttttggagaccagggactgcccgtgctgggcagcactggccttgctaagtgacaatcgactctgttttgcccacacttataagcgcgccaaattggggcttggaccactgggaggtgagaccacctcccccaggtccccgtctccctttcaagaagtccagtctcactttggccacttcatgccgccgtgcccgtaactgggtgttttgttcatatttgttacaagaacgagaccacccatacccatccgttataggcttcttgtcccctgtagaatagaccagtgacgttcgattacacgtatttcgtgtgttcccgcgaccacctgtcctagtgccccagactgtgcccacaccagtagccctgaacaggcagctggctgttctcagctccaatggacctcagccgccacattcacacccccgagccagaccgcgaagagggagcaggaaaccgggcgctgcggcaggaggccaaccgcacgagcgccagcactgacggcccaagcaggcccacccccatgcccaagccacgaccacgaacggagaccgaccatcgctctgcactaactcccacctaataataagatactggcaaaaaggaccacacgggacaaatgaaacctgcgacagcattgcccacaacaggacaagtgatccgcaccccaattaaacaacgccagggccacccccaagaaaaaaaatcaaccaaaaaaaacaagaaaactgaccgccacacgcaagaatgcgcccaacatacaccacccccaaaggtgaccccagaaacacgagagaaaacgaagacc

SEQ ID NO: 587794 - DNA, 177 bp, Homo sapiens
cctgactgatggatcacagatcgagtagcttcccatcacaagcaggtgggtcgtcgtcccccaaacgctcagcgatgacgcctgtacacacgcatctgggaccttcactgcaaaggactgttcatgacatggagcaattctggacagcagcagtatgacatttatgacgaggatggt

SEQ ID NO: 587795 - DNA, 168 bp, Homo sapiens
caaaaaaaaatcgcgttcttatgttgacaggatggtctcgcactcctggttctcagcatcctctcattttggcctcccaaagttctgggtttatgggagcgagccattgcacctggccactcctccccttgcttttaatgctcagccccttcactaaagtatgccctg

SEQ ID NO: 587796 - DNA, 121 bp, Homo sapiens
  misc_feature (6)..(7): n is a, c, g, or t
  misc_feature (14)..(14): n is a, c, g, or t
  misc_feature (20)..(21): n is a, c, g, or t
  misc_feature (27)..(28): n is a, c, g, or t
  misc_feature (54)..(54): n is a, c, g, or t
gtacannatacgantcagcnngtaccnnaagggggcaagcatgctggagctgancagacgctgacagttcttcaggcatttctatttcacaatcgaattgaacacattggcccttatcgag

SEQ ID NO: 587797 - DNA, 269 bp, Homo sapiens
  misc_feature (1)..(1): n is a, c, g, or t
nctggcagcatccgggttttattgacggcagaagaaaaattcttcctttccacttgtgaaaggtatttgcttaatttaactcagttttttttgccattcgttgagtgagatgactgtcttttccaccctataatctgtgtgttctttcttgagataatggtatccaccacagctacttattctacaagagaaagttggaaggttctgtcatacaggtgttccaccaatggtgtcttcacatcactcggctcggggtcttcacaaaaagt

SEQ ID NO: 587798 - DNA, 115 bp, Homo sapiens
ccttgcccaaaacagaagcctgactagatgctacttttgaataagtcaacacaaatacacagcagtccattaaaagaagaaaataatgtgtggcaaagtgtggaatggcctgatg

SEQ ID NO: 587799 - DNA, 141 bp, Homo sapiens
  misc_feature (82)..(82): n is a, c, g, or t
gtttgaagggactgaccctccaagcttctggatatcaggagctacctggaaaaaagtcgccacaggcaagactgcccatcanccaccagttcatctaccagctgcgggaacgtcttcaccctgctgccagcatgtcagcct

SEQ ID NO: 587800 - DNA, 149 bp, Homo sapiens
gtcttccagcttctagctcagtgcatttcttctgcccacaacaggactaacctggatacagggattaacctaagccttaaggttttcaatgaaaaggtcaaccaagggctttctgtttcagtaaggctagggctaagggctctcttgca

SEQ ID NO: 587801 - DNA, 105 bp, Homo sapiens
acacacggagaaactcgtctctgctaaaattacaacaaattcaggcgggcacagtggctcacgcccataatcccagcactttgggaggccgaggcagggaggatc

SEQ ID NO: 587802 - DNA, 307 bp, Homo sapiens
cctttactggccccatcattggccccagtggtactgccaccgccaacttcgccgccaacttcggtgccattggcttcttctgggttgagtaaattgtcagatactgctcatcatttgcaatagttttccctgacgtgagctgaagcctcaggttccttcaaaacacgctatctagagagccacatcctgttgactgagagtggcatgcaaaatacatttatttgctattctgtcttacttttttttttccttgtgtgttgtcaagttttggtatcagaaataaatgttgaaattgcaaagtgaaaaa

SEQ ID NO: 587803 - DNA, 734 bp, Homo sapiens
tggaagctttctagaaaagtctttattttcctgttatgaataatggcattttctaattatcccaaatgatttaataaatcccgtaactttaatgtgcctgccggggatccatgaaataaaagtatcccttaccaaaagagaagcatcagatacactggaagggcctcaaggtttaaatattttcagaaataaaagtgattggtatacccttttataaactatatgggtagctgggtaaaatttttatagaatttttaatggatctagggggtcctatgatgaggcaacattccaccaaattagccttccaaaagtggcagtatcatgtataattatgacagcagtttggtttctaaaaccagagtcagatggatatgtcagctttttaacagctggaaatttatggccttatggtggtaatccataaaactattggatcacacttaggggtccacatatatcttaactcttgggttaatactctgtctggaaaacgtcaaattccacttatcaaatggataagagtttcaggggaaatgttaaaaaaggtttttttctaagggctccagggactagaattccaggactcataaggacatcgtaagaccctttctggtagtgaaagctggagtcttaaccaaagagcgtaagccagaattggagaatctgagagtaccgcccaaatgtccaatggggattcaggtgcatttgggacattatttgacatactggga

SEQ ID NO: 587804 - DNA, 183 bp, Homo sapiens
ggtgtgctgtaatctcagctactcagtgagtaggcaggagaatcgcttgaaccctgggaggcggaggttgcactgagccgagatagagccactgcactgcagcctggatgacagagctagactcgtgtctgaaaaaagaaaaaaggccaggtgtggtggcatcgataaacaccgggtaccgag

SEQ ID NO: 587805 - DNA, 870 bp, Homo sapiens
  misc_feature (870)..(870): n is a, c, g, or t
acaatttggattctcactggtatgtttaaaaactgaataaaaggaatagaatttttttggataaaggatcacaaaacaattctaaaacctaatgttttaccatggaaatttaatggtgataataggtttaaatgtctagaatgcaactgataggcttttctttgaactggtagttttttagaagtagttttttccatgtctaattggtattttgtaaaaaaaacaaaaagcaaaaaaaattcccaaaagccagataacaaccagagcaaaactgtggtgccttctatttatcttggattcagtcttggcaatttgtttaacaaaaaaaatctagattggtttaataaggtccagagtatgtgggggaataaatagaatccctctttcatcactgtggtgtatggtcttgggtccaccatattgtgttatgcctttattctaaaatgggagtctcaaacgtgaatgccttgtgaagacagatgcttctataagaggttctgggacctaaatagtccagcatacggtatttaaatcggtatcaaatcagatttctaaatcataggcggtaagagggaatgtaactttaatatggggacttgtcatgtgcagagtccgaatttttttttctaaatcatagcccttatggaaattctatcggagggactcttaaagaaggcagcaggggtgtaaatggacagtggcatttttacaacttttcgagaaaattattctggatttgataaaaaaaaaaaaaaaaaagtggggcggccgaagattaacatgtggcggccaaataaatataagttacgaacggtgaagggttcaacacgggaggttaaagatggtttgttaggacaacgctctcgcgtn

SEQ ID NO: 587806 - DNA, 963 bp, Homo sapiens
  misc_feature (676)..(676): n is a, c, g, or t
  misc_feature (917)..(917): n is a, c, g, or t
agcgtgtggccgttgctatggcaatgcggtggaaaaacgggcctctgggtatgtcggctgccggccggctggtaagccccccagcggatgtggacctgtggaccgtgcgcgcggaccccttccgaggtgtcgatcctggaggccctaaagtcgattgagtaaccgcagttttccgccctgtgtgtcctggatattttgaggtgtgggtcgatctgatctgtgcgcctggtttctatcttccctagccgtcgtcgaacatttcaatgcgcacaatcattgtggaacggttgaaaactgttggtgagaaggttgacgaaggcgacacgtgtgacttgttgtggctgcctcactgtgtgacatgatgttgtgctgagtgcaatccatttgaagccgtggagggaagtttcacgcgaggttcagacaacttactagttgttacaccagtcaatctaggcgttgatccttattgtggtcgtggtagtgttcttactcgtcataatgaagtgagaagacattgtttcaaaggatgtgcgctaggggtagcacgaggttgaacacaaaaggtggcttgactaagatggaccttaggaatgaacaaatactcgcagcaaatattggggcgctgaatatggtattcagtcattgcgtttgctcgaggaaaacgagttgtaagctntatgggtggtaatggtatgcgcgatgctatcaacgagatgcggtctcacgtgccacgtttgtgagagatgtgcttggtagaacagtgttccagcaagaacagtgcagagacagtttgtgctacgatgcgaagacagtcatgttaaactatgccacgttgcgaacgcatgagcagcacacagtacaagagagacatatcgcaagcaagaacgactattaagcgtcacagcggaagaagattnttgaccctagacaggagaccgttcgcaagtggtgagcagcgacgaa

SEQ ID NO: 587807 - DNA, 170 bp, Homo sapiens
acctttgattggcgggcacttatgcaccttactatcttaacagctttgagtgcagagattgaagagttcaaatctgaccagatgttatgttggataagagaattctctgctccccacctcttagttgcccgccaaatcgaaggggtacccgaggctcgaaattcggtaac

SEQ ID NO: 587808 - DNA, 152 bp, Homo sapiens
cacagcgctaagctcgcactgagttttttacctgacgtaggcctagatattaaacatgctagcttttattccagttctaaccaataatataaaccctcgttcccacagaatgctgccacgcaagtatttcctctacgcaaggcaaccgcatc

SEQ ID NO: 587809 - DNA, 419 bp, Homo sapiens
  misc_feature (143)..(143): n is a, c, g, or t
  misc_feature (413)..(413): n is a, c, g, or t
  misc_feature (415)..(415): n is a, c, g, or t
  misc_feature (417)..(419): n is a, c, g, or t
aaaaaaattccacttgcctcagttgccactggtcacatttcaggtgcctcaatgtcctatatggaaatagtgtctacccatattaaatggttcagatttggaatattccccatcacagtagaaagttcttttggggccgggancggtagctcatgcctgtaatcccaccactttgggtgtccaaggcggggggatcacttgaggccagatgtttgagaacagtctggacagcatgacgaaaccccatctctacaaaaaatacaaaaattagctgggttggtgacctgcgcccttagtcccagccactgcggaggctgagggagcccaggacatggagcttgcagtgagccgagatcatgccgctgtactccagcctgagccttgagtgacagagtgagaccctgtctcaattnangnnn

SEQ ID NO: 587810 - DNA, 165 bp, Homo sapiens
tcggcccgatgttttctctgtggggacagtgaggcaaggggtttagtccagacctagtgcaaaggccatctcctaatggaccagacgctctctctgtggggagagtcagtgcccagatgcgctggtgctgagaggaagtgcatggtgaatacccacagggttgtc

SEQ ID NO: 587811 - DNA, 820 bp, Homo sapiens
ggggtcaccttcccacgggctggcacctgggcgcgggcgctgccccggagccggccggcggtgacctggcgcccaatcctggtgggaccctggtgccgtggcccagtgggcctgggcctgacggtccctggggtgcgtgtgccttgcgtggcccgtcccgtgggcggtgcctggtgggctgtgccccggctggctcctcccctctctgcggtgcccagtcgccctttggcctgggcgagctaatcgtcggctcaattgacagactgatgtgccctgatcccattcacctgtcccatggaacgctacaggaagacagacctgaacgtgatgatgcccaaggctggcttcttttgcttgtcagcctgcgccccacttgaagcaatgagctccccgggctccacttgaaacagcagctcatttaaggctttccccaactgcccgtgcctccgggacgataccttaagcaaacgaccggtgcccgcatctggaataggctggcgagatacttagtatccagagggctcgggactttggcgccatcgaggtcatggggacccaggatccagggaacatggggaaccggagtcccaggcctcggagcagataagcttgtgcccaaagaggatccacaagtttatttgcccttgaagagactgggcggaccaatggattgttgcaggttacagacttgtaagagttcccgaaagacaagccgggccccaaaaggagacggacttgcttgcaatccgggaggactcttgggcagcttgagtggtatcctattgagggtaacgctatggggtaccaaggtgccttccct

SEQ ID NO: 587812 - DNA, 200 bp, Homo sapiens
gggggttttttttccccccccccccccggggggggggggggggggggggggggctttttttttctcttttttttcccccccccttaaatttccccccaaaaaatttttttttaaatttttttttgggggggcccccccttccggggcccccttccccggggggggggggatccccctttttttttttcggggggggggga

SEQ ID NO: 587813 - DNA, 451 bp, Homo sapiens
ccccccggggggggcccctttaaaaatagtgggtcccccggggtgcaggatttggcccaagtaagggggcccaatcaaaaggtaatttaaaaaaaattttttttgggtttatgtagggggggataaaaaaaaggtttttttttaaacatggggttttttaaattcccaaaaacaaaatttttaaaatgtttaaaatttgggccgtttttttttatcaggggggcctttaaaaggggaaaaaaaagtttttttaaaaaaacccgttaaaattaaccccctttcccccagtttttttttatgaaaagtttttttaaaatttttaaattttttttgccttccccaaaggttaaggttattggattttaaaagattccccccaaaaaaaaatggggttttttttttggggggcccccttaacaaaaaagtttttttattaaacccccccccccca

SEQ ID NO: 587814 - DNA, 151 bp, Homo sapiens
agagcaactttcagaaccaaagatgggcatggtaccttcatcatagtttggaaacagcagagtgatgtagtgactttttaaaacacagattttcggtattttcaatgtagatcagtgtcctcatttaccattctgtgattcataaatctgt

SEQ ID NO: 587815 - DNA, 972 bp, Homo sapiens
cctctgtggtactcctcctgcctcagcctcccaagtagctgggactacaggcacaagccactgcacccagctccaactcctttctttatgcaaatactagggaaagactaggaggatgagccaggttgctactaaggactaagtgtcgcaccaaggtttgcctttgtatttgcataaagaaaggagttggagctgggtgcagtggcttgtgcctgtagtcccagctacttgggaggctgaggcaggagggttgcttgagactagcctaggtaacatagtgagaccctgtctcattaaaaacaacaacaaatacagggcatgtggtgggcaccgcacttgtaagtcccagctacgtcaggagagacttggaaggctaagaacgatccttgggaacctaggagttggagaccatgcctggggcagatataagtagaggacccatctcatgaaaaaaacaaaaacgcgggggggagaaaaagtaggaggccggctgtggaattggaggccatggagccccaacaaaaacacaggggaattaagggacccgaagaaggcatcaccacagcgctgggctagcggccaagaaattgcgacgacagaggggggggctctgacacaacagagctacgtgtcacaaaaagaaccacataatggaagcggaaacagcagaaagtacaacaacacaaaatgtttcaccaacacacaggaaacccagggtcacagtcgcggccacaactcgacacacgcgtgacccagggaatctcaacatgggggtcgtcgtgcacaaaggaacgagcacataacgggacacccagaacggcactgcacagcaactaaagagacaaggcaacacatgaaggacaggcctgcgaccaggaaaggaaacccccagagaccgccaattagcactgtcacaaataacaccttaacgggtttcacagaacctcagtttcaagcaaacaaaaacaaaac

SEQ ID NO: 587816 - DNA, 209 bp, Homo sapiens
ggtgctggtggttctgtgcggcgtgtggttcttgtgtgggaggatagcttgagtccaggaggctgataatgtagtgagctgtgatcgtgccatgacactccagcctaggcaacagtgtgggaccctgtctcaaatacacacacacatacaacacacacagacatgcacacacacatttctcatgtctatacatagtttattttccattt

SEQ ID NO: 587817 - DNA, 781 bp, Homo sapiens
aaaagcgggcgatgattgcaacagactcactataggcgattgggtagcgggcccacccatgagtatttatatcttatttatgggtgttgtagttgttctcagatggagtctcactgtgtgaaagaagaaagaagatgatgatgatgacacagacactcagaggaacatgcaatatgtagatgtaggcagagattagagtaagacatcttctttctaagtacactagtattgcaggcagccaccaagagctggagacagtgaaacatatattatcctgtagagccctttgagagagtacagtcctgccaacactatgatttcagacttctggtctctcaggctaaatgaagatactcctttatgccattcaccactgtgttaaatccttgcaaggtatcttccaacaggtggtgtcagacaaacacaggtgcacatacactgagacatccgaggtatctacaaatacctacatagcagggactgggagatggaaggtgtgttcagtgtgttgggtgtggtattacattattaattgagcagcaaaggagcacatgtatgcttatctctttttaggtgctgggtttttttacatattaaaaagcggttatctgagtgttcactcttcacatgtggacatatccacatttttcgtctcttattttagcatcctttctttgtgaaaaaagtagtgccatgggatttccaatgggagagagctactgtgttttactttgtgatatgcactataaagaatgatcttgtaacccatgtctgtttttcg

SEQ ID NO: 587818 - DNA, 147 bp, Homo sapiens
caggacaagttcgagcattcttaacaatgattcaaccaggaggagataagggaagctcgaggaagagaaaaaacaactggaaggagaaatcatagatttttataaaaatgaaagctgcctcttgaagcactagcagactcagctgag

SEQ ID NO: 587819 - DNA, 419 bp, Homo sapiens
agctatgatcacgccactgtactccaccacgggcgacaaagcaaaatcctgtctctaaaaacaaacaaaaaaaaaaaaggaaggaaggaaggaggaaaggggaggaaaggtttaaaattggccaccggcggtttccggattgaaatcttgtggggggggggaccgtttttcattgatttccccacggccctttttaaaaaggttacattgggccgccggtcccggtttaaattttttttttccacagaaaatttaactttaacactgggggctaatttttgggtttaaaggccggctttttttgggttaaaaaactggagggggcggggatgtttttttgtttgggacatggattttttttaagggggaagagcaggtacccgggctcgaattggaaataagggcaatggttgttcctt

SEQ ID NO: 587820 - DNA, 587 bp, Homo sapiens
ggacagcatcctccctgagcatgccacggtgttcctcatgccacacctaggatcctgctcctcccactggtccttgttgaagtttgtgctgttcccaggactctctggcgggagcaacttggtctccggccaaggtagccagaatttattgcacttcctttattggaagtcgccatacttaagactggacagcattacgaggccagcagcacagcggtctcaggcgggcagtaaatatcatcattgagaatgccctctttcacttgcagaaagaacaggcgctgagtgatgtcctgaatcaattcctcggacacatcctcagggtagaacttggcacggaacttaaagagcagggggctttccttccgcacatcctgggcagtcaccttcttattgagtttcagccaggtggagaaacctttagtgtcctggtactgcagaccaaagaaccaaacttccctcaagccaatagttttcaccacctggtcaaatagctgcttcccggtggtgttgggctggatggcaaactccagctctgcatccatggtggtcacaccgcacactgatcgttttgggcatggtggcgg

SEQ ID NO: 587821 - DNA, 1606 bp, Homo sapiens
cgaggtcagctacgtaaatccctttgcggcgggataaataaagaaaacaggaaaggaggaaagcattgattacaaatatcttaacaatgagcaaatgtgcaaggaaaaaatatattaagacaaatccaagacaaatgaccatggaaacagttgaatcccagcatgatggaagtataacagcttctttgacagagagcaagtctgctcatgtgcagactcagactggccaaaattcaatccctgctttagctcaggtagcagcaattgcagagacagatgaatctgcagaatcagaaggtgtaattgactctcataaacgtagagaaatcctttcacgaagaccctcttataggaaaatactgaatgaactgtcctctgatgtgcctggtgttccaaagattgaagaagagagatcagaggaagaaggaacaccacctagtattgctaccatggcagtaccaactagcatatatcagactagcacggggcaatacaatgaggaaactgaacttgccccaagtcacatggctgctgccactggtgacatgccaacttaccagatccgagctcctactgctgctttgccacagggagtggtgatggctgcatcgcccggaagtttgcgcagtccccagcagctggcagaagaagcaacacgcaaacgagagctgaggctaatgaaaaacagggaagctgcccgggagtgtcgcaggaagaagaaagaatatgtcaaatgtcttgaaaatcgtgtggctgtgcttgaaaaccaaaacaagactctcattgaggaactcaaggccctcaaagatctttattgccataaagtagagtaactgtctttgacttggaccttgtttactctaactaaggcaggagatgcagcagtcctacttattgccatgtggacttgtgggaaggacacgtgtgacctaagaatccagtttggattagtgtttgaaattgaattgggaatgttgttccaggatgtggaatgcagccgtgatcacacttaccgagcttactttgatctgtttgtcaatagcatgcaaaaaagctttgtttgccctttgcttctgctttttttcagggaagctgccaaagaatgtcgacgtcgaaagaaagaatatgtaaaatgtctggagagccgagttgcagtgctggaagtccagaacaagaagctgatagaggaacttgaaaccttgaaagacatttgttctcccaaaacagattactagaaattatttaactatgaactgaaggcagcatgtatagttgcttttgaaggaatacaatatatagctggcaagaatggtggcttcttttctttgtatcattcatcttcttctttaatcattcatcttcttctttaatcacttaacattcctaaaaatgcttcactgtacgtagttaagtcgtagctataacttcaaattttttaaaagggacaaactgtaaaaaatgtgtgtattcttaaaatgcaatatttgtaaggcttgttccaatgccacatacttgcagctcccattctatgtgtcatcaatagtgtcctatgcaataaattatttgcaggtctttaaatcattttaggaaggatgacaaaataagt

SEQ ID NO: 587822 - DNA, 1199 bp, Homo sapiens
tggaacactttatgttgaactgtggtagaggaaacaagacagttctgtctgcagaagcccattatggctgtaactggagatgacacagatgaggaaactgaacttgccccaagtcacatggctgctgccactggtgacatgccaacttaccagatccgagctcctactgctgctttgccacagggagtggtgatggctgcatcgcccggaagtttgcgcagtccccagcagctggcagaagaagcaacacgcaaacgagagctgaggctaatgaaaaacagggaagctgcccgggagtgtcgcaggaagaagaaagaatatgtcaaatgtcttgaaaatcgtgtggctgtgcttgaaaaccaaaacaagactctcattgaggaactcaaggccctcaaagatctttattgccataaagtagagtaactgtctttgacttggaccttgtttactctaactaaggcaggagatgcagcagtcctacttattgccatgtggacttgtgggaaggacacgtgtgacctaagaatccagtttggattagtgtttgaaattgaattgggaatgttgttccaggatgtggaatgcagccgtgatcacacttaccgagcttactttgatctgtttgtcaatagcatgcaaaaaagctttgtttgccctttgcttctgctttttttcagggaagctgccaaagaatgtcgacgtcgaaagaaagaatatgtaaaatgtctggagagccgagttgcagtgctggaagtccagaacaagaagctgatagaggaacttgaaaccttgaaagacatttgttctcccaaaacagattactagaaattatttaactatgaactgaaggcagcatgtatagttgcttttgaaggaatacaatatatagctggcaagaatggtggcttcttttctttgtatcattcatcttcttctttaatcattcatcttcttctttaatcacttaacattcctaaaaatgcttcactgtacgtagttaagtcgtagctataacttcaaattttttaaaagggacaaactgtaaaaaatgtgtgtattcttaaaatgcaatatttgtaaggcttgttccaatgccacatacttgcagctcccattctatgtgtcatcaatagtgtcctatgcaataaattatttgcaggtctttaaatcattttaggaaggatgacaaaataagt

SEQ ID NO: 587823 - DNA, 489 bp, Homo sapiens
tccgatcagtcaggcgacattaggaagcagagggtaagtggatgttaattgactccgctgattctgaagccatttgtgaaatagcatctagtcagatttaatggggatgcctgagtcatattgatgagaaatgacgcacctcatataaatacacaggataaattcagttttgtcacaagtcaagcagttacatagcaacacagatatagccttcgtccaagaagagaataagtcatagattaaaagaaatagattctaaggaagaaacatacgttgtaaaagaactggccgttgatattctatgaaatgacccccatccgggcaaaggacttggagtttggaggagtacctggtgtgttactcatcatgtttggcctgcctgtgttcctcttcctgttgctgttgatgtgtaaacagaaagatcccagtcttctgaatttccctcctcctttgccagctttgtatgagttatgggaaaccagagtattt

SEQ ID NO: 587824 - DNA, 309 bp, Homo sapiens
tgtggctgtctagaggatcccagatagaggcaggagaatcgcttgtagccaggaggcagaggttgcactgaccgagatcatgccattgcactccagccggggcgacaagagcgaaactccatctcaaaaaaaaaaaaaaaaaaaggagggtagattttcctatccctcatttgaaaggtggtgccagaaattgaaaggagcgggtccccaagagtcagcaatctggaattgcagcatacagggacaattctaaacccttgatcggtctacagagcaccttgagtccctacccctttcttcatccaaaag

SEQ ID NO: 587825 - DNA, 155 bp, Homo sapiens
agaggtccccctgagctatgagagcctcagagaccttggtccccccgctccactattaattacaacttgtgcaacgggagtttgttatatcgtattataaaagtacaaacataccaaagggtgcagattgaactcgttctctccccgggatacag

SEQ ID NO: 587826 - DNA, 375 bp, Homo sapiens
aactttttccccctaaaaaattctaacattctttcagcagttaaaagccaaatttagggtggacctgttttacttcattctttaactgtaggttggagtggtgtgaacgatctgcaaaactggccttaaaggggcagaaaaagtagacctgataattaaagtttatgccttaaccttttagatttggtttttgatatgctctcttagtaaatttgagtgtgtctttaaaaacgtaaacccaaagccatttaaagtttttcttttaactttgccactcgcgaatgaaaaaattgaaattatttgtagggaattgccctattcccattttttaatgtatgaggccaacaaataaattttatgtacagtgtgctgtga

SEQ ID NO: 587827 - DNA, 208 bp, Homo sapiens
tgagttgcttcctgagagcctcaactctaccccaagccctgcagctgcagcactgtgcctctgcctcttgctggtgagcctgtcccccgagcactgtagtggcggctgaagcagcacaagctggccccatgctgctctccactacaacctgagagcctggccccgagtcttcatgcctcttttgggcccctgggtctggctctgctgc

SEQ ID NO: 587828 - DNA, 590 bp, Homo sapiens
aaaaaaaaaaaaaagaactaatatttaagtctgggcaggggggctcacaccggggatcctagcacttcaggaggctgaggcaggtgggatcaccttggagttcaggagttcaagaccagccgggccaacatagcaaaactccatctctactaaaaatacaaaaaattagctggggtggtgggtgggcggggcatctggtactcctcagctaactggggaaggctggaggcaggagaaatcacttaacttggcaacctggggggccggaggtggcattggagccaagaatcggggctggcaactccagccggagggatagagcgagatgccgtctcaaaaaaaaaaaaaaaaacttaggggggttgggggcatttcaatctccacgggaatctccatgtggaaatttaaacatttctcaaattattacgggggttcccggtcttcccaaaaaaacgataggtgcccaagaaataagggcattaaacaaaaaccgagtcacccatcaacccgagaattaagtggcccagtggggaaaaaacccggaagacccccttcggggggcaaaatccaagaggcttggattgaacatg

SEQ ID NO: 587829 - DNA, 548 bp, Homo sapiens
tagaggacccctggccaggctctcatagcgttggcaggctcacctatgccaggcttcatttactctataagggctacaggactagaggagaggggagggaaccggaccagctaaaaaatcctataaacataaacagaagacacgtatcaattcagctcgggaaaacaaacagtatataatatatcacagcaacggattttccaaaaatctagtgacacagaaaaagcagtggaggggggcagaaatatcactggagataccagcaagaagggaggggtccaagtcgcagtgacgggcacagataagttactctctgaacctcagctatctatagaggggggggataatagtgccggcctaattcaaatcaagaggtgataggtagatcaaatgaatattaagtaaagggctaaattacatgtaaaatagtatacaaatgaggatgttactaataacaaagatcagaacactaaaagatcacggatacatgaaaaacatcaaagttatatgaaccttcctagaatactatttgaatccaggaggtagag

SEQ ID NO: 587830 - DNA, 646 bp, Homo sapiens
  misc_feature (133)..(133): n is a, c, g, or t
  misc_feature (435)..(436): n is a, c, g, or t
atcgtggcaaggtttctacaacatcggcattgtggagcagacgtgttggtcttggtgggttggttctcctttcaagaaaaaccacagggcaccaacgcaagaacaatataacagcttggatttcgtgtcatancccatttgtattctgaagcatactatggcataccagacttatactatattatattacattatttctcccttaaatagcaggacatggcttccatatttacttcacaacaattaattatcccgtgatcccaccttttcttgtgtggttcttctcactgtggtaccaagtcatcctccgtggctttatcccatttgtgctagaactctcgcatagcgcactgtccgcaacactggcttggttcccaccaaaacacaagcgacaacctggacgcacaatctccatctctccacaccacacattcnnaaacatcttccgacgctttctccatcagctcacacacacacgcctggaactgcttcacctcaatcaattctctctccattattctcaaacacacaaatattctttcacgcacatggacacattcggctggtcctaacacacaccaatatttccacatcaacataccttctgggtcgtactagcgaacacactatcgtcatcacgcacggc

SEQ ID NO: 587831 - DNA, 117 bp, Homo sapiens
  misc_feature (20)..(20): n is a, c, g, or t
  misc_feature (113)..(113): n is a, c, g, or t
tccatccctctagtcattgncttattaattacttctagaattttgtggggaaatgtatttaataagcaatgactaggggatggagcaccatagggggaaggagcacccatggngtac

SEQ ID NO: 587832 - DNA, 283 bp, Homo sapiens
tttcagagcagcatggcactttcaaggcatggagcatgcatgcaagggatctgaacgtaggtggaagtaagtatgcgtgaacttttagtgtattttaaaatccttttatctttcaaaaattgacgtgtaagatactttacattagtcaatcaacagtgtgaaataatgttttcccagtgtgtgaacattgtaggcttgcatggttgtactggttcccaaatttcaccatgataccatgtgtagtcatttattttctttatatttagtggacagaaattgtaat

SEQ ID NO: 587833 - DNA, 980 bp, Homo sapiens
tatgctgaagggctcttcatggccatggggttctgggcgataaggaggcgagggcagatgtcaagcctgatagtggttggtgcttgtggataacggttctgggacccaggttccaggtcccgcgttctcccagcaccctcggttggctctgttccgtcaactctttggtgcgttagtttaaattcgtgccaagccaggcacgtccaaggacagcccctgtgtccacaggggctcttccgttgaattcagcaagggttcaccaggtgcccccggacaagcccctgctggtgtctccatctgcctgccaagcatcgctccagtgcctcgctgcctgtgggcctggcctcaagggcatatggacagacctcctgtacccatcgccagagactccctgtgtgatcggttcacctgggcacgtggggccgtgggcacctggctgggctcggcttgatagaatcttgcggactggaagccttgcggaatgaggcgcctgatgtgggtcccagccatctccggacgccaagtgcttcttcgctggtcgggcgctgctcgtcgtcgcattcctggtattgggcaggaagcacattcatcctggactagcctaacgcgtggaagaggaccgtcgaatcgtgggacacccagcacgcctcgtccagactcagaaatgccctccacaggccagcgggcgacatcccgtgcacctatgtcgccagcgggacacggcatggagcccagagagctctggaccacggggccgtcgcccttagagtagagatcccgccactcatgactgataggatcgccgtctgactctggggtctagatcccgttgggactggacgctctgccacaccactcgcaggaaacctgacggcattaggggagactgttgagccttcagtgtctgcatgtgggaagtgggctccattcacctacctcacagggctgttgtgaggggcgctaaatgcgggccaaagcaa

SEQ ID NO: 587834 - DNA, 499 bp, Homo sapiens
ttatgtcctccaataggtgtgttcatagcagtttagtataaaatccccaaactgcctatcaacagtagtgtctctcaataggagaatgtataaggacattttagtatacttatacaatcaagcagtgggaaaaaataaactattgctttatgcaccaacatggataaatatcacagacctattgataaatgaaagaagtcagaaatgaaaaggctgaaaattgtatgagccatgtatgtgaaaatcaagaacagacaaaaccaatctacagtgacagatgtcagaatgatggttacctttagagtttattgagtgcaagaatatgggtgtagccttctgggatgttgaaaatattctctatgttgatttgggtatggcttaaaaggatttatgcatgtctagaaagttatcaagctgtgcaattaagacctatgtattttattatatgtaatctataccatatttcaataaaaatatgaatacctttaaaaaaaaaaaa

SEQ ID NO: 587835 - DNA, 391 bp, Homo sapiens
ggattggggtgaatttaaatcccattcgggtaaataatcattgggcaaaactaatttttcccaccaaaatggatgggagggggatttaaatgtttttaatccttttgacccatggtgggagatttcaagggcccaacttctcccccttaaagggttattcccaaaaatttcttcccttaagctctttagcaaagggaagggggttttaattttattttcaaattatttaagggtaagggaggggaatctccaccaattttgggggccattattctattccgccaaacccccgaaaatgtttattagttcccgtgggattttggggggctgggaaattcttccccgaccaggtcctcccccacccaaaaaaatttggcttctttctttttga

SEQ ID NO: 587836 - DNA, 654 bp, Homo sapiens
  misc_feature (128)..(128): n is a, c, g, or t
  misc_feature (170)..(170): n is a, c, g, or t
  misc_feature (245)..(245): n is a, c, g, or t
  misc_feature (377)..(377): n is a, c, g, or t
cttacaaggcttgagccatcacgcctggccctttttgtactttttgtagaagcgggagggtttcactatgttgccccggctggtcttgaactgctgggctcaggcagtctgcccacctcaccctcccngggtgctgcaattacaggcatgagccaccgcgcccatccccnatggtttttccttaaatagaaattgttgtgaatggaggctcatccttgtaaaccgcttaggcagcttaagagtcnacagggatttggaaaaaccagcctgggtgacggggccagactccgtctcaaaaaaaaaaaaaaacttcacaatttccttctgtttgctcatttctgatagatgccttgcattttttttttacatgccttgcntttttgcagaagctctgtcccagggagctcaaagcttatcatagtatttaaaaaaaaaaacagaaatacagaaagtgtagggactgcaataaagactagtctgcaagtctggggcccacttctcccagaattttttcaagagttccagtgtttaacattcggcctcagaaattccagaatcttggggttcaaatggaatcttccaaactgcccatcccacccagaaaggacacattcttcagaccatatcttccaatgtttttttggggaagtgagg

SEQ ID NO: 587837 - DNA, 761 bp, Homo sapiens
agcggataataccgcagtcgccggcctcgcggggctcacgggctcgcctcggtatctgcagcgtggtcctctctattgtgagctccacgcctctcggtcctagcagccctcacatctcgctgacgtcccggctgtccatagccagagccaactggccgtgtgcccgcttgatgcgtgccgcccagcttgctccttgctggcctatctcgtgtgctcgttgtgtccgtgggcctgtggaagtccacgagggctggctcttatgtccctggacagggacacagtccgcagcgattggcttgcgtgaaggaccctcactgaagaacgcctactcagtagagaaggagagcgaagagagtagtagctgtacagttgtacctgagaactcttagtctgatttgtgcctaagtgtaccaactcagatagccctatgcaagtagatctccatggaaagcaaaacaaagtactcgacgttcgatcgcctatgggttgggggttgggctgccaggcacacgtgaggcggacttgaaatacccggtagttaccttgtgtggagtgtgacactctagactcttctttgtgagaattgtatggtacatggtagagagctctcgaacatggatcggttgcataatagtagcccctcgggagcccaaaccagtagagaagcccattggacactgattccaggattgaagcgaagctgccaagttatgcaggtgagttctcggggccgtctcctggctcattttccctgagcatcc

SEQ ID NO: 587838 - DNA, 399 bp, Homo sapiens
tttttttttcattttaaagtgtaacttttagatacagggggccatgtgcaggtttgttacatgggtatactgcagtcaagtagtgagcatggtacccaataggtagtttgttcttgaacctgtgctgcccgctctagtagtctgcaatgtctactgttcccatgtttatgtccacatgtgctcaatgtttagatcccacttataagtgagaacatgtgatatgtagttttctgttcctacattaattcgtttaggttaatggcctctggtccattcatattgctgcaaagggcatgacttcattctttttcagggctgtgtggtattccatggtgtatatgtaccacattttctttatccaatccaccactgataggcacctaggttgattccatgtct

SEQ ID NO: 587839 - DNA, 345 bp, Homo sapiens
gtcccgtctgctgtgctgctatggcgataaacatcctgcttctctttttctgttcttaagacctgcctatttgttttcaaggactccatttcctggaggaacttgtctgttagctccttaatcttctcagaagagttcatgtcctttagtcggagttgatactcattctccatttataattcctccacacgagtctttagctccaacataacctgagccttttcttccatgtctgatttagtcacaagcacctcttcggcagagcccacctccctctctcgcttgattccccggccatccttatcaaagaccttgcaggtgaacaggcagccatcctcagcagca

SEQ ID NO: 587840 - DNA, 342 bp, Homo sapiens
ggctatcacattatccaatcaagaagaggaaacgagtgagtttcacagttagccaagactcccggactattggaaactatttttttgagaatcctctcaagtatgcaaaaaatcagtggaccaaagtagaatttaaaagctaagagtaacctacccttgtaagaaacatcatcctgaaaacccaaccagcaggacatcccatttttactttgactaaaataaaacacatatttcaaagctaacctattctgtaccactacaaaactggcatgtatttgaaaaaatggtcaaatttcaattccaaattcaaatatggagataatgtgatagggctatcacatt

SEQ ID NO: 587841 - DNA, 419 bp, Homo sapiens
taaatgttggacaagattagttaacatacattacatatatattacttaaagccagttttagtaccttagcagagcaactcatgctcacgctcacaactagaaggagaaataatatgccacaccacctaaaaacaccttggcacgcagaggagtggcaagggcagggactttaaatcatgatgctatgggcttgtaatccactatctactcacctgttagtgcggtaactggcagtgtctttcatttgtacataggggctgtaaatactatctatagtaggtaggttaaatcatcatggattaaatggacacactatatagaacatgcctatcaaaattctcaaataggtgccaataaatcttaatatctataaatgcaatcattattatcattatagtgaataaaaatccattgcttga

SEQ ID NO: 587842 - DNA, 388 bp, Homo sapiens
  misc_feature (29)..(29): n is a, c, g, or t
  misc_feature (32)..(32): n is a, c, g, or t
aagtgaggtcagtgaggtaccaggatatnagntcaatataaaaaaaacaaattgtatttctatcactatcagtgggcgatctgaaaacaaactataaaaaatcatgtataatggaatcaaaaagaataaaatgcttaggaagaaattaagaaaaaagtgcagaaactcatactctgaaaactataaaacattgttgaaaaagttaaagaagacctaaataaatgggaagacatctcatgttcatggactgcaagacttaatattgttaagatggcaatacttcagatatctttatcaaaatcccagctggcttttacacagaaattgacaggcttatcttaaaattctgatggaaatttaaggtatacaggctagccaaataatcttg

SEQ ID NO: 587843 - DNA, 297 bp, Homo sapiens
aaaacgggggtttttgggcgggttttggttcccgcctccccaaaggatggaaaatggtttaaggattaaaccggtaaaggcaaatatttttggcggaggccaatggttaaaaggcaataattccccccacccactgggggggaaaaaaaattttaaatttccctttctggaagggatttcccctttttgggggggaaaaaagcccaatttttttctttggggtgggggtttttaaaaaataaaaaaaggttaaggttttggttgccaaaccaaaaaaaaggtttttaatttttttta

SEQ ID NO: 587844 - DNA, 825 bp, Homo sapiens
caccaaattgtccctacttcagatggggccataagtggggtcccctggccacttgcacttctgaccaactggctacaaatttgagggtcccctcaattttctcagtttgataattccctcagaacaactcacagagttcaagcactacagttttattgtcaggatcagccaaaagcacgagacgcttagggtgaagtgtgggatggtctcaaacacagagcttctccagtattgttgcccctgctggaggtaagagtagatctatcccatcctctagtcaatccatgctcgtgctgtcaaccaaagacaagcgaagtctgccactggacgctgtcagaggtccagagatatttccaaaatcagggcttcattacgtaggcatgcttgattagatcatagcctacgtgattaaactcaatctcccctcccagaggtctggctggtgaaaagcccctcaaccttctaatcacacagtggtcttctagtgaccagctcccctcctgagtcatctcaatctcttagcataaactcaggtgtgatccaggggaccttcaaaataacacgtgaccgctccttattacgtgggacaatcatacacggatcagttctctcttccagtgaaccaagagaccagggcaagaggtcttacttcatactataaggcctgcatcatctcaaaagacatctaggccttcaaaactgagcttattagagcgcaagaatctctactctcataaccccaacatcgacgggaggatcggtctgacagacaggagaaccatatgtactacaccaagcacagagcggaggccaaacttgtcccgc

SEQ ID NO: 587845 - DNA, 222 bp, Homo sapiens
gcacttcccatttgtgtttcagaaaggagtagaatataaacccataattgcttatgtatgcctattcaaaataaatgggtaaccctgattacttttgggaggggaaccagtaggttgaggacaggaaagggaagggttttaacccttacccccttttgtacattttgaattttgaaccatgggactgtattacctattcaaaataaacaataaatgggccca

SEQ ID NO: 587846 - DNA, 748 bp, Homo sapiens
gcttatagagcagcctcctttgaagatctccaggtggacttcacagagatgccaaagtgtggaggtgtcgagtgtggatcaaggactggaacgtagcctcttgggtgcccatggtggaaaggaccccagacgtgtcgtcctgatcactcccactgctgtgaacgtagagagaatcctagcctggatccatcacaaccgtgtaaaacctgcagcgccttgaaatcctgggaggcaagaccaagtctggacaacccctgcagagtgaccctgaagaagatgacaagccctgctccagtcacacccagaagctgactggtccacgcacagccgaagcatgaggaagctcattgtgggcttcattttgtcttaaattttgactttacagtaaggggcttcaactgttcttactcaaactggggactattcccagtgtattcatcaggtcagtgaggtaggacagcaaatgaaaacaaatctttcgtgtacatatagttattatcaactgtatggggaaccgttaaaagagaccttgtggtataaatggccactcagtacaagggtatgtagcccagggaaatggactgacctgatgttgtgtataaacccatctgaggcccccttaaaaccaaccagttggacataagattaagacctgggctttcctaaggtgatcccagtcacataatactagaacaggaaaaagggatcccaaaaatactaaaattgagcttgggacctaaaggaacac

SEQ ID NO: 587847 - DNA, 81 bp, Homo sapiens
  misc_feature (48)..(48): n is a, c, g, or t
ttcaaacccaacttccaccgagaattggcgagacttgatgatcatganctgtcattgactacggtcctgtgatcagcggcg

SEQ ID NO: 587848 - DNA, 1092 bp, Homo sapiens
gggttcttaagccagcatgataatggcgagtttttttcttctcaggaggaaaaaaagcaagagcagaagtcgtagtcatgaacgaaagagaagcaaaagtaaggaacggaaagcgaagtagacgacagagagaaggacacaacacgagcaaaagcccgtgaaagaaaagcgaaagtagaaagcaaaagagagggcgaacgggagccggctcaaggaaagtcgaaggaattcgaaagattttacgaaggcccgcttacaggaaaggtcccttaagatatggtaaactaataagtgtattgactttgaggtaatgaaggggttatatcttctgggggtattccagaatggcaagtttttaaccttggaggtggaattttgaattggtgaaattcttcggaatcttgttctaaatggaattgggttaacaaaagtaattcgaattcaaaggattattgggagcattgcaattacctaagtaaaagttggaaaaattacaagttggcattagaagcaagataaggtaaaaaaatgttggctttttcacctaaggggccattaactgggactaattgtgtctaggttaaaaactaattcaagagcttttctaaaaacttgggtattggcccaggtcaaacggcaaaacttgggattgaaaaggcactaagaaagtggcttgcacacacacagattgcaccatgtggttggtggccccaaaataccttaagaaacagctttaaccaaaggtggtctggggcctggttaccaggaatggtggctacaattaccattattcgacgtttaagaaagtttggtcaaaagttgctggatggaataactaaaggtttacgcacaatgttagtaaaatgttaaggttgaaagcaaggtaaaacagttaagcgcagagggtcgttggaccacacccgagcgggactcggatatttcaagcgttggagacaatgtgtccatgggccccacagctctgggggcaaacatctagtggagacagacgcggatattggcgtccacatctggaagtcaacagaagatcccctttcgaccagggggggaccacaacacatggtgactctcaac

SEQ ID NO: 587849 - DNA, 709 bp, Homo sapiens
gcctgccagaggactgaccacagcctggcttggcagctgctctgtgtgagtgacctccaggatctgatgactgggctctgttttccaaggcgtcttcactaggccccctagctacacctggaagtttcagatacccacgtttggggggcctcctgcctgggcaggctctttcaacgtgtgcgcctctttggagtcaacgcctccttccctgacccgcctccccctagccgtagccccgagtcacgtgtcaggcgttcgggcctggcccctgcactgcctcggcgaggaggtgcgcctgggttaggtcatgtcgacctctctgtgccctcagtttccccccgctttgagtcccctattggccttgttgacacgggtggagagggtactgtctaaggggcgccagtgttctcgttccagtgagggaagatttctcagctcttggcgaacccccttgctcccagggcgcagggcgcaacacccttttttcattcagacattgtcatgggcgcaagctttgtgctgcgcccccttgcgtgagcgagacagccccagtgaggggaccagcaggggatgctgtgtcgctgcctgggatcttggggttggcctttgcatgggaggcaggtggggctgggatcaggtaagtctggttccgcctcctgtctgagagaggagtgcggagccccagggccggcttgtgttgtaccttgcg

SEQ ID NO: 587850 - DNA, 359 bp, Homo sapiens
catgttatccccaacacaagacaacttactctaagaaaaaagcagacatttaagagaagggtttacttttcataaagccatgtaagggtggcatttgaaagttactattgaaggaagttacaaataatttcatatatatctctaaacattgacgtttacagcctttgaggcaaccatcctttactataagatataaaatagacggccagacatggtggctcacacttgtaatccagcactttgggaggccgaggcaggtggatcacctgaggtcaagagtttgagaccagtctggccaacatggtgaaaccccatctctactaaaaatacaaaaaataactgggtgttgggcgataaca

SEQ ID NO: 587851 - DNA, 907 bp, Homo sapiens
gcgtcgtcgtcctcctcgtgtgtcgtggcccccccgagttctgtttttgccggtggatccgcgtcccccccaaaattttgtgtcgtttggcgcaccacccgttttgtccgatgtttgccctcagtgtcgcccggcttactcgcgcgaaaaattttgtccccgcggggtttttgcggccccacacattcggccctcctcgtggggggaaccccggctctcctttgtggtcaccccccgggggcgccctctccgggggtcgctaaattattgtccgccgctctttaggtccgcgcgcgcgttcttctttctggccgtcgttgggtgcggagcgcggccccgttttttgacaaaatgaatgcgggtgctgtggtgcccaccctgcggggtttccccttgtcggtgaccaggggattgggtgggagagaagcccctcgcacctctaccaccgccgcggccgtgtgggcgggtgggcccaccctgagtgccgcgccccggcttttagacgcgggtgtccccgccccgcactgggtccccgaattacccgcggcgtttttcccgacgcggagtttttccacccggggatcatctcaagtgtgtcttctgcgagaatcttccgcggcccgtttcgccctgagactacaagaaaaaggctgtggggggacacacctcttactaataacgggatccactcccgccccgggcgacgcccactcggacaaataatctggggcttctccccctcggtggcgagccagaaaccgcttagcaagcagggttattgaagatcctacgacgcccccccgcgcgtcaccaacagccgccccgtgatgaacttcccccacacgaggtcagcgccgtaccataagcgtgcgcccccagccccacaaaacgcctcgtccaacacaag

SEQ ID NO: 587852 - DNA, 279 bp, Homo sapiens
atgctgttctgaggatccctgtggtcttgtgctggagactgaaatgagggacggtgcagttgtgtcgccagtggagggggctgctgtgttccggtgtctccagcccgccatgggctgaggctccgggaggcccacgggtgcacctctggctggtgaacgaggtaattgtagtcacatgtgacacaagttagcattacaacggcactaatgttgcttcttgtaaacgtgttacttgctttttctcattgttgattttggcacattaagtgcttaagcctg

SEQ ID NO: 587853 - DNA, 405 bp, Homo sapiens
actacatacttccgggagaacacagatctttttaaaattgaaggtgtttacgcccgagatgaaacagaattctatttgggcaagagatgcgcttatgtatataaagcaaagaagtaagtttatgacactggtaggatgtgggtttttgagatctgcctcattttcttttttatataacggagtcttgctctgttgccgaggctggaatgcagtgacttggactccctcaccgaaacctccgcctcccgggttcaagcaagtgtcctgtctcagcctcccgagtagctgggattacaggcgccggccaccacgcccggctagtttttgtattattagtagagacagggtattgccatgtttgccaggctggtcccaaactcctgaccttaggtgatccgcccacct

SEQ ID NO: 587854 - DNA, 314 bp, Homo sapiens
ggttcttgtcctcctaatatcaacagtggattgccttgctgcagaggggaactgcacgtttaagagaaaatatcacgggccgctttccacaatgcagttgctgtagtcatctacactaataaatccacagaggagccagttaccatgactcatccaggcactgagatattttgagatatctggagacaaacatctctgtacacatgacaatagctgtggacctcgtatgcacccagacctcagccgtgctctctagtcttcgtgtcaatatcctctattgttttgatgattatttcttcagcatggctcatatc

SEQ ID NO: 587855 - DNA, 366 bp, Homo sapiens
  misc_feature (38)..(38): n is a, c, g, or t
  misc_feature (150)..(150): n is a, c, g, or t
agcagctgatggtacttagaccttttgggctctttctncaagatgtcacttaggaatttaaacaattgtatttacattcaaaactaggaacagacgatttaaacaactgtatttacattcaaaactaggaacagacggggggaggagtgngttatcacgtaaaggtacagaataataaacctgtcagttaaacgggagtccaagtctgtctacctcattctttttttgagatgggtcttgctctgtcacccaggctggagtgtagtggtgcggtctcagttcaccgaaacctccccctcctgggttcaagcaattctctgcctcagcctcccaagtagctgggattacaggggtgagccaccgcac

SEQ ID NO: 587856 - DNA, 864 bp, Homo sapiens
  misc_feature (446)..(446): n is a, c, g, or t
  misc_feature (714)..(714): n is a, c, g, or t
ctagtgtgggggggggaccatatgggtctcaaccgacctggtttcgggcgcgtctcacttggttccacaggatttggggcactcgattatcacatttaaacaccatctggacccgcaatataattcgccacataaccctactattcaacgtgtatccacggcttttactgggggacgcccggactaccgctccaccccgcgtttgctcacgtcgataccattgtaccacgacttaagggtactttatagatttcatgaacgagggcatcacagtgaaccgccctggatacacaacctcatatacattgtgtaacggttcattgagtcaggtagcgccaaccttgtagcgcatagtatttcccggataaatactcgacgtctccattccaaattagttagcggataattctgctcgggcggtgcctacacgggaccgcattgaaggncaattgccctccctaatacatagcagccccatctcttgacgtctacattacggtccctattattacacatagactagcccctttctacctgcgagatccgttaaataatagaggcggcgtctactaaccaagacagctattgttatcctagaaatgggatttcttcgaacaagccggctccacatactattaagatagggcggccctatgaccgcctatgctgtccttgacttactaaggacctatccttctatccaagtgcctggtntgtttatagctcaaaaggagcttgtcacaccatctcactattgataacaccccccggtgaagcgttactttatcatgcaatactcttggtaatcactggcacggcggcccttttacccaattcacggggaatttcacctcgtttttatcg

SEQ ID NO: 587857 - DNA, 240 bp, Homo sapiens
  misc_feature (88)..(88): n is a, c, g, or t
  misc_feature (193)..(193): n is a, c, g, or t
gtgtaggcaatgtggcagtcacagagcagacgtgatcctttgaaattgggagactgggtctgtcttatctgtcaagtcccaaaaacanatgagttagaatatgaataataaatacacatatacacccgatttatttcaggcattggatgatataatagggaaggctgccaaattcaaactctctagggcaccnagaaactctggaagctccgcaggagctgcagtgctacaggcttcaga

SEQ ID NO: 587858 - DNA, 150 bp, Homo sapiens
ccgttctgccgatagattgggtaccgcggtactccaccgaatcaagggtcttggattccttttcgttaatacgaccgacgtggccaatgtgatgggcaaagtgcgcgcccagggggtagtggcgaacgaattgtggttccacgtccaccc

SEQ ID NO: 587859 - DNA, 312 bp, Homo sapiens
ttgtatataacatattacatacattgaaaactaccagataatggttgtaacttttgcttttaactgtaatacatatgttatgtggctcacatctttaatcccagcactttggagaccagtgcgggcagatggcttgagctcaggagttcaagaccagcaaagccccgtctctacaaaaaattcaaagattggctgggcattgtgacgtgtgcctgtggtcccagctcttcaggaggctgaggcagaaggatggcttgattgcaggagtgagatcgtgccactgcacttcagcctgagtgacagagtgagacc

SEQ ID NO: 587860 - DNA, 132 bp, Homo sapiens
ccacccattaagtagctacctgacccaagacaggacgccgatgggttccaagggccagatgggagggtagaggtgaggagggaggcagatgggaggccgctctgcccctttgtgcacggatgacgtaggagc

SEQ ID NO: 587861 - DNA, 332 bp, Homo sapiens
  misc_feature (96)..(96): n is a, c, g, or t
  misc_feature (103)..(103): n is a, c, g, or t
  misc_feature (108)..(108): n is a, c, g, or t
ggggggggtttttccggaaacatccccttccttccaaaagggtgtttgtttttggtttcgccccccaccgggggtgttattgaggaggggggcctnttttctncatcntcgctctttcttttccacgcgctttattgggggggggggccctttttgttctagaccccctccgtgttggggggttcaggagaataaccttttttttccccaggactttgttgtgataaaaaccaggttttaatcagggacaaaatgaagagcagaggctagtaagataagggaatataataaaaaaaagaaaaatgtaaaaaaaggcacagaagcaaaaaaaa

SEQ ID NO: 587862 - DNA, 292 bp, Homo sapiens
ggtgtacgaggcatgcccaccaccatcggaatggaacatatgcgcgattacctctccccttctactcctctcccaaccacacacaactcagtacacattctattgggcagctgaggttcaatccaagaagctgctggtctgaagccaatttgcacctataacacaggagatgctaaacatctggagatgtaccaggacagatgtatgccccgcccctcacggcaggagcacacatcacacatgtggttgtcacacaaaaatactggcttcaggggtctccactgggcatcag

SEQ ID NO: 587863 - DNA, 496 bp, Homo sapiens
agaagtagcaagagatactgcaattgaaaccttgccattgtacctctttgcaccaccaattccaggagtgtccctggggcctcagcacagcctgggcatttgtttccctcaaagccagtctacggaatgaatatcttgtttcaattctggattggaggtccttcaaggaagtccattagaagttgaatacccagggttgtcccacaggacagtttcacactatcgagtgatgcttagttaatagaatatggttaatgccattcatcattttgtatcatgctttggtttcttgaagccaggcatagtacatgcatgcctgtgatcctgggacttgggatgtgtgggcagaagaattaaatgttcaatgttcacctcggctgtatagcttgaggccagactgggctgtgtgagatactgtgttttggttttttgttgttgttgttgtttttggtgggttttttttttgtttttaattaaaaaccgaacacttcttgga

SEQ ID NO: 587864 - DNA, 437 bp, Homo sapiens
  misc_feature (5)..(5): n is a, c, g, or t
ctacntttcccaaacacagtgaggacactcactcacaataactccaatctgaggcactggtgccggaggaggagaaatgcttcccgggcccagactggcacaaaccagtgcgcctgccggctccccctccggacgcgcccactgtgatggctgagtgttgctattaaatagcagcaatgaaagacatcattcagctccttcaagtttccaaataaaatacgctacttgatacagaaaaccagcaggaccccaggacacagctccacttcacagctgggaaaactgaggctcaggaagagagtctggcagttcctcaaaaagttaaatagacttaccagaaggtgcagcagtcccactacagatacatgcccaagagaaatgaaaacatacagacacacaaaaacatgcacgccagtgttcacaacagcattattcgt

SEQ ID NO: 587865 - DNA, 527 bp, Homo sapiens
  misc_feature (9)..(9): n is a, c, g, or t
  misc_feature (345)..(345): n is a, c, g, or t
gctcattgntgcctccccagcctgggctatgggagcatcggtctggcggggctcattccactcgggatgccaccctctacttactgcagtgtggttctgcatggatgtgtggaacaatggatagatcgaccgtgcaggtgatgcacagttggtcgtgctgccctgaccacacatgtccccctgctagtggtccatggactggtgactattgtctcgctaccacttacaattggaacccttgctggacggcaccgtccattcagacaccagtgtacaggtagacggcgcagtggacgttagtagacagccgatatcagtcagagctcttgtgttttgtgctcgaantccacatggggacgattgtgatccaaggggtggccatgcattgggcgacaattggttgctcccgttgggcaataggaatgcagcagggaatgtgaagtttccgtgcaatcccacgtgccttgtatcccatgggtctcgtgatgagtcgggggacacaggggttcatgggggactcagttgat

SEQ ID NO: 587866 - DNA, 174 bp, Homo sapiens
tactgatcttgactagcatctccaagtggaaaggttttcagtgttcccaagagtgaactctcaaatccagaatggttatctttgagatcatccattctcctcagtggcttctccagggaattcttacagtctagtcgtgacagtcactgcattagcctgcgaacctagtagggc

SEQ ID NO: 587867 - DNA, 298 bp, Homo sapiens
aaaatgagaatataaatacataatcgcattctttaaaatcatatccccaaatgcgctttcggaaccctcccttcaaccatataattctgaaaaaaatccagttaatgtaccatttatttgctttataaaggaagctctattttctttaccagaaatgtttataagtaattcccaatagaaagctgcttattttcattaatgaaaaataccctgtggtttgtatactagaagtcttcttcaaaattgtgtgacgcctttctgttcaagcgcatgtgtaaataaactttcttgcgcattt

SEQ ID NO: 587868 - DNA, 1313 bp, Homo sapiens
ggcctggaagcggctcctgtgacgttgatgactcaggatgtgttgggactctggtcagtgtcgcgatatagctcagatggggttcgccgcgtacgagcgcatgctagttgcaggccttgcgtggttcagaggaactcgtggagcgccggggagaacagctggcagacgtccagacgttgctgcatcgttgcgcacgactggaaaccatttctgacacactcacgatgattccattgcgagagaggtacgctgactacgctgggttgggcaaggggaccagggagacaacccatggcttggctggcgaacgcacctgacatatcacgtacttattccaagagcgttacgctgaagccctcggcccaaacaacatcgacaacgcacgcccagcacggcaacttactctctcctcgaacaactgcagtttgctcgcggccttatccacaatggaattgaccaaagtccccacaacgatcgaactgcggagggaaatcagccaaatgacaggacctccaactttccaacatcggtagtaccgaatcctggagtctttctccagcggtcgtcgcaccggacaacctgcttgcacatcttgggagaccgacgacacggggaactcaacatttgtcatgccttcattgaaagcgcgaccttttccccataatgtggaccctaacagcaggggcctacctgtcaccactcaacacggacttgttgacgacacatgcaagacccgtgaatgcggcaagtctgaccacgctgccactactgttctacggaacacgcctcaacttggcgtggcgatacgccaacggcaacacgtcgtggactttcctcacttgccactcggccattttctcttcacattagccgtgtttctctcacgacgcgcgactctcaccaatctttcgggaacgggcacgtatcagccttctcgaacgatgcaccaacgggaaacacgggtgtcatacaaccagaagtgtggccaacgaatggcatacggcaaacacccgtgacttacgaatgggacaacaacggcccaggggggacgttccgcaggacacgtcacgacggcaagctacggaacctccccacggccctcagcggaaccgaccgcttgctcgacggtcggcaacagacatcgcacggcccagcagccggcgccaccacggggcgcacgaactccggggcccccgacaggggctacgaggaacccagacacgcaagcagactcgcaagcctcccgtaacacagagacacccacgtggcagcggacaaactgcatcgacccacacaacacgttcggacacagg

SEQ ID NO: 587869 - DNA, 359 bp, Homo sapiens
ggcgactcatcttgagtagggactgtgttatgaagctgagacccactgggctgcattcccaggaagttaggcattcttagtcacaggatgagataggagattggctcaagataaggtcacaaagaccttgctgataaaacagtctgtggtaaagaagccagccaaaacccaccaaaaccaagacgggaatgaaagtgacctccggtcatcctcactgctcattatacgctagttataatgcattgacatgctaagagacactcccaccagcaccatgacagtttacaaatgccataacaacatcaggaagttaccctatatggtctaaaaaggggaggaaccctcagttctgagaattc

SEQ ID NO: 587870 - DNA, 211 bp, Homo sapiens
  misc_feature (84)..(84): n is a, c, g, or t
gcccaccttggcctctcaaagtgctgggattacaggtgtgagtcactgtgcccggccagcatttcattgtcttttatgacattnccatttttgaaaaacaatcccttttttaaaaaaaacctggatgttccttatttgggtttgtctgatacttcctcatgattagtttcagagtatgcattctggccagaatagcacataggtatgttgc

SEQ ID NO: 587871 - DNA, 442 bp, Homo sapiens
atcctgattccagttaagtaatgtaaactagtacttacattttaattgccataagattttaatgccagccctaacagatttattgtgtaaagtacccaaaattgcctaattcacatcagttgcctttgttagaaattgacatctctgaggcccaggtgcagtggctcatgcagtcccagaactttgggaggcccaagacaggaagagtgcttgagccccaggagtttgagaccagcctgggcaatgtggtgaaactcccatctccacaaaaaattaaaaaaaaaattagctggatgtggtgacatacatctgtggtctcagctatttgggaggctgagatgggaggatcacctgagcccaggaggctgagactgcaatgagccgtggtcatgccactgcactccagcctgggtgacagcaagattctgtctcaaaaaaaaaa

SEQ ID NO: 587872 - DNA, 337 bp, Homo sapiens
  misc_feature (308)..(308): n is a, c, g, or t
cacgaggcgcgcgccggtacgtccaggggatcgggctcgcgcttgcggcaggactcgcacaggcggttgtgcgggccggcgctcggaaacggccggccgcagcagaggcacgggcgcgtgacgcggcctttcttgggcggcaaggatggcctggcgggcgctgggagcgcggcgccgcgccggcggatggacaggcctagcgagtacagcttgccctccaccgagctgggcgcccgcccgagccgggcggcgatgtcgcgcttggttcgtccctcggcgaccagggcgcgcagccgcgccacctcggnggggctccagggacgcttgccctgggcga

SEQ ID NO: 587873 - DNA, 430 bp, Homo sapiens
  misc_feature (2)..(2): n is a, c, g, or t
  misc_feature (8)..(8): n is a, c, g, or t
  misc_feature (35)..(35): n is a, c, g, or t
  misc_feature (54)..(54): n is a, c, g, or t
cnaccctngcaaagtccccttttcccatgaaatgngccatattcacaggtgtcnaggaatccagagggcaggtaataattgggggaccattattctgccaactacacagggccttatatggtctggctctgtgtccccattcaaatctcatcttgaattgtaatccgaattgtaacccccacgtgttggggggagggaccttgtgggaggtaattaaatcatgggggcggttaccctcatgctgttcttgtgatagtgagtgagttctcacgagatctgaaggttttgcaaggagcttttcccccttttgctcaggactctccttcctgcagccaagtgaaggacaagtttgcttccccttccacaatgattgtaagtttcttgaggcctccccagaactatgagtcaattaaacctctttcctttataa

SEQ ID NO: 587874 - DNA, 343 bp, Homo sapiens
taaattcgcggccgcgtcgaccgatcgaagaactgatggtctcgccggtgtcgccgcacaccatcctgatcggctacaccctgggtggcgtgctgcgcggcttgatggtcggggtggtcgtgaccttgctgtcgctgttcttcacccatctgcaagtgcatcaccttggggtcaccctgctggtggtggtactgacggcaacgatcttctcgctgctggggttcatcaacgccgtgtttgcccgcagcttcgatgatatttcgatcatcccgacgttcgtgctgacgccgctgacctacctgggcggggtgttctactccattgtcgacgcggccgcgaattt

SEQ ID NO: 587875 - DNA, 147 bp, Homo sapiens
actatgatttacagtatccagaagatcacttaaacattagaacttgcgattcctgcagtagtaaaatggagatagatggtaactagtctcacactaagttgcctatacccctgtagcccaagttagcgtgtgaccaagttgcgatgt

SEQ ID NO: 587876 - DNA, 492 bp, Homo sapiens
ctgtctccccgtgctggagttggtggcgccatcctatctcacgtcgcacgcttgcagtgctgagctcatgtgattcagttttgctccaaccttagcctccttggtcatctgattgcatgagagtcatcccacacttgtggactcaggtcccctgagctgtgatcccagaactactgcacaccagactgggcgacatacgaacatttggtcttcgaacgaacgaaaacaaaatctcttgaccatgtgggatctggggatccccatgtatgttttcaacccacattagaaatgaccccctaaagcacctctgtcaaaacaaccaaacctgaactcatccctctctgccctctgcccactcttgctgttcttccttgttttctacctctttattgtctcaaatagaacatatgaaaatcattacattgtcctcccttcaaaaccagtttttaagcaagtctacttgatatcccccatatctgcccaattgtctca

SEQ ID NO: 587877 - DNA, 596 bp, Homo sapiens
ctcgtgtctcctcgatgtgttaccttctacattgttcgtaagcggacgtagcccccgctgttcactatctgaatcgcatgttcctatgtttagagtcggcgtaatccactataagacaatcagcaatggggaatttctcgttcaccttcgtcccaaatgtgtctcgtgactgagcaccacacgaatagtttcacttgtgatgcagtctcactctgtcgcccaggctggagtgcagcggtgcaatctccattcactgcaaactctgcctccctggttcaagtgattctcctgcctcatgctcccgagtagctgggattacaggtgcgcgccagcacgcctggctaatttcttggtattagcagttaagaaacggggtttcaccatgttggtgcgtgagccactgtgcccggccaggagtaggattctcgggctcccagatgactcctttttgtcagagttggtgtttccaggaggcccttggtcttgacatggagactgttgggtgcagccgtgctctgcaagagcagggcccgttctacagtgctagtgtcttgggacagttcccaggcaacaggcagttctgctctttccatctg

SEQ ID NO: 587878 - DNA, 421 bp, Homo sapiens
cactaccttaaaatggtggccatacctgaagagggaagggcaccggagcggataagataggacagcaggacagtgttcgggatgcctggcagctgacatatgcatggatgccaccgatggactgagagggccaaacccgactccaggcgtctgaccgataccgtgacctagcagggggtacagggcggagcgccaaggagcaggtgcttaggaagggaacagagaacctccagagggcgcaggcttaggtgctgcagtctgtccgggagctgagccgaagtcggaggctgtatgggcagcgggaacgtgtgtgggccttggcacaggagaaggcggctgatgtccaggccaggctaaaccgaagtgaccatgggatcttccactctcggaccagtctccagaaactgagcaccaagctgtc

SEQ ID NO: 587879 - DNA, 540 bp, Homo sapiens
  misc_feature (304)..(304): n is a, c, g, or t
agtcccaggatgggctccatggttggttgatacaaaaagagggaggaaccctggttggtgcttgctccattcaatggatgagggaagatggatccacaccccaccaccagcgaagcttgatgctttgctcgctgcgctgcatgagggataacgaaaccttccgcccttcttcatccatccaggaagcaaggttggaggaagaattaaggagaaggaaggagaccagacttgttggtctgtttcctgcgtgcggcggcgcgccactcgtgctgggtggtgtattgttatcgttttcctatgctgntgtgtcggtgtaagtcggctggcgacgccttcgtggttgtgatagcagatgatgatgatgatgatcggcaagtgctctgtgtagtatagacgacactccgaacatttttgtattatctctggagcacaccaccgtctgtccaccctcacagagttgtgtcatctccccgagatctctctgtggcgcacccctctgtaagaaaaaatctacaccacacaacaaataacaaacaaaca

SEQ ID NO: 587880 - DNA, 737 bp, Homo sapiens
  misc_feature (14)..(14): n is a, c, g, or t
  misc_feature (28)..(28): n is a, c, g, or t
  misc_feature (515)..(515): n is a, c, g, or t
  misc_feature (708)..(708): n is a, c, g, or t
aggctgccggaatncggctctaggttcncatttggaatgcttccagtttttgcccatacagtatgatattagctgtgggttggtcatagataggtcttattattttgagatacgtcccatcaatgcctaatttattgagagtttttagcatgaagcgttgttgaattttgtcaaaggccttttctgcatctattgagataatcatgtggtttttgtctttggttctgtttatatgctggattacatttattggtttgtgtatattgaaccagccttgcatcccagggatgaagcccacttgatcatggtggataagctttttgatgtgctgctggattcgcgttgccagtattttactgaggatttttgcatcaatgttcatcagggaaattggtctattctcttttttggttgtgtctctgccaggctttggtatcaggatgatgctggcctcattgagttagggaggattccctctttttctattgattggaatagcttcagaaggaatggtnaccagtcctccttgtacctctggtagaatacggctgtgaatccatctgggcctggactcttttttgttggcaagctctggttatctgcacaatttcagatcctggtattggtctattcagagattcaagttcttcgcgggttagtcttgggagagtgtatgtgtcgaggaatttatccatttcttctagattntctaagttaattgcctaggtgtttgggtc

SEQ ID NO: 587881 - DNA, 387 bp, Homo sapiens
aatttgtatcatcacctttgctcttacagtatgggtgtttttttctctgtcttttaggatttttactttatcactgtttttgatcaatttgaatatgagtgtaccatggtatagtgtgtagcttccttgctttcttttttttttttcttgtttttctttctctttctgtctcccttttttgctctcttggtctttcttgcctgtttgtcttcctttcttccttggtcgctccttgcttccatgcttgcttttggtactccgggttcttggagatactgaaatgtcggggtaaatagtgtgcatcaaatttgaactgtttgcggaccgttatttccttagcttttttatggtcgtcccttccttttgcctctactttgggggccccat

SEQ ID NO: 587882 - DNA, 270 bp, Homo sapiens
gggtgactacaggacctacgtatatgtaatagagcagctatataactccttagcatataacatggatcagaaaggtaagggttttgcacaaggaaagaggcaggatgaggcataaggcatggcaggagcaaaagaaagagaggactagggaaggggaaagttaaaagaaccttcaaagtgctctgaaactcccccagaaaccaaaaatatgataacagcagttattgtcaacggcatttaactgcatacggtggttacataattacgggg

SEQ ID NO: 587883 - DNA, 116 bp, Homo sapiens
  misc_feature (37)..(37): n is a, c, g, or t
  misc_feature (44)..(44): n is a, c, g, or t
agaagtcaactaaagcttcaatgcatcaatttataangcctcanagatcagcaatttatgacacttacatttacagtcgacctttactaaccaggcaaacttcccgaaatgatcag

SEQ ID NO: 587884 - DNA, 287 bp, Homo sapiens
ggtcgacggggctcacgcctatggtcccaatatttctggagaccaaggttggcagatcacttcaggtcaggagttcaagatcagcctgaccaacgtggtgaaacccatctctactaaaaatataaaaattagccgggcatggtggtgtgcacctgtagtcccagctacttgggagactgaaccagaagaagcgcttgaagctgggaggcagagctggcagtgagctgagatcatgccactgtactccagcctgggtgacagagtgagactccatctccaaaaaataa

SEQ ID NO: 587885 - DNA, 298 bp, Homo sapiens
  misc_feature (14)..(14): n is a, c, g, or t
  misc_feature (19)..(19): n is a, c, g, or t
  misc_feature (25)..(25): n is a, c, g, or t
  misc_feature (37)..(37): n is a, c, g, or t
  misc_feature (81)..(81): n is a, c, g, or t
  misc_feature (106)..(106): n is a, c, g, or t
  misc_feature (121)..(121): n is a, c, g, or t
  misc_feature (129)..(129): n is a, c, g, or t
  misc_feature (154)..(155): n is a, c, g, or t
  misc_feature (176)..(176): n is a, c, g, or t
  misc_feature (198)..(199): n is a, c, g, or t
  misc_feature (203)..(203): n is a, c, g, or t
  misc_feature (205)..(205): n is a, c, g, or t
  misc_feature (245)..(245): n is a, c, g, or t
  misc_feature (281)..(281): n is a, c, g, or t
  misc_feature (293)..(293): n is a, c, g, or t
gtttccgcggtcgnggttnagtctnccccggctagcngcctgggttgggctttgtagctgctccgagcccagcccgggcgngctcgcagagtcctaggcggtgcgngcctcctgcctcctncctcctcngcggtcgcggcccgccggcctcccnngtgcctgccttcgctctcagngttgaggagctcaagcttgggnnaatngngtgcattccttgtatcgtcattccagttcttgctcttggntctacaaaaaattcctgggggccatatatatacccnctggtttccccntccgt

SEQ ID NO: 587886 - DNA, 1028 bp, Homo sapiens
tctcttcaccagcacaccaaccgccacttagggaaaacattaatatcctgttacaaaagtctaccttacagggtataactttacattagcagatatactattgcactatggacttcatcgctttatattcgacctgacagttcaagaaaaggagatatatcttaacgcgactcgctggttttgccacattcagcattatccatgcatcatgtcacatcttgtctagtgttgtctctcatccacgaacaaactatatagtaagttccaatacaagctgtccatgccatacagaacgtcctatttaaaatgttctaaaatggataatcggctctcccacccgcggactcatgcgaatccatatacagtcccatctttattcgttggccttacaatgaaccatccacagcctccaccttgggtctcgatcggtctatcttttttattacctcccaactgatgcacagcttactccacaaacacccaatttagcttttcacacgcgcttcctcaccccacttataaatgaacatttggcaccggagcacactaccgcgcgctacgcgctcacacagtagacaatctgtctatcaaaataacaagcgtataaggactacgcccgagccccccacccacacacatttagctagcccacatccagtctaacagaacgccctgcccaacatgacatatcaatcttcgtcctctacgtcgtccgtattcctctcatcatgtacatgtcttatacatcatcctcatgagaagtccacgacgcaccgaataatgactagtcacactccatcgcaatcacacagtctactagcctgttctgtgatagactatgtcgtgtaaacagccccattagtgacccctccgcaacgcctccccacctattacaacacaaactcgctccccgacgccagccctaccctcaataatcatgctgtaccctctgtctcacctaatcacctctctattgctatttacagacttgttaactaatctgttactatctggcccttccttgagat

SEQ ID NO: 587887 - DNA, 1667 bp, Homo sapiens
aaatgcagagattatacactaagcttccattctcagtttccttgtttcttaatgattttttctatttcctacattagtgtgcaggctctatgtgtttctagctgggcaacacccaaagtttgccctcatagtttcaggcagcttaatcaggaagaagctctgtacagcaaatctgcacacagttcgtttaggctttattgtgttattcccgcattgtgggtaactcaagagagttctatagcatattcgtattgtactatactttactgggcgtgtattccaagcgccaaagcacttgatagtgcgtacagtccgcgtaatattaatcgtatctacagcgtggacacaacgattcgtccgtgatcctcctgggaccttccttccagggccttgcacacatgcaccattcagtctatatactaccaccgccttaactataccactactatgacagaaagagtaagagggcatcactattcatcaatatcacgatagcgttatgcgtacttcaagacacatattactaggttgcacaccaagatatatggcggaacgccttgctgggtgatgcatccatggaaggatagcttagcatagctgcaacaaaagcaagaagcaccttcatatggtacatcgcccattagttgatagattgactggatcgcatacatagactaggtcgcccatagatcagggtaacactggaagcatggctaccccctgacaaccatttacgcttgggcaagcctgacgccgccctctaaccgtcagggtaaaacgaacagacagcgcaatacgacaataaagaccacgacacaaccacaccccccaaaaagtagcacacaacagaagcatcacccaagacctactagaggagacaaccaccaagaccaacggacacctacatgcggcacccacacacgcaaacggtacgcacaccccacgcaacagggaatacacaaggagcaaaggataaaaacagcacaagaaacaggggaaaacatgaaaagaaatagagcgcaaccttggcgccaagcacagccgacaagaacagagccaaagacaactagctaagagcgaacaaccccagagggccacatacccaacgaacccaggagacaaggagcacacggcatggcatacgcaggccaacatacacgagaaacattgaccccacaccctgctagcgatgtcagccaggcatggaggaaaaaggacacgagcgtcacacaaacccccaaaccgaacccagaccaactacgaacaaacacgacagcaacgacacgacggaagacacaacaagaacgagcaccacagaacgagaggacagacaacagcacgagcactcaggagaagcggaccagcgcaacatacaacagaaagaaccagctagcacaaaggacgacgaccgacgcacaaacaaccactcgaagcaccagcggcggcgcgaacaaccaaccgcaacagcaactcgcccagaaacccaacacaagcacgccacgagacatagagcgaacacagaacgaacgtcgaaagacaaccagaaagtacaacacagacacaagccaacacatcaacgcaaaccaacgcatcaccatcaatcagaccatacaaccacccgtacagaagcactgagagaaacaaagaggacgcatcacagcaacaga

SEQ ID NO: 587888 - DNA, 440 bp, Homo sapiens
cagactaagccgatcatccttgggctaagtcacccaacctctctgatcctgatggtttgtttgtttgattgatttgagatggaagactcgctgagtcaccacaaactgaagtgcagcggcatcgacctaggctcactgaaacctgtgcctcctgagtataggcgacgcatttggcttaatttgcccagtagcccttattacaggtgccttacaacataaccggctaatttttgaaaatttagtgatggcaaaaccctatgatgttccccaatttagtccctttgcaccagatccccttttgccagattagcttaatctcaaaagggcctggactaaaggcctttccaaacaatgcccacactctattggcaattgaaatttgaaggcgtaaaaatttggtattcgcgttaaatttttggttacagtatttttttacccgg

SEQ ID NO: 587889 - DNA, 163 bp, Homo sapiens
  misc_feature (14)..(14): n is a, c, g, or t
ccaccttatgccgngcggggggaccgcggcatgagctcatgacgccaacgccatgggaagatgtctcagacacaaagagtatgtgctgcatgagcagtgtcagaatgagggtatcttgaagtctgaaattgctgtgggggctttccatttctctaatggatct

SEQ ID NO: 587890 - DNA, 784 bp, Homo sapiens
caacgtcgtaatccccctagctctacaccacatgagtgtcctggacgtagggctcttagcttcatcaatgagcaatgtgtatggtcaagatcttacaccactgaagatattctatatgcctgttgatgtcaagcactttctcaagtatttccgtaagacagtggctaagtattcgaagcatccggggcggaggatcacccgccgttcttaaccagcgtcacccgtccctgtgtgaagatcccccgggactgcgatgtcggcgtgtaggctgggactgcgttgtgctgacgccaccttcctgctgaggtgggactgggccctggacactacccctcagcccctctgtcctcattgtttggcctcactgggactcgagtgggcctgtgatggtatgacggtcggatgcttgtgccctcagcttgttccatgcagcttgtctggcagtctactggctttcagagtgcttttccctcagtctcctgtgtgggactcacttctcctcctgagggcagactcgatggcgccaggacaaatagtcttggtaactcgcttacaatactgatgggtaaattatacacacgttttacaagcattctacctaatatttttcttttcacatactttttctgttctagttgtattatggtgtccgaaagctatataacgactaggacatatttttttaagaaaagtaaaaatcagtttaatgtgggaagtacgttaagtggtattatattttacattttcaagtatagtgcataaagaatctgtctaaatgtaactg

SEQ ID NO: 587891 - DNA, 322 bp, Homo sapiens
catttattcgcatattctctcccacacacaaacacacacacacacacacacacacacacgtgcatgcacacacagacacacacacacccccctataagaatcatcattttcagccaggcgcagcggctcacgcctgtcatcccaacactttgggaggctgagacaggcggatcacaaggtcaggagactgagatcatcctggctaacacagtgaaaccccatctctactaaaaatacaaaaaattagccaggcgtgatggtgggcgcctgtagtcccagctacttgggaggctgaggcaggagaatggcgtgaacccgggag

SEQ ID NO: 587892 - DNA, 322 bp, Homo sapiens
  misc_feature (134)..(134): n is a, c, g, or t
  misc_feature (179)..(179): n is a, c, g, or t
tctacaggatctcaaacaccgcactctcaatggtggatgtgacctttgctgatgtggcccagccagaccagaccggattgtggcctgaatgccacaccttcctgcgtaatggaggacacttttgtgatttccanaaaggccaactgcattgactccacagcctcagccgaggccgtgtnttgcctccgaaagtgaaacaagatgcaaacaggagaacatgaagcccgcaggtagcagttgaccccttgaggccatatcaaaagagaccatgcccggtggtccgtgggaagttgtacaggccacccccccaaggtgaaagaac

SEQ ID NO: 587893 - DNA, 401 bp, Homo sapiens
  misc_feature (188)..(188): n is a, c, g, or t
  misc_feature (194)..(194): n is a, c, g, or t
  misc_feature (225)..(225): n is a, c, g, or t
  misc_feature (241)..(241): n is a, c, g, or t
  misc_feature (249)..(249): n is a, c, g, or t
  misc_feature (319)..(319): n is a, c, g, or t
  misc_feature (356)..(356): n is a, c, g, or t
tctggagcaagctggggaaagaggggtccttagatcacgggttcaagggagggatcgggtaggggcagcatttcttcggggcgggaaacagaaggggggtttcaagagggcagaaccattccattatgggagctataagcccctagaatggctccagggcctatctcggtttccctgggatctcatcngctccngaacggcaccggtcagggcaagtccatctcnggcccccatctccccngagccaangtgagtcaggtgaacaaaattcatgggttccccaatcagggtccggtcaatccgtcttctcttcttcttnggcgggggtttctctaccacacagcagcccagttggngccaaaattcactcaggttcccagctggctcagaggggtaccgag

SEQ ID NO: 587894 - DNA, 290 bp, Homo sapiens
tgtcgaccgcaaggctggcagccatggccagaacaatgcccacgatggggacggtggacctgggaagactggctcccatctcaggtgagtgggcttcgtggagccccctcatgctgtacatggcatgtgtatctctgctcttctccagaaggcaccaccacagctgcccacttctggaaggttctacctccgtgctggtctggtctccacaatgctcaggtgtcctgacgtttggtcctcgccgatcccgcgtgccatggtcagttgtgatcttccgcaggggtagagag

SEQ ID NO: 587895 - DNA, 341 bp, Homo sapiens
tagagcatccccgatacttgcctttagatgtctttctttacacccccaaggtgcaggaaaatagctagtaagcatgagggtaatatgcattattcctatataatatgttattcttatatcaagaccattctcttggccgggcacggtggttcatgcctgtaaccccagcacttagtggggctgaggcaggtggatcacaatgggccaagagttagagaccagcctggccaacatggtgaaacccagtctctacttcaaaaacaaacaaaaacctgggcatggtggtgcatgcctgtaatcccagctacttgggaggctgaggtacgagaatcacttgaact

SEQ ID NO: 587896 - DNA, 540 bp, Homo sapiens
  misc_feature (3)..(3): n is a, c, g, or t
  misc_feature (254)..(254): n is a, c, g, or t
  misc_feature (286)..(286): n is a, c, g, or t
  misc_feature (296)..(296): n is a, c, g, or t
  misc_feature (352)..(352): n is a, c, g, or t
  misc_feature (363)..(363): n is a, c, g, or t
  misc_feature (454)..(454): n is a, c, g, or t
  misc_feature (460)..(460): n is a, c, g, or t
  misc_feature (463)..(463): n is a, c, g, or t
  misc_feature (491)..(491): n is a, c, g, or t
  misc_feature (500)..(500): n is a, c, g, or t
  misc_feature (528)..(528): n is a, c, g, or t
ttnactatattactcctttctctcatgcttgtcgtaggagcacaacgtgggttgtaccgacggcacgtaccgtgtattaggccggcccggcaatgacgttaggcggtagcgggcgtcagcagcaataagttaaacatacgtgaagcccagttatcgaatcatgagtgcattagggtaataattggcatatcgtaacttggggtaattaacgtacagtaaatacagtattcgctaatcgtaatcatggtgaaagnagtggcgcgggtcgtggaacaacagtgggtgngctaaaatcngtcttgtgtcttagtagtgttccgagagcaagtgttaaacaaattaaataaacatngaggtccgatnacgcacgtaattcatttcgcaattgttgattcgagtcggggtaccattgatagtagcagggccatacggccgaccagtaaacatgcggcgncggtgnttngacacgcatccctccgccttatcagggntaactacgngcaatcggtatcgggtaatttgttcatnagtcgcacgggc

SEQ ID NO: 587897 - DNA, 451 bp, Homo sapiens
gtaagagaagtagggtaagtagtctcagatgtaggtatagaacaggtgtcggaattggagaatgtggtacaccaatgtagatggaggggtggtgttatgtggtaccactggtgatcgctatctgtacttgggacaggcgtagaagatgaaacgctactggtaaatgatggtaacgtattagtggctgtgggccctaaaggggtggtagttgtcatcgaagtcaccgtgtatatggaggtgattgaagaagtgatggggggagtagaactcacgggtgttttgaaagatcctgtggaaatgtcagaggtaggagtcagtgtggtggtcttaggggatgtggctgttgaactggtgaatgtagtctgacctgtgcccgtagttgctacagtggatgaaggtgtttccatctttgtacatgttgtgaatgacatggtggttgtaggtcatgggc

SEQ ID NO: 587898 - DNA, 325 bp, Homo sapiens
gtgggtcgagcaaaggtcaaggtttgcttcttgttgcgatgtggctcaggctcagattgccatcgaacccggaatagggctagctagcctgtaattgtcccctgacgggagccacagatgggccacagctgacaagattcaacgggcagggccaagcccagaagaagtaggagtccatcctgtacatctcaagcaaggggttcctcccctagcacctgggcttggcagaagggccatagttcatccagctcctcccctagagcaatgctgaggagcgggggcatggtagcagggtgtctggttttaataaagttggaacacttca

SEQ ID NO: 587899 - DNA, 430 bp, Homo sapiens
gatgaggtgcaggatgagtgtcctgatttggttgacctgtctgcatgcaataaagagttcagaccattcagagaccaactgagcctcgagaatgatcacaggagaagaacaaccagtgaaatgagcatggcaagtgtggccagttgctctacaattccaccagaggtgatcaggcagaaggtgaagagacagctgaccaaacaacagaaggcggctcagaggagacgtctgcataagggggaagccaacctggtgaccaaggagaggagagagaaccagaacaacatcaagagcagtctggagaccgcttccttctggggctgaggatctattctacatactcagcctaatggagaaatgattttctcaagtgaacggttttcacttgtgtgtgtatataaaattgattaataaaacatctaaatctgca

SEQ ID NO: 587900 - DNA, 997 bp, Homo sapiens
  misc_feature (629)..(629): n is a, c, g, or t
tcaactctatataaaacgcctcatttctctctctttcacctgataaacttatcttttttaaagcccttacccctctcgggccgttgtacacatataagatttggtaattccctaaattctccacagctcatattttttctattgtcaccaaacgttttgttccgtaatggccccaatttctttcttcactagtgtgcgcgccacttttggggtttaacacacaccttgggtttcggtttcgatcatcatccggggacttttgacgaggaaaattggatcatgtctgttccctccctttctctattatagtcctgcatgtggtttctgtatctctcttggttgagattctctcacctcgagggttgttttggtgtatctgtttggggtgggccctttcgtgattagtgtgcagcgacttcgaatttttggtgactttcatttgcgagttgtgtcctaatgattttacccgtgtcatctgccttctggggtccgtgttcaagctgctcattcctctcgtatggttgatttgacgtcgaagccatcaattggagacgatactgatttgctctatttaataaggatgtctcctggcaccttcccctcgtctcatctttcggtatctcgtgtcntcattaggctatgatgatcacagcacggctccacctgttgcacttccacacaatgaacgtgctaaattcccgtatggcctctaccagaaagcagagtgctcagcatctcccacattccttactatctagcgttcgctagtaacgcatagcagcaaattaaacttgttttcttctataatagacacgacatcatgcagtttatttgtatcagtgcgacaatgcacgcctcagtacactgggctatacgtgtgatatcctgctttccttcgaatttactattagcgtctttatgtcacaaactattcctcaaaacattattttaatgactgtataatagtgccatcagttaaatatattcattacttatt

SEQ ID NO: 587901 - DNA, 233 bp, Homo sapiens
ggcgttgtgagaagcgcgggagccgagtatgggcagcggagcaggttgcaggtaacgcggtctggaacaagtagttgggagaaagttggagggcagtggagaagcccgacgggcggctggaccttacggacggttttcggggcggcagagccgagaccttggaccaaatcaagggggactgtcggcctagtcgggggctgtcggcctagtcggggctgtcgggctagtcgcgg

SEQ ID NO: 587902 - DNA, 372 bp, Homo sapiens
ggcccgagtatactctgtctggatcagaacacgtggaagtagttaattaaatagaaaagagccaggtcagttgctcacgctggtattgcaccactttgggaggccgaggtgagtgcatcacgagatcaggagtttgagaccatcctggccaacatggtgaaaccccgtctctactaaaaatacaaaaattagccgggtgtggtggcacgcacctgtagtcccagctacctgggaggctgaggcaggagaatcacttgaacacaggaggcagaggttgcagtgaacttagactgagccactgcactccagcctgggcgacagagcaagactctgtctcgagaaaaaaaaaagaaagaaagaaagaaaggaaag

SEQ ID NO: 587903 - DNA, 263 bp, Homo sapiens
ccaattttaaaacccatcccggataacccccatttacaaagggcctcccttggattagggggtataagccatctaaaaatgatttagcaaggatccaggaggatgtgcctaggttatatgcaaaaactgggcccttttatatcaggaacttgagcatttgcaaatattgggatcggaggggggtcctggaacccagcatccccggaaacttagggggggcctttcattaaggggagatccttggattcagagattggaaatga

SEQ ID NO: 587904 - DNA, 870 bp, Homo sapiens
ctcggcgcccgtgtccaccgggtcggtgtccgcgcgctcctaccgtaggatgtccggcggcccggggagaccgcgtatgttggcggaggtccgagggcggagggctatcgtgatctacgtccgagccgcgcaaccgtagctggcgtgggcatgccgcgccgttggggcccaggactcagtgggcggcttgatacggccatcgtcgcccgggcggttgtgtattgcgcacgcgctccgtcgtgctcgttgcgtccctttcaggccgcggggggggccccgggggttggcggatccttgtgggggtgctcggaggttggggatgttctcggggtggccgtgagggccgaattcaagcgacggaaagatgcagaggacacgacgcgcgggccccaatcgaaggagagcggtggcgaggctggagaggacgctgcgaaggtggaaccgggctcccggcggaaccttaacaatcggacaaaggggtggcgcctccccctggggaagcagcggcaaggagaataatcgatccttgggcgtggagacccagaagacttcgggacgacagcgtcgccaaggggcccacaggccgaaggtcgggcgccgtggggggtgacccctcatataccgaaggaggcgatgattcgggggaacgattgctcgcccggcgtggggttggacacctaggggttagagcccgaatcggaacaaaaagccaccggcgtgggatggtgggcacccgcagagtaatgctggcccgggggagatccatggcggcctcgggggagaacattgcacggatggagaatcgtctcaggatgatgagcgaacggcggataagaccgtggagactctttcaggagacggttgtgtcag

SEQ ID NO: 587905 - DNA, 1133 bp, Homo sapiens
tcttgaggtgtagagggaacaatagagcacggagtgagcgccaaatgttgatctgtcaatcgaccagatcccggggatgtgtgttttgttgtgttatctaccctgttctagtagtgatccgtgtagtgtagctgagttgtgggtggctacacactcttggggggggttctccctactcctgtgtggttgttgcacagggctccctttttttatgaagcgggtttctttctgtgtgaagcacgcgtgttttttccgagggtgctcccctctgtttggcctttctggtgcaattttgtgggggatctcccctcttgtgcattggtagacaaatgtgccgcgaccaagtttctgcgggggaaaatcttgtccctctggggggattcctgccggcttcgtgtttccggaaaaaattggggtttttagaaacatgcggatttccccagaatgttttccccctcttcttttctcagcatcaaattcccggggtttgctgcagaccgaaagcccttttgggcggggagaaacacactttttccgcctctttagacgtttcgctctcgccagttcttgtgaaagaggtaactcttggggttgaaaacgacagagagcctcattttggccccccgaacaatttctgcgtctgcgcgagagaatattttccctgtctcgctcaatatccatgggccatactacagattttgtactgttccgccgatcttgtgtcaaacaaagagggggccctcccgtggaaacagaaatatctggtcaatatacaatacatcttgttctctcaaagatccttctttgagagatgaacccccccgatggaggcgcccatatctcagggtttactcctctcttcttccaccgaggcaggttgttgaccccggctctctgtttaaacacgcggcgtgtgcgaaacacatatcgccctctcctttcttaagaaggtgtttcgtagaagaattcgggaatatcttttggccaccgggcaacgctcccccaccacccacgtgcacattggcacgcggcggcgcagcattcttttgtcgggacacttcttcttaagggggtatactatttgtgggaaaattacaaatcgcgaagacattaacagcccacaaaagacagaa

SEQ ID NO: 587906 - DNA, 208 bp, Homo sapiens
  misc_feature (185)..(185): n is a, c, g, or t
ccagtacggcgatcaggactttcagatggaggagaagagagcgcattgtcattactctgctttgggagcgtcggtggcacatgcagccttgccggccgcatatttaaggcttgcgccaaccagcgcgtcgaagtgcttgagcgcctcggagccgatcagcagcggaaactggaaggcgcttcggncggtgaggttcccttcgatgggg

SEQ ID NO: 587907 - DNA, 660 bp, Homo sapiens
gggtgtggtggctcatgcctgtaattccagcactttgggaggctgaggcaggtggatcatctgaggtcaagagtttgagaccagcctgatcaacatggtgaaaccccgtctctactaaaaacataaaaattagccgggcatggtggcagatgcctgtaatcccagctacttgagaggctgaggcaggagaattgcttgaatccaggaggcagaggttgcagtgagccgagactgcaccattgcactccagcccggctgacagagtgagactctgtctcaaaaaaaaaaaaggaatataaaatgttgctcctaatgtctgctgctttaggtggaagaaatatcccaccacacagaaaagagatgcttagcaaacaccccctaccttctggagcattttagaagactctgacatcaccccagacatttgagtccgcagctgtgaaaggcttcctgcactgtacagtgagaaattgctttatgctcattatctcacttcataagaaagtctgagaacacatacgagcacaacttcgggcatcgccatgatgatcactcgagttgaaagactcttgaaacgcagcgcactagtatctgaaggctcatagtacacataacatgccggctaaatttggcggctttcactggtcttcgatcccctcg

SEQ ID NO: 587908 - DNA, 122 bp, Homo sapiens
tgctggcaaactatggatgcggggactgagcatggagccttggcacgtggcgcatactgtgtaatgggatggtgtctctgtggctggaggaaatgaggaggtcctgggggtggtggctgctg

SEQ ID NO: 587909 - DNA, 487 bp, Homo sapiens
  misc_feature (195)..(195): n is a, c, g, or t
  misc_feature (253)..(254): n is a, c, g, or t
  misc_feature (294)..(294): n is a, c, g, or t
  misc_feature (300)..(300): n is a, c, g, or t
  misc_feature (423)..(423): n is a, c, g, or t
attcatttcactctcttatttagggcaattcagttctctccagggctgtcttatcacaatcaattccaggcccagctttagataacctaaacccagtagaggtcctgagattgcagactatcctcaaacaccttcaacaactccctatagcatatcagactgaatacatgttactcaaaacaaaccataatgacnccaacccattccttctgtgctaagaggcgagaaaagctcaagtcaaatggggctggtnntaagctatctgagctccttggaactcatgcctagcaacantaaggncagtacttggcaaatatttctttaattgaaatgacaaaaaagtgagggaagatgagaaagaagaggcaaagataatttaaaacccaaaccagtaatgtaagaatatttgtaagctggtatggngtgcaaacttacaaccctgcctcgtcttactgtccagagtctcaagtatacaatatgagaaact

SEQ ID NO: 587910 - DNA, 221 bp, Homo sapiens
  misc_feature (204)..(204): n is a, c, g, or t
  misc_feature (209)..(209): n is a, c, g, or t
tgtggggttgcgtgcccgggaagctgccctcgccagggaagggtgcgcagcgggacttcgggaagccaggtgacaaggagaaatggcgatgcctcgcccgacggcaggaggagggtgcaccgttgccactttaacggctgcaggaaaagtttacacgaaaagctcccacgtgaaagcacaccagcggacgcacacaggtcagtncccangcgggccccgga

SEQ ID NO: 587911 - DNA, 150 bp, Homo sapiens
ctgctggctgttgagtgagcggagactgagactacacagagtgtgtgtgacagagtttgggacctgaggtggagcccgagtttgggaccaaggtggagcccgagtttgagacccagttggagcctgagttttgagacccagctggaaccc

SEQ ID NO: 587912 - DNA, 1473 bp, Homo sapiens
taaacgtaatgccttctcctcactctctcaatacttcatccatcatagcaggcagttcgaggtggattaacagcaaagcgccagcctacgcaaacatcttaggcactactcctcaacttgagcccacactaggcatgacataccatagacacgttgctaccggtaccaagccctagacataaccattctgaatttcacctactttatagttagtccgtagagctgactaccgcgatgtcctactgactcaacttacagctccaggaccacgacccgtactacgtatctcgcaccctgaaacaccgcctaacagtgactgacacaccactctcagattccaatccatcgcctacactctccacactaagagtagggccgtgggctcacccgtcgttaacccggacttaattgccacaaacatggcgccacttatcgtaacgaattacacaccacaacatcaatacgcctgcaatcaatcccgcaaacatccactacgcccacccactgccacccttgcccttcacaactctgactctcgtaatcctgaacgcctaaagtctaacttccaaccatcaagtcagcgacctaacattgcagccccactatactgctaaaaacagagcggtgacgaaaaatgacagatcagtggagcagggttacgtcaaccattaatgcaaagagagcacgcagccgctcgcaatgtacgcttagccacgctaacaacttgcgattcccgaacgcatttctcgaagtgtacttcactttccccgttaacccgcgttcacttccattcgccccccacagtgtgcgacactttagccgtcaaaccgttacacagtacgttttacgtatgcaccccaacaccgccaccacacggaccgcgagcaactatctgggacctgcacacaacacagaaggacaaaccaggaaacaagagcaaacgcacacatcacgacgctgagggcgtagcgctcacccgccacacacatacggactacccccgcaacgcagggcgacggaccagcccacatcacccctcccgacacgcgcaccccacaaacaaaagatacagagcttaggcaacacgaacgagccgcgcccccaaccgcacaacatacaccccgcgcgtacaacattcaaccaatccccacagagcaacacccatcgatcgcacaccgcacaaacaacaccaaaactgccacaacacagacggtacaagacacacacacgcacacacaagaccaccgaacccaccggacggcgcacaaccagaccctaaccaaacaacggccggcggacggaccacatacaagaccacacatacccatcccggcaagcaagacacaacacacccaccaatccaccgcacccaccacaccacacaaccaagcccgcataccaacggccagtacaagacacaccaaaatcaaacgcgctcacgaaaccaaccacacaccccgcacacgtcccacc

SEQ ID NO: 587913 - DNA, 338 bp, Homo sapiens
gaggctaaagtgaatctcgagttaactagcatatagttgcatctttaaaaaaatcatgcctgggctcgttggctcacgcctgtaatcccagtactttgggaggccaagtcaggcggatcacctgaggtcaggggttcgagactagcctggccaacatggtgaatactgtctctactaaaaatacaaaaagtagccaggcgtcgtggtgcactcctgtagtcgcagctacttgggaggctgaggcaggagaatcgcttgaacctgggaggcagaggttgaagtgagccgagatcgcaccactgcactccagcctgggcgacagagtgagactccatctc

SEQ ID NO: 587914 - DNA, 388 bp, Homo sapiens
ctggccacagtgagactagattcacctccccatcacccttgcaggtcaggccatgcttctaggtagtgttcttttcctcaatgacatgagtgttccccagggcaacttctggatagcagcttcagactcagacataacctttcaatgtttcatctgtggggatcctgtttcttttctgttggccttagtctcccaaactcaccatgcttgtgcccttccaagggtctcattaacctgtgcctctggatccagtgtggtaccttgtgcatggctagtatacaacaaggtacagtgggggcaaatggctgggcaggcaggtaactggagaagtactgtagtccctcaaagtgcctcgctgcagagccctttgggactgagccttctctag

SEQ ID NO: 587915 - DNA, 174 bp, Homo sapiens
actacatacttccgctgggtcttctgctgggctggtgctgaagtgatcgttgaagggcagggctcaggcgccttgggctggcagggctctggaatcttggggcatggctgcagactgttctttataccaagggtccaagtctcgatgcttcttctttattcggaagtatgtagt

SEQ ID NO: 587916 - DNA, 948 bp, Homo sapiens
agcggggctaccagctcggcctgtgcggcgtggatctcggtggccgcacggagcgggaggcctgggctgccatggcgagtggcccccgcagccccggctgcggcccagaggcgccctgggaactgccctgcagcgcccggtgctgacgctagcaagactagccaccgccggcagcccagagacgtggtgagtctcccagcacgtagcctggcagctcctgagttctcatcaacgtctgtactgatctatcctagatggccattccagctgacgcagggccgacgacaagggctagccgccgccaggtcgctcagtcaagcagaatgtgcaagtagtaggatctgcgactgaaagccactcatagagagaccagtgatcaaccagtaggaacgtgaccacaacgtgaagacatggggctttcaaaaacgcttggaagcgaacgggtgcattgcaggacaagctaggataggggatttgcccaatcgcagaggcacaaaggaatgcttcggggtagcgttcggggcgcccggcgggtctggccccggacttgtgcaggatctcggccattgggtattgtacgcaatggacacaatggcctttccacgatacagcgggcttagaagaggcgtagacatacaccgcgcagcagaaggacaccccggccaggggcaggttgcaaagcgagaaccggtcgccccacggtaccatggggccccaggagggcgaacaccaagaggcgggggaagccacggggacagggacccggcgccggggagccccggggaaggggccgcccacagcaacgggccaaggcgagcgcggaacccccaagcaaatcgccggcggagccagagaccaggacgaagacacacaaccggaagggactaccccatacacgccggcctgcgaaggaccggagggaaccgtgaccacttccaaagcgcaacc

SEQ ID NO: 587917 - DNA, 275 bp, Homo sapiens
tttttccccccttaactaattaaaaggcaaattttttaaaacggattcccttccttggaaaccctattttcattaaagataatttggataaaaaggggaataaaaaacagggtatggtctcgggaaactttttaaaagggcatttttttcattggggggatcagggacccaggccccttaattttttcgggactgggatttggccttttaaagggggttgaagattttaacaaatggggtttgaacggagggcggcctttttccctcccccccca

SEQ ID NO: 587918 - DNA, 672 bp, Homo sapiens
gccccccttttttttttgtttttacttgttttaaaaaagtgactttgctttattactattggcaggtggggcctgcattgaggtgtggtttagtgtgtgtgcctcaggggatgtgggtgtgggctgtgtgtggaaattgattgacaaaaaggcttgagaaggaaagggggtgtgggtttagaaggccagggccaaggggctccctcaggttccgctttctgtgggaagggacagcctttgaggaaggagtctcagtggcaagaccattatctataggccaccaaattcagatttaaaaaatttcttgagaaaattcttagcttgaccattcagcgtgttggggtgtctccagttttctttcattcatgtggcggctcagggaaccaccagggtctcctctcgtggttctcttgtggtgaagggccagcttaagtttcgtggtttctcatgtgaagcttaaagagaacctctctgtgttcttgtggaagaagagtgtgttcgtttattaacccatctccttttttacaggacattacttctctgtggaaaacagggcaatctccggggacctcttgatgtgcaccccgtctctcaggtcttcgtgtataggggccttggcgaaatttttgtgtgcccccgtgaacgccgttgtggggccactatagttctcat

SEQ ID NO: 587919 - DNA, 737 bp, Homo sapiens
  misc_feature (6)..(6): n is a, c, g, or t
  misc_feature (12)..(12): n is a, c, g, or t
  misc_feature (22)..(22): n is a, c, g, or t
  misc_feature (26)..(26): n is a, c, g, or t
  misc_feature (42)..(42): n is a, c, g, or t
  misc_feature (50)..(50): n is a, c, g, or t
  misc_feature (61)..(61): n is a, c, g, or t
  misc_feature (80)..(80): n is a, c, g, or t
  misc_feature (86)..(86): n is a, c, g, or t
  misc_feature (99)..(99): n is a, c, g, or t
  misc_feature (111)..(112): n is a, c, g, or t
  misc_feature (125)..(125): n is a, c, g, or t
  misc_feature (127)..(127): n is a, c, g, or t
  misc_feature (135)..(135): n is a, c, g, or t
  misc_feature (153)..(153): n is a, c, g, or t
  misc_feature (178)..(178): n is a, c, g, or t
  misc_feature (189)..(189): n is a, c, g, or t
  misc_feature (194)..(194): n is a, c, g, or t
  misc_feature (198)..(198): n is a, c, g, or t
  misc_feature (211)..(211): n is a, c, g, or t
  misc_feature (216)..(216): n is a, c, g, or t
  misc_feature (219)..(219): n is a, c, g, or t
  misc_feature (228)..(228): n is a, c, g, or t
  misc_feature (235)..(235): n is a, c, g, or t
  misc_feature (238)..(238): n is a, c, g, or t
  misc_feature (249)..(249): n is a, c, g, or t
  misc_feature (253)..(253): n is a, c, g, or t
  misc_feature (259)..(259): n is a, c, g, or t
  misc_feature (262)..(262): n is a, c, g, or t
  misc_feature (270)..(270): n is a, c, g, or t
  misc_feature (275)..(275): n is a, c, g, or t
  misc_feature (286)..(286): n is a, c, g, or t
  misc_feature (292)..(292): n is a, c, g, or t
  misc_feature (295)..(295): n is a, c, g, or t
  misc_feature (303)..(303): n is a, c, g, or t
  misc_feature (316)..(316): n is a, c, g, or t
  misc_feature (330)..(330): n is a, c, g, or t
  misc_feature (333)..(333): n is a, c, g, or t
  misc_feature (354)..(354): n is a, c, g, or t
  misc_feature (405)..(405): n is a, c, g, or t
  misc_feature (433)..(433): n is a, c, g, or t
  misc_feature (442)..(442): n is a, c, g, or t
  misc_feature (503)..(503): n is a, c, g, or t
  misc_feature (566)..(566): n is a, c, g, or t
  misc_feature (639)..(639): n is a, c, g, or t
  misc_feature (660)..(660): n is a, c, g, or t
  misc_feature (697)..(697): n is a, c, g, or t
tcactncctttntaatcaggtntttnttcaaaaaaagctttncaaaattnttttacctttntggaataatcaaatttaanattttntgcagcaggcttnttctcctctttnntaggtttcttctntncaggcttnttttcaggggctggtttnttggtagctgctgccttttttcccnccagaggcttnttctncttnttaacaccaacancagcnttntttcctttnttacctnccncaggctttttncctncaaccnccnccttctcntcttntttggcttttngtcccnctnctgcagcngctgccttttccncccggagctttttnttnctggcctggcgaagaatggtnttccggcgcatggtctttgcatatgggtttagcttcaacatgattttcaantttttcagtgggttcttctttaggactntgcgatggntcttcttgcgtggtgctcgaagggctctttggatctctgggcttttcaagattctgctaanatctgtattaatcatcttgtgcatgggaagattgtagttactcttgagggaagcggctttacnccaagtgccgtacaattcatctaacttccggaaagcactttcagtccaaatgcagaaacgtcccacatgcccnccaggagcaagcttcaaaatnttcagcttgcttacattaagcagagtaattccagggntgtttctgaaggccttgatgataccattatcctcattata

SEQ ID NO: 587920 - DNA, 926 bp, Homo sapiens
  misc_feature (139)..(139): n is a, c, g, or t
tcacggggcaccaaggtgggtttaaagggcattcaacacccagggaggttcacacgttcagtctcgtggtgtgggcaacgtctcataggggtgtgaggggctgtggtggccctccagtttcggccccacagcctttggnagaaacgtgggctgtgccgcgggtgcaaccagcgtttcccgcccgcgccccagagtgtgaaaacaacaccactataacacgaagtggccacgtgcacgagaacgagaaccccaaagaagccgccgcggcctctcccaacaaccaccgcgagcggggccgtgctcgagagagttcaaaaccgagggccttgtgagggcggcgtccactctgcgggggggtggcgccccagggagagcctgtgcccgcccagagagaaactcagcgggtataactcccaaaagtggtgacaccacgaggtgtccacaattacaccaacagcggggggtcctcgtgggacagaggctcaaaccatcccggtggggagcgcctctatcacagagagacactgtgaggctccctccatccgagtggcggcctctcctccctgcgagagagaaatacgcggggacacagctttgggcgcccccgggggacacataacaccgcccgtgggtgaataagagaatgagggagaggagcgcacaaacactgcgcgggaacaggcgcaaaaggtgtgtcgacataagagggcacataataaggagggggcaacacacgtcgtgctggaaaaccaacggaccaaccacaccactccgatgagaacggaccacaaacgaagagagggggacacacccgtgcaaagagaaaccccggaaagcggggtggcgccccatcccctctatgcagcaagccacgtggcagaggccacgggagtcccatgtacggggccccctggtactaccacaca

SEQ ID NO: 587921 - DNA, 844 bp, Homo sapiens
gcacgctaaaggagcattctcagatacctgtatggcatccagacacattcactttcaactttaataatgaccctttggtccttcgacggcgccagacctacttgtgcctatgaggtggagcgcctggaacaactggcacctgggtcctgatggaccagcccactgggctttgctatgcaacgaggcgtaagaatctgtctctgttggctgtatgtacggccgccgatgcggagctgcgctgtctggacctggttccttctttgcagttggacccggcccgagatctacagggtcactgtggctgcatcttcactggtagcccctgcttcgtcctaggtggcgtagtgccgggagaagttgcgtgcgtaccttcagtgagaacacataacgtgagacatgcgcatcgttcgctgccggccatctatgattacgaccccctatatagaggaggcgctgcaaattgctggcgggatgctaggggccgcaatgatctccgagtcatagaaccataacgatcgaagtaagaagtacgtgctgaggagcaccctttgtggtaccgcacagggatgtcgccttccagccctgggatggactagaggagcacagccaaggccctgagtgggaggctgcagggccatttctccaggaactcagggaaacctgaaggatgggccttcagatctctagaggcaggcagagaccttgggtcgagcagcagacataaacaggatcttcttccaagaaagtgctatacagaccggttcacatcatctccagcatgttcacaagaagtcagcaagagcaatgtgctcctggatccagtaggatttttacaaaatccaga

SEQ ID NO: 587922 - DNA, 1174 bp, Homo sapiens
cgggcgcaaaaaatgtggttcggacctgtgctttctgggcggcttaccctaacaacgttatgcaacccgcacatggctctggctccccggttggcttcccctttcatccggagagagtgtttccgctaccgctgcggcgccaggaccgggcctttatactggcgttgctcgctcggtgtctacgatggtcgtcctccggcccggaggcaccactgagcctgggtcccactataccggctttcccagggccgatgaccgcaattcaagagcctctcgtgaccctggggactgttctgaagacaaggcctcgtgggataacgtaatccggacctgtcagccgctgagatgctgacacgtcacaattggcttttcattctatgagaagaattatgtgtcgtgcttgggaggggtgacagggcggttcctacggagaggatggggctgcccaccccggcactgacccaggtagaagctgctgatcaccagaggcttggaggccaacaaactacagctgcaagagaagcagacattcccggccgtgcaaacgcggagtggagctcagccaggggcagccggctctggtgctccctagaagagtggtaggtgtcgagcagaagactggactcggcgtccccaggaagctgtataaagccaggtgctaaggagccccgcggcgctgtgtcgtgagaaccaccggccaccctagtggtccagatgcctggacaaccctccatcacagaaatacgtggggaccatggaccacccaaatcttggtcagagatacacaggctgcaccaccgctagccatacacaggctcctttccactctaatgccgtgagctctcttctcgtataataacacacagagagctacttgccaagacaccatgagtaggctccttgacacttagtgctgccctgggatgcctgcactggcgcgaatgcaggaggttgctgcgaaggaactctggctatattcatgcaaatgtggcctcatgcaccttaccgtggctcggcgttgtggtgcctgagggacagccggccacatgcccagtaatggtcagcttatcaacactagttccctttcgacctactggccatcttcctcacagccctcagatatacaacggccacaaataagaccaatctcatataacccgagtgacaacctcaa

SEQ ID NO: 587923 - DNA, 925 bp, Homo sapiens
  misc_feature (291)..(291): n is a, c, g, or t
ggccggctgcccttccggaaggatgttgtccctttcatcagtaagggcctgcggtccaatgtcctcttgtctttagatgacgacccccgtagaaggacagcttcagggcccggagtactagtctcaacgagagagccaagagcaggatacagacgtccctcaccagtgccagcgttggaggtctgcagatgagaactccgtgggccaggctgacgatagcctgtaaaaagctccacctggagctcacggaaatcctgtctggacatgatggctcgatacagtcttctccanagttcagcggctgtcccgaagaggtctcctgtggtgcagagttcctcctagcgggtggcaggaccaaaaccgtggctggtagggaacaagcttgtcactgtgacgacaaggcgtgggaaccgggagccggtcgtcactaggcctggagctcgggggagcatgaaggccgggcccggagatcgagctccagccccggggtgcatgtgagacagaacaaggaggcgccggacaagcgtggagtcccgggctgggcaagcaggtgtcccgtggggcccgggatcgggtccagttccatgtcggggggccatggtcttcgagttggcgccctggacgtgccgtgctcccagttcctgggcagtgccgcttctccaggaccacggactggaccagacgcgaaacctgagaaggtctcacgctggcaccgggttcctgtgcaggagaagacgaaccaggcgagctatgtggccctgctgaaccagggcttgggcggagatccctggaccggaggcccacagggaacaccagtgagctgattgaagctggagaaccggtcaagcctttctcctaggacttcaacaaattcccctgcaggagctgctaacggcctcatgggggtgacgctaaggaggacgga

SEQ ID NO: 587924 - DNA, 401 bp, Homo sapiens
ataatcaagggcaaagctttgagtgcccagaagggaaagctgtaccagttggtaacctgtcttgtttcaggagccaccatgtttttttctcagtgttaaccacaatcatgataattaactccaaactctagtttgttcacttgtaggactgcagttttgaattttgggtcaaaggttttgggggccgtaagaatgtgtatttgaatgtattttgaattgtcagagcgaaagagcgttcccgcccaattttttttcatttttttggcatgatcttcaggtttctactaatagggtaattgtaaattttttgcattagcatttattggtgaatactgccatatatccccattccaagggatataagtgagtgaagttgaaataaaatctttaaaatttactat

SEQ ID NO: 587925 - DNA, 1438 bp, Homo sapiens
ctccagaatcaagtgatgagggaaacgtgtactgattgctaccgcaatgagctaactagtacttcgcgtcgagaattgactatcaattactgtgaagtgagttctctactagagagaagttgctatctattgcggacgtcgtgacactctagtacgatcatgggctatattcccacttgctcatatgcaaattgcgacttacataacctttgataagtcgttatccatagtcgcactaccacgtatttctctgggggcagtgcatggcaagacgcgtgcggtctggagcctatggcacatcatgtggtctgcacctagtggcaacaggactaatgaactgaaagtgtcctggtcacgagtgaagcgcatacatgttacctcagagaatgcatacacataccctcatgtccgcgctcctaagtaacccttactaagtttccccttaccccaactcgtggcaatcgaatgtttcaacaaacttgaaacacaaccaattcatagtttaggaacaattcatatggaacatttgctaacggcccagcaaggacctgagagtgtaactcaaggtgagtctactccccactctctttacattatttttatgcacaatttctaaagattcgaaacctagacaaaaccccatattctccacttttctggttagtcccactcctacgctcttgtaacactacgcgcagctctccctaatgaaaggacaacaacgcgctattcttccatgatatcttacataacttattatgcggcaaggaacgtcttgcaacccttttaattcacaaaacatgcgaagggtttcaaaagaacccggttacggtggcaagcctatgagttgctcatgtgttgttgccgacgctgttactttctcgggttatataacctaaacagggacccttcccgtgcgggcaagtgacactccaattgtctcactgtcaccaaatagtacctccacgttgacaggtgaaagaaaacgcataacacagcaaggccccaaggttcgttaggtctcacccaataggaaggtccggcaaggatcttctgttcccttccttgacgataccttaccataggttatgatcaccgccggtcacctttggcgcctaaacttgggatacttgggcgcgggactttgacagtagttaccactttgcgccacgattgagcagagcaattgaaaactggctaagtgcctggcattttggtgtgccactggttgtgatcaacaccggtgcgtatgaccatgcgcgcctttgacaatcgccccaaccagaaagcattacatgcggcctaccaagagtgttgtgggagcattccaaatacccttggacacaattagtgccgattctatggatgagtataaacttttacccttattctcaatcttccacaccacaggtatcagagacaatacttataaactacc

SEQ ID NO: 587926 - DNA, 202 bp, Homo sapiens
tttttttaaccccccccctttgggggaaaaaaaaggggggggcccggtttttaaaagggggctttttttccccccccccgggaggggggttttaaaccaaccaaatgcccgtttttaaaagacctttccaatttttttaaaaaaggggggggcctccgggtaaaagtttttttataggtttaataaaaaccccggcccttta

SEQ ID NO: 587927 - DNA, 188 bp, Homo sapiens
gtggacagttagctagaaagtcagcgaaactactcagccagaataccaccgctccacagttctcataatctacaagatctcctctcctcccaagcagtaagctcccttcctccttccaggattcaattactccatgccctctttataaaaaatcccaaattcagtcttaccagaagtgcgcctgggtg

SEQ ID NO: 587928 - DNA, 926 bp, Homo sapiens
gggcgctgtcatggcgggagtgctgaagaagaccactggcctctgtgggcattcggctgtgtgcaatactcctcaagcgagaggctaagtaatattgtacacaaatgcatctcttggtatgtccttgaggaaatccctaaaaatgcagtcgatgatagaaagtatacatgagacagattacaagatgaggaagctggcggtatggttaaagctggaatcagatgttaaaataattgagaagacccaatcttcaaggcggtgcaattagaagaggtggattcttcaggctgaacatgaactaaatctggcaagaataatgagggaatggaaactatgggagccgattagtgaagagctctccgtgacagatcagtggaaatgtgcagatataattattaacgtgacttgggggtgtgcaggggaaactgatgtactttatgatattctgtaatattaagagcgtgttcttattactgagatttgtaatcaaagacaagtgatatagaagaatatgtaggagacttgtaaaaatggtgatgatggtaatatggtcatgtgaatcaatttcgatcataccgtactcacagcaagtgtaatcagagatgattatcgtgaagcagagaggccatgggaacgatttcgatccactacttaactgaacacaatccttactgattttcactgcggagagccaataatcgacaaagtagcatatctgtaatacgttcaggtccgtcccatcagtaactgtgcaaagtcatcctgaaaaaggaaggtccttatattttggctacaactcatgatgcggtgagactcacagtgaattccatggattaatgaacaggtggaacatggatatgtacccagagctctgataaggaacagattatgaacccagtacctacaaaaccaacaaaaaaaaaaga

SEQ ID NO: 587929 - DNA, 457 bp, Homo sapiens
atgcccgactaaaaatacaaaaattagctgggcatggtggcgggtgcctgtaatcccagctactcggctcactgcaacccccacctcccaggttcaagcgattctcctgtttcagcctcctgagcagctgggattgcaggcacgacaggggctcacacctttgatcccagcactttggaggccgatgcaggcggatcacatgaggtcaggagttcaagaccaacctggccaatatggtgaaaccccgtctctactaaaattataaaaaattagccgggtgtagtggtacacgcctgtagtcccagttacttgggaggctgaggcatgagaattgcttgaacccaggaagtggaggtggaggtgagccgaaattgtgccactgtactccagcctgcaacagagtgagacactgtcacacaaaaaagaaagaaatatcacaatatgtcacaataggccg

SEQ ID NO: 587930 - DNA, 563 bp, Homo sapiens
ataattttttattttctattatatataatcaataaaataacgcgggaaaaaaataataaaacaccgtaattctataaaaaacaaaaaaaaaaaataatcaccactcaagaaaaaaaaacaaaaaaaaacctcaaaactatcagagaatagtacaaatttcaattaccacctacaaaataattctaaaaaaccgacaaaaaaaaaaaagcaacaatccaggaaaaaaaaaaagccaaccaaaacacaaacactgacaaacacaacaaaacaaagccctttgccataaaaaaataccaaaacaaaaccataacaaaatacaaactaaatcatcatctcatatcaaaataacccttatgaattatacactaaaaaataaataaaatatattcgccgaacaaccacaaaataacaacgacaataactccgtcaaaacaaacacccattaacaataaaataaaacacaccatctaactaaaacaaaaccaaaaaccagggcatatatacataaacaaatccatcacaaaatggaaattcctaattccaaaaaacaaacaccctcaacc

SEQ ID NO: 587931 - DNA, 83 bp, Homo sapiens
  misc_feature (19)..(19): n is a, c, g, or t
  misc_feature (32)..(32): n is a, c, g, or t
atcaactggatggcggatntgagcctcagagnatcaccggctcctgcggcctgatgcaactaccgctacttcctggaggagac

SEQ ID NO: 587932 - DNA, 265 bp, Homo sapiens
tcagtcggtagcacttcagtgacaggagaggcacagggagaggggtcacaaggatgctactcgggcacctagaagccacagcatgccctccacagagcggactgaccatgcgcaggaatgtcttcgaacttgtaccatgtccttcctgaagcagtagagcagcccgtagttcttgagcagtgcgtcatggttgtgcgagtttgtgtcaaacttgctgtaggtctgcttgaggatctgcccagaccggcggcatgcccagtcttcc

SEQ ID NO: 587933 - DNA, 316 bp, Homo sapiens
ttttaaaatttaagattatagttgatggctggggctgtgtcacgcccataatcccataatcccagcactttgggaggccgaggtgggtggatcacttgagatcaggagttcaagaccagcctggccgtcatgatgaaacccgtctctactaaaaatacaaaaaaaaaaaaattagccaggcgtggtggcaggcacctgtaatcccagttatttggggtgctgaaggagaactgcttgaacccggggggcagaggttgcagtgaactgagatcatgccactgcactccatcctggacaagagagtgagactccatct

SEQ ID NO: 587934 - DNA, 216 bp, Homo sapiens
acaccgtagcagccgggatggtctcgatctcctgacctcgtgatccgcccgcctcggccgtcccaaagtgcgtgggactacaggcgtgagccaccgagcccggccaacctagtttcttctaagattataaattaatttttaaaagtgctaataagtgaattcttttaaaaattagtatcacaaatgttctcatgcatgctcgagagtcacaagaat

SEQ ID NO: 587935 - DNA, 975 bp, Homo sapiens
gcacaatgatgatcaagaaaatcagatagaagaacaggcacaaagcaagagcaatatttactgatgcgtactcctgtttgtctttctacaggaggtacaactaatggttgttttcacccgaatttttggtatggtgggatattttcgtaggggtgggttctccccccccaacgaatttggtgggcaccagacaaattttgttttcaaccgccgagtatggcaggttttcacgtcataaacggtgttcccaggacggctattgtaatcttggtgccaagcgccgcctaagttcttcttgccgccccaccagcaggagagagtgtttgtaggaaaaacagaattcaaccgaggtggtgtattcatccgagggcaaagccacaattatgtcagggaccttaccccttatattacatgggggctcaccaaacacgcacgaacctgttgctgtcttggttgaacacccacttgtggcatggaggtctctatcatcaacacccaattatgcgagggccgctgccggcaacagccaatcccgctgcggtagcgagtttgttaactcatgagacgaccataccctggggcgatcgccacaacaggacccatctaaatgggccactctggggtccacgcacaaaaggcgtagaacaactggcccctcgtgggaagcccccaccttcgttggtgtagcctccagacaggtcagcttcccccgatccaaccgggccccttctgcggcgcaccacacattgtgtgttctggctgcccacacaccactgactttcatcaacatggggggtggtaactcagcaccctcacctcccagacgtcacgccactctctccccccgctcacacgaggtgttgtatctcattcagttcatctttgaagatgacatcttgcgtccaaaacaagacctccttcaattagaatattgggcacccccatccccctctaaagaaaaaaaacaaacccaca

SEQ ID NO: 587936 - DNA, 196 bp, Homo sapiens
  misc_feature (25)..(25): n is a, c, g, or t
  misc_feature (184)..(184): n is a, c, g, or t
ccaatctcctccttccagcccttgnagaccacgttctactcctcgtttctacgagtttggctattttaatacctcatctaagtggaattgtgctgcatttgtccttctgtgaccggctcacctcaccgtagcgtgctgttctccaggttcatccatgttatcctgttcagcaggatttccttcntctcctgaaggc

SEQ ID NO: 587937 - DNA, 260 bp, Homo sapiens
tacccgttctcgactatcagggacgcttggagatggggatggatagttcatcaaagcttctaagcggcatcacgggggtgggaagattgtacctgatagattcgatgggagaagtggcaaggtgatcagggacccgagtgcgtgctgagctgatccaggctttggaatccgtttccgaggatcgcgccatcaaggcgctcgtgttgactggcgcagggaaggggttctgcgcaggcggggatatctcgggcatgcagcgt

SEQ ID NO: 587938 - DNA, 459 bp, Homo sapiens
  misc_feature (9)..(9): n is a, c, g, or t
  misc_feature (38)..(38): n is a, c, g, or t
  misc_feature (80)..(80): n is a, c, g, or t
  misc_feature (85)..(85): n is a, c, g, or t
  misc_feature (130)..(130): n is a, c, g, or t
ccccccggnctaaaagaaacccctggccccttaggccnccccctaaagcacctgtgattaccagatggtaaagcctaacnggggncccaagcccccccaatttaaaaaatggttccctatattttccccnacactttttaccaatggatccatatattcccttttataatcaaagtaaaagaatagtttttttaaaatgataatagaggttgccctatggtggtgtgcgctttagtccccagctacatgggaggctgaggtgagaggattgcttgagccaaaggacttgagtctagccctggacaacataatgagaccctatctctaaaaaaacaaaacccagaccaggcacagtggctcattcctgtaatcccagcactttgggaggacaaggtgggaggattgcttgagccctggagtttgagaccagcttggacaacataaaaaaaccctgtctct

SEQ ID NO: 587939 - DNA, 312 bp, Homo sapiens
agcgacatggcccagtcccaaggcgcaagggccacttgtgtcagcagtgtgcaccagcagcgtgcgccggcaagatagcagaagcatgaaaagggccggccagaagacacctactctggctggaagacacgtacccctgaagatcaagaaagaagctatctgggaacaatgtagcagttacgtcagaccaggacacttcctgtttacaggagactataaaacctttgtcctatcatcacttgatgtggacgccattttaggcctcagcccgcctgcacccaggcactgattaaaacagcatgttgctcccca

SEQ ID NO: 587940 - DNA, 349 bp, Homo sapiens
  misc_feature (263)..(263): n is a, c, g, or t
  misc_feature (265)..(265): n is a, c, g, or t
ctgtacctcaacctctgtgtactcaggcactagccttgggctcgggagacagcaacagagcagggtgttggaaaaatgcagggacaggtatgagcaccgcagacctcgcaggcccctagcacaggagagagaaagacaggcaggtagccagggggactagcccctgtggatactggggggcttgaaattgtccccgtggtatcttaatttcctttccccagcacagggtggacttagaaagcaggggctacaagagggaatcnantaaggtactggaggtgggagcaggagattgagaaggagagaaagtgggtgagatgatggagaagaaaggagaggagagaggcag

SEQ ID NO: 587941 - DNA, 153 bp, Homo sapiens
tttgccagcacttgccaggcaggcaatgcatgtccagcagtattaaatggggcagcccagcagcaagccccgggtctgggcttctccgctctcaagtccatgttttctctctagggccacgtggggagccctgcgagatgggcctcaatatag

SEQ ID NO: 587942 - DNA, 513 bp, Homo sapiens
ctgagcacgccatccctgagcagagtggcgatgaggacgaagcaggagcctgacaaggcgcatctcgatctgctcttctgacataacgaattgcctgtgaggaagagttctccgattctgaagaggacggagagggggaccgcaatgaactcttccaacttcaaaaaagccaagagagtcaaaacagaggatgaaaaagagaaagacccagaggagaagaaagaagtcaccgaagaggagaaaaccaaggaggagacgccagaagccaaaggggtcaaggaggaggtcaagttgggctgaatggacctctccagctctggctgccggctgagtccctcacgtttcttccctaacccctcagatgatatattttctatttctctgtgtattgatatgaaagtttattaaatataattatccccagggacagaaaccaaggccccgagctcagggcagttgtgttgggtgagctctactaggagctagcttgcatccattctacgcgtctaactt

SEQ ID NO: 587943 - DNA, 601 bp, Homo sapiens
  misc_feature (18)..(18): n is a, c, g, or t
  misc_feature (34)..(34): n is a, c, g, or t
  misc_feature (36)..(36): n is a, c, g, or t
  misc_feature (45)..(45): n is a, c, g, or t
  misc_feature (66)..(66): n is a, c, g, or t
  misc_feature (73)..(73): n is a, c, g, or t
gaagaaccttccgcttgncatatcccagggatcntnagctacatnctcgaaagctcggaagctttnatatggnagccaggcgtagcccacacagtcggcataaggcgtcaagacggcacgctcagcggcccatggacggccacaaggatcagcgactaccaccttaggatccctacgctcgacttcgtccctgatacaagctgggatcgagagccgccccacctgctgttcggcccggtagccagggaatgccaccgcgtcctgatcagcaaagtaaccccgaaaggaagcgaaagcgtttcggttcaaggcctcaactatgacgacagggtttacctgtacgacaacgctactgcacccgactaaataaccaaaaccacacaggcccgccaatgagcgggcttttttgtgcctggagaaaacatgcgatataacacgggcaacccagtaggaaccgacggctccagcgacccgagagatctttacaacaatgctggtgtggctgatctttttgctaacggcttggcggcatcctttcccgatcgccttgaccgcccaagaaagtcaatctatggaatggagcaggactttttccgacttt

SEQ ID NO: 587944 - DNA, 143 bp, Homo sapiens
gtccaacagtaacatgacccagtccacccccaagtgctcttagatactgaaggagtctcccttaacatacagtgtttattattattttttgagacagaatctcattctgtcacccaggctagagtgcagtggcaccatcttgg

SEQ ID NO: 587945 - DNA, 132 bp, Homo sapiens
gcccacgttcttgcatgggagggaaagaaaagagtggagtatatccagtgtttttacttttgagggggaagtactacctaaagggagtggtttccgttttgcctgaatctagtatgacagaaactgggctat

SEQ ID NO: 587946 - DNA, 530 bp, Homo sapiens
atttgtaaattgaatacttttgaatgtaagcagttgaagtaaaacctgtagtgagttcttcagtcagtcaacactaaacctgttttgtaaatttgatgctagtattacactggactttctcaaaatgaagtacacctatatatgcatatagtatatgagcatgcgtatttgtacaaaagcccttcaaaaggagttcagcttttataaacaccaaaacactctctgcctgtaaaatgtttttgctgaaatttgtatcattaactctcaaatttacatcttcatgtttgagatacgcttttaggactgtctatgcatgtagactttggtcaactctctcctcctccctcaataaatcattaacttgaaaaaaaaaatgtgaaccttttttaaaaaacacagttacaaaaaacaatccaacactttggtctcaaacaaaaaaaaaataagtccaatccactcacaaagaatttctattttgtaaaaatgtagcttgtatttcagtataataaaatctgatgtaagaaactgta

SEQ ID NO: 587947 - DNA, 914 bp, Homo sapiens
ggaccgcgtccttggcgcttggtcctgttgatcctctcgcctgccggttctccccggttccaggctgtggctcacgtttaggttaagccctctccttacgtggtttcccccccagtggcgtgtcacacttcgagcccgtgtgtcggggctgtgaaccccgttgggcctctttgggggcttctcttgagcagcccagaaggtcgcgcccggggctggtatcataatcacggggtcaccccgcgtgtgttgtgtcccccgggccctactgggtcccttaggtagtcaccatggggcccccttgggagtcgcctgttccttgttcgcccctggtttagtaaatgccctggtttctgatggcccccgtgtcccgtttggtgcgccccgttggcccatgtgtgtgtcgtggcaatgactctgcatatgcgggcgcgccccctgtggtgggagacattgcttcggacgcgggtatagtgcgcccatccgcagtttctatgagacccctttctcctgtgccccgaataacgtggacttcacatctcttccgcttaattaaagtcgcttaccaggggggggcgcgccctctgggcttatcgcccatgtgttcccccccctggtggggggtgtcatgggcttgccagccccctgggccttcgcggctctatcatgctgccttccttgcccctattccgcccgaaatcccgtggtttacccctcatgacgacgcgcatattgccgctgtcgggtcctcgagccggtcacgaacttcgggtgcagccggactcccacgtgaggggcgcgtgccatccagcgccccgtccctggacaccgatgtcggaggcccacgcgatgtccccttgatcgccggcctccgccccccgtctttccccccccgggcaccaaccgcaccccaccat

SEQ ID NO: 587948 - DNA, 146 bp, Homo sapiens
ggcacgagcttttttgcaggcgatactgacaagcttctgcacatccggatagaagattccccggaagcccagattcttcccttcttacgccacatgtgtcacttcattgaattcaccatcaccttggctctgtcattctgatattg

SEQ ID NO: 587949 - DNA, 485 bp, Homo sapiens
gtcttctcctccttaacctctttctttttggcgagacagggtctcactctgttacccaggctggagtgcaatggagtgatcactgcccctttgaacttctgggctcaagtgatcctctcacctcggcttcctgagtaggtgggactgcagatgtgtgccaccaagcctggctaattaaaaacaaatgtttaagccaggcatggtggctcacacctgtaatttcagcaccttgggaggccgaggcaggcggatcacttgaggtcaggagttcaagaccagcctggccaagatggtggaaccctgcctctactaaaaacacacacacaaattagccgggcatggtggctggtgtctgtaatcccagctgtgggaggctgaggcaggagaatcacttgaacctgggaggtggaggtttcagtgagccaagatcatttcacctcactccagcctgggtgacagcgtaagactctctcaaaaaaaaaaaa

SEQ ID NO: 587950 - DNA, 593 bp, Homo sapiens
atgagcagttctccaaactcttcgctatcgtgaaatagtgcatgtaactatacacagcaagtgcagggtatcctttgatatactgatttcttttcttttgaatactcagtagtgggactgctggattatatagtatttctatttttagtttatttgagaaatgtccagttttccacagaggttgtactaatttacagtcccaccgatgccgtattaagagttttctttgactgctggattacatagtatttctatttttagtttatttgagaaatgtccagttttccacagtggttatactaattgacagtcccaccaacaccgtattaagagttctcttttctctgcctctttgctggcatctgttattttttgtctttttaacagtagccattacaactgggataagatatctcattgtggttttgatttgcatttccctgatgattaatgatgttgagcaatttttcacatgcctgctggacatctgcatgtcttctttcgagaaatgtctatttgtgtcctttgctcacttttgtcttttttgagatgtaatttcgctcttgttgcccaggctgcagtgccaggcaatg

SEQ ID NO: 587951 - DNA, 131 bp, Homo sapiens
atatgaaatgaaaatgatagaatggaatggaatggatacgagaatacacatggaattgaatgaaatggaatggcatggaatggaatggaatgaacccggattagatacaacacatgctgcgaggggatcct

SEQ ID NO: 587952 - DNA, 131 bp, Homo sapiens
ggaaaaataaagagaaaaaagcacagaagccagtgaaagaaggacagccgagtccagcagatgagaaggggtgccattgttatagaacgaccaaatgtgaaatggagtctgctgctgagagcgaggcctag

SEQ ID NO: 587953 - DNA, 159 bp, Homo sapiens
  misc_feature (93)..(93): n is a, c, g, or t
  misc_feature (102)..(102): n is a, c, g, or t
gcggagacgggcatcagtgtgatggcggctcgcagcaatggcaccgtctccccctcggccttcttggagccatatagccctgcagtgtgggtnatgatgttngtcatgtgcctcactggggtggccatcaccggtcttcatgttcgagtacttcagccc

SEQ ID NO: 587954 - DNA, 105 bp, Homo sapiens
acttagaggatcccaagctccaacagagtgaactcatctcacacgaaaaaagaatgttgatattggccgcactctcttctggctgtagtgtttcgcgagaaatca

SEQ ID NO: 587955 - DNA, 286 bp, Homo sapiens
cttataaagaatatgattgttggcattcaaaagccagcgaagtatacattattagcctgttgcctaactcatttctttaagaaactacactaattacccacatacttatgtttttatttcctcattatttctggagaaaacaaatactgctaacatgatatttgtaagagagaaaaaagtcttttcttgaaaagtgctgtcattgtagtactaacttatagtatcaacttctttatacactccttagccactttttattctgagagaaataaaaaacctaaaagtc

SEQ ID NO: 587956 - DNA, 428 bp, Homo sapiens
gtgtgtttattacaaccttcggtaagctatactggattttcactgatgtcagtcatacacatatgggagggtagaactaatactaattatggagcaagtgagcaaatattataatagagctaaaaaggtgtaaaagtcaaactcaacagacatatctgatgggactagtgacaattaagaggcaatgggtcctgatgaaggaataggaaaagattactttgtggattctggctgggtggactccagtttctccctttattttggtcttggatattactaccctgagctcccaatgcttattccctcatccctgtaacctagtccctccgactggtcagaccttaccaatctagtcattttgccacaccctccttccaggagggcctcttcactaccctggtgctcagtgacacctccattcctagttc

SEQ ID NO: 587957 - DNA, 134 bp, Homo sapiens
cggcacgaggtgggagacagaggaaatgggtaacttgagcccaggagttggaggctacagcgagctatgattgctacactccagcctgggtgaaagagtgagacctagtctcaaaacaaaacaaaccaaaaaaa

SEQ ID NO: 587958 - DNA, 636 bp, Homo sapiens
agcggagggcgggagcaggagggggggggggagggaggggaaggagggaggagggagggggaggacgaactgaagaggaggagggcgggaggggggggagaaggggggagagggagagaagagcaggcaggcgcagggggggcagggggggaggagggcagacgggagggggagggggaggacgagggggacggggagataagggggagggagggagggggagggggagaggggggggagggagaggggggggagggtgggacggcgtgatgaggagacggggaagggagtgagggagcggggcagtgggcggacgggctgagacggggcgagatgaggggaggctagggggagggggggcggggtgtgcgtgggggggatggagtgagggggatgagtggtgggtggacctggctggaggagggtggagcgagctcagctcgggcaggcgggtgcgtccggggctcaagtgtggcatgtgggcgaggagggtgagtggaagagatgaggaaaaaaaaaaaaggccaggtgtggtggctcacgcctgtaatcctagcacgggaggcagaggcaggtggatcgcgagttcaggagatcgaggccaacctggctaacatgatgaaacttcgtctctac

SEQ ID NO: 587959 - DNA, 1589 bp, Homo sapiens
  misc_feature (297)..(297): n is a, c, g, or t
  misc_feature (908)..(908): n is a, c, g, or t
ttgtctccccacgcgagttgtgttttcgccccgcgagctacgtactccctgggccagcgccgggggtcttgtcccccacctagtgtacggggactccagcggggcagacgaggccctcccgcagtagtggtcttcttccggggtgtagcacagtcgcccccggcggtagttaattagtaggagtgtgtggtggttgctccccccccccctcctccacccacctatgtgtgggtgcacctcctttttggtgttacttagaaggaccgcacactgctagtggtgggtgttcgccgttcngccctcccctccgcagcgaagaggctgatgtcgtcgttgattctgtcttgctgtctccccccccccgccgcccttctcgttaggggaatgttctccccgaaggagtctcgccctcgtgcaggtttttcttgtttctccctctcgggggcggcgcccctcctctcttttctccccgcagaggttggtatgagatgggcttttttttgtaggagagatggtatttgttccccccccgctgcgctccggctggtatgcggcgtcggcatccccccctgttgtactcggtggccccactgcggccctcctcaccacatggctggtttcaactacgagggcggctctgcttgtgtgtgtcgtcctactcctccggggggcgctcccaacacttggggcgcccccccccttctcgtgctgtcttttgttggggtgttgtttttttagatgggctcccccccccgcagagagagtggtggccccccccccccccccgccacgcaccctcgtgggggcagcgcgcagcgacatcatctacacctggtggtcgccgcaccagtcttttctctcctccctcgtctttgtcccccccctctcgtgttgccgcacacgagagnagcttctcttctctctgtgagggggcgcacacagagtatctccgcgcgacagttgctcgcccgccactctctttgtcgtcctctctctcacacagggttcgcacacgcgccctctctgccgcgcgctctctctgtgtgttgtgtgtgtgcgcccctctctctctcctctctccgccccacccgcgggagcgctctctgggtctcttttgttttctccccaccccctctgctgtgcgctctcatagagagatctcctctctcctccctctctttgtgcgcggtctgggtattctcagatgtgtgcgtctggtgacaccccaactctctcccccccgcggggggcgccctctcccgccccctctgggcgcgcctctctctctccacagcagcgcgcccactctctctgagagcgcccctctcttttgtagagcctctcccgcctctctctctctgtgcgcccccgcctctctctcttgagagagagagagagctcgtgttttccccccatgtttccctctctctcacgcgggtgtgtctcctcggccccctctctctgtccagacccccccccacggtgtttcccgctcgccccgggctcctcggcctcccccctcgtgggggcacacacacacacaagggtgttttttccccaaaaaaaaaaagggaatttaggggtgtgta

SEQ ID NO: 587960 - DNA, 213 bp, Homo sapiens
acaatcacgatcgccgccagcatgaaggagtgaacagaggcaccgccaagtcggggagatacaatcccaggaagggaagggccatgtggcgggcttctgtgagcccgtgcactcatcagctttgccagctgtcccagatgcgctccagcgcctgtctatgagatacatccaagaagcagagcatctcaactcaccgcccttgaagctgatggt

SEQ ID NO: 587961 - DNA, 338 bp, Homo sapiens
  misc_feature (20)..(20): n is a, c, g, or t
  misc_feature (322)..(322): n is a, c, g, or t
  misc_feature (324)..(324): n is a, c, g, or t
cattaattgcgggaattacntaaaagctgtcggcgggccaactggtaatgccaagaacaagaataacgtgctcgaatgcggccgaattattgcggcctgcttgcgttaatgacgtgcgcgttcgattacatggcacatcgggcaaacgcaagcactcgcgtattggttcgatacggtatcgatacgcatcgaacgcacacgattgcggcgcacgacaaccggcgcatccgttgcctgcgcatcctttagaatcgagccgtcctttaccacgccctccgcgctccgtgcccgccgatcatcgtctcgacctgaacctgtttcntntgctcgacgccgtc

SEQ ID NO: 587962 - DNA, 231 bp, Homo sapiens
  misc_feature (225)..(225): n is a, c, g, or t
  misc_feature (227)..(227): n is a, c, g, or t
caaccctggttcggtaagtggtttgttttctatagcattattataggtctacctgcaaggtggtcgctatgggcagtaaacgtttctggaaaaacaactagtatagtagtgtgggaagtccactttatgaaattcactccaacctctatttcctccaatttccttatttgtttaaaaggagggaatccacatatctccttagggtgtacttaaaataaaatactntngaac

SEQ ID NO: 587963 - DNA, 992 bp, Homo sapiens
tgatcagccatctaaagcggacctctgttgaaaactctttaaggccaatccagtctcgactcctgcttgctggcttcgctggcctccagttgtccaggcacccgtattgtgcggatattgcatgttttccgagcacttgccaatgtatatttgtagtgacacttgcttatgtcccaatgtgagcgtttccagaagaagggcttacctaacacggtgctgttggcactttagcaagtgcggaactgggaggccacctgtcaaacacacagcatttgtacagggctcaatgtgatgtcagttttataggcaggaaatgatgattgatgaaacagagcttggaacatttgaagaggaccccatgatgttcaaggaaatgcagatggagttcttgcgtctgctgcccaggtctggagtgcagaggactgatcatggcgtcaactgcagcgtccatcttgccagggttcacagcgattctcctgctttcagcctctcaagtagcttgggattacaggcgcccaccaaaccggataattttttttttttttaatactttaagttttaggttacatgtgcacaacgtgcaggtttgttacatatgtatacatgtgccatgttggtgtgctgcacccattaactcgtcatttagcattgggtatctctcctaatgctatccctcccccctccccccaccccacagccgtccccggtgtgtgatgttccccttcctgtgtccatgtgttctcattgttcaattcccacctatgagtgagaacatgcggtgattggttttttctccttgcaatagtttgctgagaatgatggtttccagcttcattcatgtccctacaaaggacatgaactcatcattttttatggctgcatggtattccatggtgtatatgtgccacgttttcttaatccagtctatcattgttaaatatttgggttgtttccaagtctttccttacaccacgggccacataaagctcttt

SEQ ID NO: 587964 - DNA, 690 bp, Homo sapiens
  misc_feature (23)..(24): n is a, c, g, or t
  misc_feature (27)..(28): n is a, c, g, or t
  misc_feature (30)..(33): n is a, c, g, or t
  misc_feature (52)..(52): n is a, c, g, or t
  misc_feature (247)..(247): n is a, c, g, or t
  misc_feature (257)..(257): n is a, c, g, or t
  misc_feature (269)..(269): n is a, c, g, or t
  misc_feature (283)..(283): n is a, c, g, or t
  misc_feature (294)..(294): n is a, c, g, or t
  misc_feature (300)..(300): n is a, c, g, or t
  misc_feature (313)..(313): n is a, c, g, or t
  misc_feature (327)..(327): n is a, c, g, or t
  misc_feature (333)..(333): n is a, c, g, or t
  misc_feature (339)..(339): n is a, c, g, or t
  misc_feature (344)..(344): n is a, c, g, or t
  misc_feature (350)..(351): n is a, c, g, or t
  misc_feature (449)..(449): n is a, c, g, or t
  misc_feature (486)..(486): n is a, c, g, or t
  misc_feature (529)..(529): n is a, c, g, or t
  misc_feature (547)..(547): n is a, c, g, or t
  misc_feature (558)..(559): n is a, c, g, or t
  misc_feature (568)..(568): n is a, c, g, or t
  misc_feature (571)..(571): n is a, c, g, or t
  misc_feature (583)..(583): n is a, c, g, or t
  misc_feature (638)..(638): n is a, c, g, or t
ctacgtacggttaggtcgaggcnnggnngnnnngagatccaggcggtgacanagtggagccatggctagaggcaggaagatgtccaagccccgcgcggtggaggcggcggcggcggcggcggcggtggcagcgacggccccgggcccggagatggtggagcggaggggcccggggaggccccgcaccgacggggagaacgtatttaccgggcagtcaaagatctattcctacatgagcccgaacaantgctctggantgcgtttccccnttcaggaagagaantcagttacctnacgaantcaatgccagggngaaaccattagccnggaatntacagngaaangagaannagaaaagaaatgctgggaacgcagtacggagcgccatgaagtccgaggaacagaagatcaaagacgccaggaaaggtcccctggtaccttttccaaancaaaaatctgaagcagcagaacctccaaaaactccancctcatcttgtgattccaccaatgcagccatcgccaagcaagncctgaaaaagcccatcangggcaaacagnncccccgaanaanagctcaaggaanaacgcaacagaatcgcaaacttacggatttctaccctgtccgaaggagctccagngaagagcaaagccgagctgcagtctgaagaacggaacagaatagatgaatga

SEQ ID NO: 587965 - DNA, 159 bp, Homo sapiens
tatgtgggacggccccgcttcgcctgatcgaagccaccagcatgggcgaatgtcgcggcgcgtggcactggatcaggacatggtcggcgcaggtggcggagtaggtcatatcttcgcaatgacgccaccataagcaatggacgcaaccgccgcgccgtg

SEQ ID NO: 587966 - DNA, 135 bp, Homo sapiens
cttagaaactaaatcgagcccagaaagttgaggctgcagtgagctgtgattgcatcagtgcactccagcctgggggacaaggcaagaccctgtgtgaggggagaaaaaaatcagggttgacatggcttagcagca

SEQ ID NO: 587967 - DNA, 595 bp, Homo sapiens
ctgaaccaagtgctcatgtacctgctcttctgtcttcaatcttcgtcttcttggcttggcttggaggctgtgatccatgtggtgtggcccgtgtggctcctgccttgatcctgtagaccaccaatcctcctgtatcttggagctgggagacaagcccgtgcccaacaccttctatgtaggcttctacatcctcatcgcctgtgggcgctgtcatgattgttcgttggattcctgggctgctacggggccatccaggaatcccattgcctgctgtggacgttcttcacctgcctggtcatcctgttttgcctgtgaggatggccgccggaatctggggctattgtcaacaaaggaccagatcgccaaggatgtgaaagcaagtctatgaccagggccctacagcagggctgtggtggatgatgacgccaacaatgccaaggatgtggtgaagaccttccatgagactgcttgattgctgtgtgtccagcacactgactgctttgacacctcagtgctcaagaaaattgtgtcctcgggcaggacatcatcagcacctcttcaggaggactgccacagaaatcgataactcttcttg

SEQ ID NO: 587968 - DNA, 344 bp, Homo sapiens
  misc_feature (291)..(291): n is a, c, g, or t
tggagtttggctctggtcgcccgggcgggagtgcaggggcgtgatctcagctcacgtggcaacattctgtgccctcccgggtttcaaggtgatttctcctgtgcctcagtctccgtgagtgtggcgtgggatctacggggtgcccgccaccagcgctcagcataatttgtggatattttaagataaagagtggggtgtttaaccatgtgtgtgggccaggctgggttcttataaacctcctgtggaccctcgaggtgtgactccacctgtgcctctcagccctctggacantctcagtttatattctcacatatatttgtgtgtggtatacactctccccatgt

SEQ ID NO: 587969 - DNA, 217 bp, Homo sapiens
  misc_feature (208)..(208): n is a, c, g, or t
acaattttcaagtctacaatatattattattgactgtagaaaccatatagtacaatagctcttcatgacttactcctcctgtctaatggaaactttgtaccctttgaccatcatctcctccccattctcccaccaatccccaatctggtgtgaattttctgaattgatacctatattgatccagggttaaataaacaaagtataatantataataat

SEQ ID NO: 587970 - DNA, 1251 bp, Homo sapiens
agcgggctttcccccaagatggcgtccatgcgggagaacaacacgaggccataacaacacaacaaacaaaaaccacaaacaagcaagaaagacaccaccgcaacagacgcgaacccgaacgacacgtagccacaggaggcaacggacaacgaacggcggacgacgagcgaaccagtaggcgcgacgcggtcggtcgagtgtgagagcggctgagggagagctaagcacaaagacagctgagcggccgacccagcggcctgcagcggtaggactgagtagatagatagatctgccctaaaggatgaatatacagatccatggctacatccgatgcgcactaccacaggagcccccatgtgataacgacaatggtacatcctaggcagacgatgagatatgaccgaagtccaataccatctaatagcacatctaatgagccaagtaagggaaggtagaagatctaaggaaatggcccaaagccagtaaccatgagaagagaaaagaggagaaaagacgatgagagaatagatatgaataagaagatggaagaataatactatacgaaatcgcgatagacaaatctcagcgaagataaaggaagccagagaaagcgagaggatatcgaagatatactggtcccgccaaggacgaatcctgctaacagtcgataagcactcccgcggcgaagccgacccctcccagaaggaggacactgtcaaagagagttcccacgtgtatagtaactgtccgggtggagataggccctaggattgaggtcgagcgcctagctggcttaatgccaagaaacctaggaaaagcgcgtgagggctaatccaagtgagagtgggaccccaagcgaggtgtaggaccctatggccccaaaggccatagtttagatgaagagatgtccaggacacgtgcggagctcctgaggagaagtaggcgcgcccccaagacccgcaacgaagcccgactagttggagagccgttagagaagagatcttagactcaaatcggtgagcagaattcgagaagtatagccgatgcgtagtctcgaatcgtctcctgagctgaccgagagatgaggtccgagacccctgtatgagtgcggagtgtatcgacgcccctagacgtggaaatggccccctgagcgagagtcatctgcccgatgtcgagtgacgggaccgatgccgccctcgacgaaggaggaaacccgagggaacccccctgagaccccgggcctggacccga

SEQ ID NO: 587971 - DNA, 222 bp, Homo sapiens
aatcgagctcggtacctgtcaaagcgtagtacccaagtaactgggactacaggtgcacctccacgccctgctaatttttatatttttagtagggatggctttcaccatgctggccttaagtgatccgtccgccttggcctccaaagtgctgggatttcaggcaagcgtcaccacacccgacccctcactagtatttcagcatttgggtactacgctttggca

SEQ ID NO: 587972 - DNA, 1293 bp, Homo sapiens
aagtccctaaaggagaggctcaggggcagaatgggaattcttccatgaggactcagcagtcaaccaaagttggacaattacatgtagaagagagtgagcaaatagagttgcttagtgaaaaatgatactgaattctacataaatgtaaagtctttaatctgaggaccctgccccatgaattgtgcaggctgcattgaaacgccttggtgatctcatatttaggaagaaagttaaagagttggtcagatggatagttcataatgggtggttccattctgagagcccattgccccagctttggttttagttgtgtcataatctctgatcattaatcctactgactgagtggactatttcagttaataaaacaatatgattaatagagagagctgtcattgagtcccaaaatggattgccagttttaaaataattattataaaatgtatgctaaccccaaaataatactaggcatgaggtgacctctctgatttggtcaccttgtagaaccttggagggtgtcagggcatctctttgagtatcagttatgattattcagaagtatagatgtatcaaatgatagaaatgacaaggaatggctgggattacaggcgtgagtcaccgcgcccggccaagcccttggcattttatctggaatagcatctgtaaactgaagtgtttgacctctgttttcttctctcctctttcatctgtttctgattcgttggctggcagctgcacctgtggggggacctctcatgcagacttgcacatatgcagggagtattgcactgaagatctttgctggaccttcttctcttcagaagataattttcaaaagggagcaatgctgtgaatgcagcttgcttctctctacagattgagaagtccagcttcaaaagttacttgccacttaagcaaggaacttgtcaagagatcatggttcatgttactgaaaagactttaaggatttgtaaggttaatccatagattgctgagaacaatggaaatatttttatttttacagattttgcacttctgaattcaggttaaaaactaacttgtatttagtctgcttagaggactgtgacttgaaaatttttatataccaatgagctttttggtagcgtccacaatgtttaaaatatttcataggcgagatcggtctcattattatggctgtgacaattaatggtgggtcaggaaattttctagttatagaggaagttattaattagggtaattggcgttgtaaagcgaaatttccaatggaccgaaaaatagggaaaaaatatt

SEQ ID NO: 587973 - DNA, 973 bp, Homo sapiens
aagtccctaaaggagaggctcaggggcagaatgggaattcttccatgaggactcagcagtcaaccaaagttggacaattacatgtagaagagagtgagcaaatagagttgcttagtgaaaaatgatactgaattctacataaatgtaaagtctttaatctgaggaccctgccccatgaattgtgcaggctgcattgaaacgccttggtgatctcatatttaggaagaaagttaaagagttggtcagatggatagttcataatgggtggttccattctgagagcccattgccccagctttggttttagttgtgtcataatctctgatcattaatcctactgactgagtggactatttcagttaataaaacaatatgattaatagagagagctgtcattgagtcccaaaatggattgccagttttaaaataattattataaaatgtatgctaaccccaaaataatactaggcatgaggtgacctctctgatttggtcaccttgtagaaccttggagggtgtcagggcatctctttgagtatcagttatgattattcagaagtatagatgtatcaaatgatagaaatgacaaggaatggctgggcgtggtggctcatgcctgtaatccagcactttgggaggcaaggtgggtggatcatgagtcaggaggttcaagaacagctgacaacatggtgaaaccctgtctctactaaaatacaaaattagccggtgtgatggacgcgcttgttaatccagctacccaggagtgaggtaggaaaaacgttgagcccggcagcggacgttcagggagccgaaatgaccattggctcagctggggaaaaacgaatcggctcaaaaaaaaagaaaaagggggggcccaaaacacgggagccagacaccaccctctgcaaggccaaagggaaaaaggcggggcgacagcggaacaccgcatcaacccctggcaggcaccaaccga

SEQ ID NO: 587974 - DNA, 295 bp, Homo sapiens
gaggatccccgactcacagcgtatgtgtgtacctgtcgcatattatgtgtgcatgtgcgtaatgaaagtcagtaggcgtgtctgagtgtgctgatctagagtgtagcatcttactctgtaatgagagtaagagggtctgtaggagagtggcagggcatctatctgtgcatgtgactgtgttggacataacaggtcgtgcgctgactggaaccctccgtgcgtatgtgtgtgcatgtgagtgtgtaatgggagtaagtggacgtgtgtgtgtgctgtgcatacgcccgggtaagca

SEQ ID NO: 587975 - DNA, 1387 bp, Homo sapiens
aagtccctaaaggagaggctcaggggcagaatgggaattcttccatgaggactcagcagtcaaccaaagttggacaattacatgtagaagagagtgagcaaatagagttgcttagtgaaaaatgatactgaattctacataaatgtaaagtctttaatctgaggaccctgccccatgaattgtgcaggctgcattgaaacgccttggtgatctcatatttaggaagaaagttaaagagttggtcagatggatagttcataatgggtggttccattctgagagcccattgccccagctttggttttagttgtgtcataatctctgatcattaatcctactgactgagtggactatttcagttaataaaacaatatgattaatagagagagctgtcattgagtcccaaaatggattgccagttttaaaataattattataaaatgtatgctaaccccaaaataatactaggcatgaggtgacctctctgatttggtcaccttgtagaaccttggagggtgtcagggcatctctttgagtatcagttatgattattcagaagtatagatgtatcaaatgatagaaatgacaaggaatggctgggattacaggcgtgagtcaccgcgcccggccaagcccttggcattttatctggaatagcatctgtaaactgaagtgtttgacctctgttttcttctctcctctttcatctgtttctgattcgttggctggcagctgcacctgtggggggacctctcatgcagacttgcacatatgcagggagtattgcactgaagatctttgctggaccttcttctcttcagaagataattttcaaaagggagcaatgctgtgaatgcagcttgcttctctctacagattgagaagtccagcttcaaaagttacttgccacttaagcaaggaacttgtcaagagatcatggttcatgttactgaaaagactttaaggatttgtaaggttaatccatagattgctgagaacaatggaaatatttttatttttacagattttgcacttctgaattcaggttaaaaactaacttgtatttagtctgcttagaggactgtgacttgaaaatttttatataccaatgagctttttggtagcgtccacaatgtttaaaatatttcataggcgagatccgtgttctccatttattaatgcattgtagaccaatttaactgctgtgtttcaggaaaattcttcctagtttaataagcaagctaaaagttttattttttatatttagtgcttaatctttgcctcatgttatgtaaaattagcctgcagatattttctctcaattctgtagactctcgcaagataaacattcaaacagtgaaacaaacaataaaataaataaacctaa

SEQ ID NO: 587976 - DNA, 381 bp, Homo sapiens
atcgagctggtaccctcataagcggccatgctggaatggacgaatacatgcaggaagtgcatgaaggttgacaaggggagtggagctgggatcttatctccgagagcgttctgggaggataggcgcgtggatgtctgttagctggaagcttcgtactttcctgtggcctcctagaacccatacgcctgccgcgttccctggttttaaaaactatccggaaaccttcttgaaagtttccactgatggccaccttgcatctcagagccagcgagctcaggtctctcctggtaaccttcacacctagaggtggggggatgggggagcagtattgaaggtgaggaaaaacagcatgaaatggagcattgtcaggatagatggtga

SEQ ID NO: 587977 - DNA, 1431 bp, Homo sapiens
  misc_feature (1399)..(1399): n is a, c, g, or t
aagtccctaaaggagaggctcaggggcagaatgggaattcttccatgaggactcagcagtcaaccaaagttggacaattacatgtagaagagagtgagcaaatagagttgcttagtgaaaaatgatactgaattctacataaatgtaaagtctttaatctgaggaccctgccccatgaattgtgcaggctgcattgaaacgccttggtgatctcatatttaggaagaaagttaaagagttggtcagatggatagttcataatgggtggttccattctgagagcccattgccccagctttggttttagttgtgtcataatctctgatcattaatcctactgactgagtggactatttcagttaataaaacaatatgattaatagagagagctgtcattgagtcccaaaatggattgccagttttaaaataattattataaaatgtatgctaaccccaaaataatactaggcatgaggtgacctctctgatttggtcaccttgtagaaccttggagggtgtcagggcatctctttgagtatcagttatgattattcagaagtatagatgtatcaaatgatagaaatgacaaggaatggctgggattacaggcgtgagtcaccgcgcccggccaagcccttggcattttatctggaatagcatctgtaaactgaagtgtttgacctctgttttcttctctcctctttcatctgtttctgattcgttggctggcagctgcacctgtggggggacctctcatgcagacttgcacatatgcagggagtattgcactgaagatctttgctggaccttcttctcttcagaagataattttcaaaagggagcaatgctgtgaatgcagcttgcttctctctacagattgagaagtccagcttcaaaagttacttgccacttaagcaaggaacttgtcaagagatcatggttcatgttactgaaaagactttaaggatttgtaaggttaatccatagattgctgagaacaatggaaatatttttatttttacagattttgcacttctgaattcaggttaaaaactaacttgtatttagtctgcttagaggactgtgacttgaaaatttttatataccaatgagctttttggtagcgtccacaatgtttaaaatatttcataggcgagatccgtgttctccatttattaatgcattgtagaccaatttaactgctgtgtttcaggaaaattcttcctagtttaataagcaagctaaaagttttattttttatatttagtgcttaatctttgcctcatgttatgtaaaattagcctgcagatattttctctcaattctgtagactctcgcaagataaacattcaaacagtgaaacaaacaataaaataaataaacctaaaaaaaaaaaaanaaactctaggggggggcccggtccccaatctg

SEQ ID NO: 587978 - DNA, 118 bp, Homo sapiens
gagcacagggcttactgctcgaaccctctcagcactggtgaggacagctgcctcacaggaggactggactctggactgggctcagggctcccagcacactggctggctgactcaacag

SEQ ID NO: 587979 - DNA, 1600 bp, Homo sapiens
aagtccctaaaggagaggctcaggggcagaatgggaattcttccatgaggactcagcagtcaaccaaagttggacaattacatgtagaagagagtgagcaaatagagttgcttagtgaaaaatgatactgaattctacataaatgtaaagtctttaatctgaggaccctgccccatgaattgtgcaggctgcattgaaacgccttggtgatctcatatttaggaagaaagttaaagagttggtcagatggatagttcataatgggtggttccattctgagagcccattgccccagctttggttttagttgtgtcataatctctgatcattaatcctactgactgagtggactatttcagttaataaaacaatatgattaatagagagagctgtcattgagtcccaaaatggattgccagttttaaaataattattataaaatgtatgctaaccccaaaataatactaggcatgaggtgacctctctgatttggtcaccttgtagaaccttggagggtgtcagggcatctctttgagtatcagttatgattattcagaagtatagatgtatcaaatgatagaaatgacaaggaatggctgggattacaggcgtgagtcaccgcgcccggccaagcccttggcattttatctggaatagcatctgtaaactgaagtgtttgacctctgttttcttctctcctctttcatctgtttctgattcgttggctggcagctgcacctgtggggggacctctcatgcagacttgcacatatgcagggagtattgcactgaagatctttgctggaccttcttctcttcagaagataattttcaaaagggagcaatgctgtgaatgcagcttgcttctctctacagattgagaagtccagcttcaaaagttacttgccacttaagcaaggaacttgtcaagagatcatggttcatgttactgaaaagactttaaggatttgtaaggttaatccatagattgctgagaacaatggaaatatttttatttttacagattttgcacttctgaattcaggttaaaaactaacttgtatttagtctgcttagaggactgtgacttgaaaatttttatataccaatgagctttttggtagcgtccacaatgtttaaaatatttcataggcgagatccgtgttctccatttattaatgcattgtagaccaatttaactgctgtgtttcaggaaaattcttcctagtttaataagcaagctaaaagttttattttttatatttagtgcttaatctttgcctcatgttatgtaaaattagcctgcagatattttctctcaattctgtagactctcgcaagataaacattcaaacagtgaaacaaacaataaaataaataaacctaaggatgtcgtattgttttactctctgtctcagaatttgtattttgcctttctgccttttttatgtcaaaatagatgagattgtgtgcatctataaattgttaccacagtatttttgataatgaataaggataggactatctctgtgattattaaaatacatggaattatccaggaaattttccttacaaggaattaaaagactcctgtatttac

SEQ ID NO: 587980 - DNA, 450 bp, Homo sapiens
gcgctaacccggtagagcggctgctacagaagtacatcagaaagacaatcagtgtaggaaagaggacaacaatagctgcttctacctccatgctagtattagggtcaagatcatcacactctgactcctcggaactgttcgtctccttgatgggcagcatgaggaagggggaagaaagagaacatagttagaacacaggcagcgttggctagagagcagggagaacttgagagaagcacggacaatgggaaatcgggcagagaaaaacgaggtgctgtaaaggtggggtgcatatcgcctagcgcagcagcatgctcttttcgggaagaggaggctgggattgtgtacagccgctcatctcacaggaaatagcaatggaagcaaccaaatgatgcatgagtgctattgactttacatcgttgtcttctgtgcagctggactccccacatg

SEQ ID NO: 587981 - DNA, 334 bp, Homo sapiens
ccaagatcgcgccactgcactccagcctgggcggcagagcgagactccgtctcaaaaaaaaaaaaaattactttttaaaacctcccaagatggctcctgaagagccctcaataagtcccctaattcatccgggaaaaacaagactacagtaaaactattccaggaaagctactcaaaaatatactacaggaagtgaattcccacataatttaattacctcactgtcaaaaacatcacttatttatcaagaagctcccaagattgaaaactaaaaactgcacattaaaaactgcttcctctatatgacaaaattctacactggccaaaaagggtt

SEQ ID NO: 587982 - DNA, 472 bp, Homo sapiens
tactcggggagggacaaggtgtgtgggggttgaggtgggaggagcgcttgagcccaggaggtggaggctgcagtgagccatgatcacactgctgcactccagcctgggatacagagcaagattctgtctcagaaaacaaaaaagataaaaacatgaaattaaaatttctcttctgtggccgggcgcggtggctcaagcctgtaaacccagcactttgggaggccgaggcgggcggatcacgaggtcaggagatggagacaatcctggctaacacggtgaaaccctgtctctactaaaaatacaaaaaaaattagccaggcctggcggcgtgcgcctgtagtcccagctgctgggaaggctgaggcaggagaatcgcgtgaacccgggaggcggacttgcagtgagcagagatcgcgccactgcactccagcctgtatgactgagcaagactccgtctcaaaaaaaaaaagaa

SEQ ID NO: 587983 - DNA, 105 bp, Homo sapiens
ggccttctgtaggcaagctggaggtcccccgctcccgggaggacaccatattgatgcccatcgttagacgctagcacatcactcggtacagcgcactacagccca

SEQ ID NO: 587984 - DNA, 358 bp, Homo sapiens
ttgcccttttccctaaaaaaaaaaccccccccctggggaaaggggggggaaacccgtcttttttcccaccccccaggggggggggggttggaaccccaagggtttataagcccccccaaggggttggttttgggaaaatggggggggcttttcttttggggtcgggggggaaattccaaggggaaaatgttggggggccgctttcgggggtttgaaccccccttccccggtttgggggacggggggaaaaaaagttttttgggggatttcccaaattggtttttttggtcttttttgccccccggcgggctttgaaattttgttaagggaaaaacccatgaaaaaaaggttttcttta

SEQ ID NO: 587985 - DNA, 198 bp, Homo sapiens
acctaatcaacagtgctagttagggttcttcaacacccctttttagaccttatgcacttcattacatgaacaaaagcaatttctaatgatttacttcaatatttttggtggtcaatattaaccttggtggggtaacattgactaacatgtgtttaataacaatcagtataggcataaagggtttttgtctatttgtta

SEQ ID NO: 587986 - DNA, 631 bp, Homo sapiens
cccagttccccaacccactcccttccaaaacaaccagctccaatgactctggtctgggaggtgaggcttcccaaccaggaagactactttaaatgaaaaaaagaaatggaataataaaatcaggagtcaaaattcatcggtcttcaagcccctctttctagccttttctactaactctctgctgggtcaaggttggtgccccattacagacacaggggctaaattagccaacccaccaattggaaaactcagccgaatttttttataccactctgatgtcagcattttttccatctgtggggggctttttcctctttttttccattctccccaaatatttatcctggcttcaaaattaagaggatattttcagatggttttaattcagtgtggcgattcctcatctgattcaggctgtccagtcaggcccctcccatttaaggagctgagccttcatttatgaggagattctcatctatgaaatggatcctcattgtgtaaatcttttttcttcccattttcacaaagctgtaaagaaataatccatctcaaccttaccctttttctctggagtcagggggggtcttcctcgctccatcttacacagacctgagctggacctccaatggtt

SEQ ID NO: 587987 - DNA, 131 bp, Homo sapiens
cggttgggctcgttattctggctctcttcttttctttctggaccaccccctctttgtccaggttaccccttcatgtatcaatgctctttatactatggtaatgccaggattccaacagcaaatgaatactc

SEQ ID NO: 587988 - DNA, 102 bp, Homo sapiens
aatgggggccaaaataatttttaaatatagaagtatgccaaatgccttttcccctgagtaaaaaaaatttcagggccactgtataaatgggacatctgtgga

SEQ ID NO: 587989 - DNA, 235 bp, Homo sapiens
  misc_feature (204)..(205): n is a, c, g, or t
  misc_feature (213)..(213): n is a, c, g, or t
tattaagtttcttcttggtaaatatcctattggtggggtaagattttactatatctttagtttaaaattctgctgtgtagactctggcagctgcctctatggtgacgaaacaagctttttttttttttttttttttttttccacataaaacgaggagaaattgggtgttcccccaggcatcattctagcgcattattctataanncaaggcgngcaaataatttctcagggggtc

SEQ ID NO: 587990 - DNA, 1034 bp, Homo sapiens
gctcttcccggctccagctccgccggggggctccagcctttgctccccctcccaaagtcccctccccggagcggagctgcacctagggtccctcttcctgtccccccagacccagctacccgttcagaccagcagcctcggaggggcaccccccctgccagcctgcctccctcccgggtgcagccctgcccagggttcctcaggcatgaatctcttccgataccatgggagacctcatcccacctcctacgcacatcatcttgctactgctcaacaatctggaagtcccgctcgtgcgcccggaatttcagaggcacgagccagggtcctgtattgctgtgcgtgctccactgtcgccgactagttcctggcacccttcattgtcacgcacagcgtacagtctcaggctccttaccaacccacgttctactgaacgcgtgagctctaccagtaggccctgcatccctttcagccaccggctcttgggcccgcactgaataggccaacgcttaacgcaacggcctaacctataccgcagttggcgaaaccgcgattggacgcacccggtacccggcaacggtgtgaggcttccccgtgcagcaccgttgtccgccagcaaggaccaacgttccatggggaccagatgaccactagggctccgaagtaccattggacgtttcgaacacacccttccattggtgccggcaacgtcgcatccatgagaaacgcctattccgtccgcaattctgttacccttgtcaaggctccacggccaggggcccaagtcccattagcgcaccggccaaacccgctggctcctcaacgtggttgggacagcgcaaagcgacacgccggggtcggtaacggcgccgttgcccgcatcccgcggctcactcccaagtacgccgatcataccgagttgctgtttcggcgtgcccttacggtcgcgcctttacatcacccagacaacctgccctgcctaaaatacctttcattgccacacctgggcagtccctggggccggtcgttgccaa

SEQ ID NO: 587991 - DNA, 485 bp, Homo sapiens
  misc_feature (10)..(10): n is a, c, g, or t
  misc_feature (58)..(58): n is a, c, g, or t
  misc_feature (87)..(87): n is a, c, g, or t
  misc_feature (346)..(346): n is a, c, g, or t
  misc_feature (450)..(450): n is a, c, g, or t
  misc_feature (485)..(485): n is a, c, g, or t
actgaatgcngggggcagcagaggcagctctggccattggggcagccgcacgactgtngggggcagtcaggaccgggaagccttggnagtgtagggtgccgtgaccagggagggtctgcttcttgcaacagcccctttccctttgcacagaaaataatctgaggacaagaacagtggcgtggctggaatggctggggctgctcagggcctctgttgttcagctgggcttgcacctgaggctgacccctggtctctgagacaagctgatggccatcagatgccacaacccctgtctggacaggccccgaggacgtgtgtcaccgcaagagctcaaagaggattggtngagtgtctgggtcagaggtcaggacccaccttgcatcagcgggcttgggtttagtcatttacctaggaggttgagggtcatcctggcttaagtccagggcatancacagcaaaatctaccctttgggaagttcataaan

SEQ ID NO: 587992 - DNA, 1484 bp, Homo sapiens
  misc_feature (751)..(751): n is a, c, g, or t
tgaaataaaactcagtatttttgtctccccaccatttccatgtctgaccaccgctactactatgtcctatcataacattccatacatacttaaaaccaagcaaagggtggagtgccactctttaaaacactaacacaggcattttggacaagacatccttcgagaaaagaggacagacactcctaaaactaccaaaaggacctagatcgtgttcatcaaagacaatatgcgtcacaacactgccagccagatgttcaacaggcgtggtgctctatcccacgatggacaccccgaacttcatcacacttatgtgaacaacttgcttccagagatgacctgtaccacagaaggctgatacaagcaatctcctgagcacccgagaggacaagtctactcttgagtagaacaatagctttcaacactaactctacgttgagactgcgtgtttaccgatacctctagttcagcaagtatcgacgtgctagaccatgattggaataattagtagaggcataggtcccatatacatgtcagtaacacattgcaagagtgtcttgcaagaaaacaacatatgaccatgttaagcccggcaagcataggacggaagtcaagaccactgaaccagcatcccggataggccttgccaacaagtatgagcgcaacatgaaaagttggcagcataggaaccccacaaaacactggacacatggattgccccaagaagaggtaacccaaggcaaggcaatagccngcaacaccgaccgccaaccacacacataaaggaacggcggagtgcaccaaaacaccgacgaccgtgcgcacaatgcagaacacacagactaagacttcgacaatgaaaccgacacacaacgcaagccatagaggacaaccgacccgagcccagagaataccaacagaacacacacaccgccaacacaacgccgatgaggcacagcgcggacgacacaacacaacagagacgagacacaaatgacggagcaaagctcacaagcaaacccgcggccaacgacacccgcacgaagacagacaacccgacatagacacctccagcgccctcacaccaacgaacgccgaaaacgagaaacaacgcgactaaccaccccccccacggcccacaccagcacatagcacaacgcacaaggccaacgcgaacatgaaccagagagtacgcacccgaggacgcagcgacgaccgccggaccgcagagacaaccagggacgcacagagaccagcgacgcaaaaatgaacgatccgaggaccacgaccacgacacaccagcctcggctcacaccaacaccgcggccccgcgccgacacgtcgcaccctgccggaccgacatcacacccgagcaccgacaccggccagcacagcccccaacgcaggcatacaccacaagtacccgccccgcgcacgacgcaccggaccccgacccacacaggaccacaccgacatcggacacaccc

SEQ ID NO: 587993 - DNA, 148 bp, Homo sapiens
gtgcattgctttaattgcttgtcctggagactctctgaggcaggaggtgatgcattgcagaggctgcacaggcccctggaggtgggaatgaactgacttggcctatgtgagaaatgggctaacaagtgtggctggagggagccgcgcg

SEQ ID NO: 587994 - DNA, 150 bp, Homo sapiens
cagggactgacgagtctcacttaccccaggactccgctatgacaccggcctcggcccctacaagacacagatctctcgtcagccccaaagccgggggctggcagccacggatggtgtcccagcaggcggaagagggcctcaccttacccc

SEQ ID NO: 587995 - DNA, 256 bp, Homo sapiens
cgtgatctcatacaggagtgatgggcgatgagatgctttattaagggttcttgtttcaccatggcagtgcacttgtatcaaccgtatgactcaggaaaaccccttcgttaaggtcctccttcacaaagacatagagtgaaactccctttacatgtctgtatttgtacaacactttaggcaacttgcactgtcagtgttaaaatggaaaacaggaaaatggaaaaatctgaccaattctgccactttgagactttca

SEQ ID NO: 587996 - DNA, 529 bp, Homo sapiens
gcacgaggggaagccctgtcagagacagactcgtagagagccagacgcagacctgtggagagacgcgcttagagacaccagcgaggagctgagatatccaagacaggccccccaggagttcacagcggcctctggtaacttcttcttcgagcccatatctagacattaacaacttcctgggcaagggcaaagagagggcccaccagaaacgcaccagcaaacgggccccgcagaaggactggagccagagaaacgaactctttagaaacctctgagacgccctggtggcacccacagactgtgaaggcccagccaggatttcaccccacactttttccttcttcccaattactctcctggatcaaagtgccaattagagcccacataccctttcttgagacaaggattttctagagaaccatagtgcttcctgagtttatgggtgaatgtgtttccgtgcttccgcaacagcctttggcacactgtctgtgacatagctggcctgtgccatgtcacgatcatgggaccg

SEQ ID NO: 587997 - DNA, 1103 bp, Homo sapiens
cagatatcagcagagtggagcggggctgggagacaaagcgctgagggagctcggtacgccgccgacctcgcacccgacagccatcgcgcccggcggcgaccgtccccgagagaaccatggagtctggcagtaccgccgaccagtgaggaggcacgcagccttcgagaatgtgagctctacgtccagaagcattacattcaagcgctgctcaaagattctattggtgcagtagtgcactgctcgacctgagagacccatggcattcctcagggaaatactttgagaaggttggagaaggacggaggcaaaacagattcagaatctgcagaacagcaggcactcgtacagactccaagggcaggatgcagcatttctcctcctccagccaacccagtgggttcacacggtcagcgcaggcgacgcaggtgctatcagcgctgcaggtctaccacggaggcaagatgcggaatccatatgatagaaaggttataccaaaagattacaaagacaatggacgattaagccaaagcattgaaaagaatgtgctgatattccaatcttgatgataatgagagaagtgatatatagagatgccatggtatacgagtctccctttatcgcagggagagactgtgattcagcaaggtgatgaaggggataactctatggtgattgatcaaggaaagacggatgtctaagattaaaatgaatgggaaacaaagctggagcaccgcaagcacaccatcgaccaacatgcagcagaatgagaacacgcaaaagagccaatgccacaccaccagaccaaggtacaaggaggcatcacacaaaagaacgagaaccacagaagccgagacaacggaaacagaagcgacccgagcaccaccaacaacgggcacgcgaaaaccagacgcaagaagacgagaagaaggcgcaaataagcgcacagagcaaagacacgggacacgacggaagagagggagcggcgacagagcaagagacaagcggaggaggacgatgccccgctgcccggctagaaaagaagacaaggacaggagaaaaggcgacgagagaaggaaggagagaaaaaaaagaaacgagagaag

SEQ ID NO: 587998 - DNA, 161 bp, Homo sapiens
cataccacagctgggacccagccttcactgatggcatgcatccaaggcggcactgggagacaggagaggtgggttaccacaaggaggctggagtaagcacaagggcatccttggtcagtgaggactcagctgcctcgaatcccaaggccttcaccaatgac

SEQ ID NO: 587999 - DNA, 316 bp, Homo sapiens
gcggggcgacctagaggatccccccaacacagtcgtacggaaatacatcatattaacattattcccacaaaatgttaagctcaatggtttgactataagagtcaacaattactatttggaaatcttcttacggaacatttttataatctaatccggttttaattgcatgattatgcttatgtgatgaaccatcccatgattctgatattgtatttctttcccagtattaacatgtgtattgtgtggccaactctgatttgtaccccggtattattggggtaaatgattcaaactggttccctaacaatttaaattg

SEQ ID NO: 588000 - DNA, 219 bp, Homo sapiens
ctgacgcgccactatgtagcgggtttcgggcgggccacgcgtgcggaacaggaacccaaccccagccgaccttgagctccaggagttcgtctcttacgtcttccggaggtaaagctgcctaagttcttaggccaggtgaaaactacaggaaaggcatttaggctggaatgtcctctgctggtattcaatgactaagcaactatcctaagtaacatggga

SEQ ID NO: 588001 - DNA, 145 bp, Homo sapiens
caccaggcgataaaataccctctgactgtatttgatagccgatgtttccgctgccccctccacagctgtgtgagctgccatgccttccaacccttcatagccaaggccgtcacaaggtcaaatgatgtggtgtgtccgctgcccc

SEQ ID NO: 588002 - DNA, 1246 bp, Homo sapiens
ctgcggggcggggagctgcatggagcacatccgcaagaagcggcacttcagcgagtcggaagcaagccagatcctgcgcagcctcgtgtctggcctgtgagcttcatgcactgatggagtgcgggctgtggttgcacctgcgacctcaagcctggagaacatccatgtactgcctgacagacactgccctggtggcccctggtgaaaatcatcgacttcggggattcagcgctggtttgcgtgcctgcagatgtccctggggttgcccatgcatgactgcacctgcattcactgcttgcatgtactgctgcacccacgaagcttgcttgtgctgcaggcatgggggctacagaacgagtcctgcagaaccatcattggagccttggtgccgtcacttcttgtacatgaatggcttgtctggggtgcatggtcccccttccagtggtggcctctggaccatgggccgggcagatgccacgggctggccctgagatcacatgttgcaacaatccggcgacgggggcggcttcttccacttggactgtgggaaggccttgtgcaggggtggtaatcccgcacgtgaaggccaatggacgcttgtgtccctgaggtgtgctcacttggaccaggttgggacccccgggcatatgctgggcttgaaaagcatcggatgggggacattgcaggggtgcaagaactccggttgggcttgcagaggacgggccaagatggctgcagcatcccatcgggccacagcacggacatcgcgttggactgggcacccggaaaggcttgccataccgacgttccgctccttggagacacccggacatgatagccagacatacgaggggattcattacaaacatgaccaaaccaattttcaattgggcgcacattatcaacacccggtggtggcccacaggcaggggagacaggagggctgttcatttaccactttgacaaacgaaatggacgggttcgtgggacaagaaaaacaggggaaaagccacaccatgattgtgtgagaccacaaaatcgactgcgatcgtgtgaacacggcacggacaaagcgacttgggcagacgaacagccacagccagacacacctgagaacaattactccagtcgggcccgggggggcgctctcccacagtttgacagacaccaaggagacaaaacaccggggtgtgagccggggagtgagcaacacaggagacgggccggagacacaaaagatggggag

SEQ ID NO: 588003 - DNA, 85 bp, Homo sapiens
  misc_feature (11)..(11): n is a, c, g, or t
gccttgcgcgntcagccctgacaaaggtcagctagccccttgaggacatcagctttggcctcagggtcctaatggcagcagaacc

SEQ ID NO: 588004 - DNA, 371 bp, Homo sapiens
gcagaaatttttttggaaataatccaaagcagttttcctgagggggtcagcctgtcagtgaaggggccccctgaagaagccttcaaggggcgattcaaagttcgcccaaactgggaaaaatttgtgggcaaagtccaagcaccccccgtaccccctttcatgccagcaggggtcatattgagggccaaaaaaaagagcttttgggggggttagggttcatcaggagaccccccccttagtttttatagggccccattcccaaagccagaaaggtcctccctcctttgggggtgggggggacttgccattttttcccccttccctatgggggaagggttgtttttttccttttaataaaaatttgcggcaga

SEQ ID NO: 588005 - DNA, 329 bp, Homo sapiens
tgtcttaaggccatttattttttttccctttttaagtaattttacactttagtatctatttcagagtcatatttaaaactatttattagtgactacagtacatgagacaacaaggttcttcgattccaattccttcaaaggttaatgataatgtggtttatcctgtgccttaatagtaaggcaatctaagatatttattttgaagtttccatatgctgcactttaaagaaagggactttagatgtgaccctgtgagactatgtattcatgtcctggcataaattatttagtaagtctagatgtagcgtattaaattctaacctatccta

SEQ ID NO: 588006 - DNA, 1636 bp, Homo sapiens
  misc_feature (88)..(88): n is a, c, g, or t
  misc_feature (1156)..(1156): n is a, c, g, or t
tgccccccctcccctaaatactaaaggaagcgataaatggagagagagagaggagagagacgacagcagcaaccagcaaactgtgtgntcacctatttaactacagaccgtctattacttcactactcatctttgtgggttgggtcattgtccattctgttcatagattctgtgtggtcactcacactagtcttgtcatttttgcttcgtgttattatagccacccccgtgtaacaaaagtttgttatgaagtgtaacggccccctccgtctacaacagcacatattcatttgctgcgggcaccacatgttgcatccggctcgagttagttcaccacccgccgctcctctccattcgtggcggtcaccaccacagatggtgatagctgcccgccgtcggagagaaaggaagagctggcgagattgtgtatatctctttcggagtggttaccacctcagtgagagacaacaacgggggttcaacacgtgggggcccctccaatatgatgaagtggtgtctccgcctgtcgtcccccctatgggctcccagaattttcctccgtggcccccccgctctcggagaggataatctttgcaaaaaagcgacattggggtcttaaaaagaatcccccttggagagaagattatttgctcctggaagggggaaaaggacccacaaaaaagcgcctccccaaggggagcccgcccactttggagtaacctctagagaaaaatcgaggtgttggggaaaaactcctaaatgccccctagtttcctcttcttcagaaggaaaaactcccacgaaatgttgggaacgcattataaagagaatagacctttgtggggacggggttaacacactgctgtctcctctctcgagaagaatataatagggaggagccccccttgggaagaataaaagtcttggctatggagatgtagacaacagagttttcgaaaaatagggcctgtgagaaaagccccaccccccaagagatggggcctggaacacattgagaggagactttcccaaaagcctatacagagaagagatagggagatactgtgagaagaaaaaatttcgtttcacacacccacacttgtatatcacgccccaaaactctctatatgtgagaagttgtcacgcgccccgtccncccgcacacctttggtgtagaagaggggagaatccacgccacgagaacaaagagttgagagtctgtatagagacacctcgagtttctcggctaagtgcctcgggaaataattgtgaaaataactcggagactcacggaaacctttgttatggaaaaaacattgaaagacaacctaaagttctcgagaatgtaacattggaattcttcacccccacgaagtggagagttgaaaactgctatatagcctaagcggctgtttactgcttttcacttagcaccttgctcaccacagttctttgggtgggggggagaaagaagaacttggccactcttaaaaagcgggtataaaaacctgggttatagggtgtgtgttcacccttccaaatgttctatttaaccactgggtcatgtgcatctggtgtaggaagttttttctaccataaatgaccacccaaaaatgtttgcttatttaccctggga

SEQ ID NO: 588007 - DNA, 234 bp, Homo sapiens
tagacacggacttactctgtcaaataggctagggtgtagtggtgcgatcgtacctcactacagcctcaaactcccaggcccaagggatccgactgcccctccctcccaagtagaaggatcactggagcctgggaagtcgaggctgcagtgagctatgatcacgccactctactgcagccttggtgacagagtaagacgctgtgaaagaaaaagaaagagagagaagagagagaa

SEQ ID NO: 588008 - DNA, 1004 bp, Homo sapiens
  misc_feature (630)..(630): n is a, c, g, or t
  misc_feature (652)..(653): n is a, c, g, or t
ggggtcaaaaggagagttgctcttcatgttcccagggtaactcacagtttaaccatttggaatgagaacactagcttttaactggaaataaaatttggtataaaacggtcataccttaggtttaaaagccttaaaactaacaaatagcctaattatgtaagtgaatgattatgcacctcaatccctctaggataactaaatatggagaagagttcattgagacttggaaggagccaaaggagacaggggagccccaggttttcctggcctcccgggcagaaaaggggccatgggagatgctggacctcgaggacccacaggcatagaaggattcccagggccaccaggtctgcccggtgcaattatccctggccagacaggaaatcgtggtccaccaggctcaagaggaagcccaggtgcgcctggtccccctggacctccagggagtcatgtaataggcataataaggagacaaagggtctatgggccaccctgggcccaaaaggtccacctggaactgcaggagacatgggaccaccaggtcgtctgggagcaccaggtactccaggtcttccaggacccagaggtgatcctggattccaggggtttccaggcgtgaaaggagaaaanggtaatcctggatttctagganncattggacctccaggcccaattggaccgaaaggaccacctggtgtacgtggagaccctggcacacttaagattatctcccttccaggaagcccagggccacctggcacacctggagaaccagggatgcagggagaacctgggccaccagggccacctggaaacctaggtgtgggactggcagcattgacttggatcactaggaagtggttgaaccaaaatacctgtaaactgctttggaaacagctgatacaacttcacagaaaatgttgaacatgatagtggttttcacaatcagtcttaggattgagctcattttacccttgaccagcaaataaaagaccttggaatct

SEQ ID NO: 588009 - DNA, 368 bp, Homo sapiens
  misc_feature (353)..(353): n is a, c, g, or t
ctgtggtcctgtctaacgcacgggcaggggagggcgcagcttccaaacccacagttctccctccaccaactcccaccagatgctcctacagttttttttgtattatgtttagtttttttttgtgagacacagtcttgctctgttgcccaggctggagggcagtgtctcgatcttgactcactgcagctgatgcctcctgggttcaagcgattctcctgcctcagcctccaagcagctgggattacaaacgtgaaccaccacgcctggctaattttggtgttttccgtagagacggggctttgccacgttggccagattggtcccgaacaccttgactcaggtgatccaaccgnctcgggctcccaaag

SEQ ID NO: 588010 - DNA, 3281 bp, Homo sapiens
  misc_feature (630)..(630): n is a, c, g, or t
  misc_feature (652)..(653): n is a, c, g, or t
  misc_feature (1788)..(1788): n is a, c, g, or t
  misc_feature (3112)..(3112): n is a, c, g, or t
ggggtcaaaaggagagttgctcttcatgttcccagggtaactcacagtttaaccatttggaatgagaacactagcttttaactggaaataaaatttggtataaaacggtcataccttaggtttaaaagccttaaaactaacaaatagcctaattatgtaagtgaatgattatgcacctcaatccctctaggataactaaatatggagaagagttcattgagacttggaaggagccaaaggagacaggggagccccaggttttcctggcctcccgggcagaaaaggggccatgggagatgctggacctcgaggacccacaggcatagaaggattcccagggccaccaggtctgcccggtgcaattatccctggccagacaggaaatcgtggtccaccaggctcaagaggaagcccaggtgcgcctggtccccctggacctccagggagtcatgtaataggcataataaggagacaaagggtctatgggccaccctgggcccaaaaggtccacctggaactgcaggagacatgggaccaccaggtcgtctgggagcaccaggtactccaggtcttccaggacccagaggtgatcctggattccaggggtttccaggcgtgaaaggagaaaanggtaatcctggatttctagganncattggacctccaggcccaattggaccgaaaggaccacctggtgtacgtggagaccctggcacacttaagattatctcccttccaggaagcccagggccacctggcacacctggagaaccagggatgcagggagaacctgggccaccagggccacctggaaacctaggaccctgtgggccaagaggtaagccaggcaaggatggaaaaccaggaactcctggaccagctggagaaaaaggcaacaaaggttctaaaggagagccaggaccagctggatcagatggattgccaggtttgaaaggaaaacgtggagacagtggatcacctgcaacctggacaacgagaggctttgtcttcacccgacacagtcaaaccacagcaattccttcatgtccagaggggacagtgccactctacagtgggttttcttttctttttgtacaaggaaatcaacgagcccacggacaagaccttggaactcttggcagctgcctgcagcgatttaccacaatgccattcttattctgcaatgtcaatgatgtatgtaattttgcatctcgaaatgattattcatactggctgtcaacaccagctctgatgccaatgaacatggctcccattactggcagagcccttgagccttatataagcagatgcactgtttgtgaaggtcctgcgatcgccatagccgttcacagccaaaccactgacattcctccatgtcctcacggctggatttctctctggaaaggattttcattcatcatgttcacaagtgcaggttctgagggcaccgggcaagcactggcctcccctggctcctgcctggaagaattccgagccagcccatttctagaatgtcatggaagaggaacgtgcaactactattcaaattcctacagtttctggctggcttcattaaacccagaaagaatgttcagaaagcctattccatcaactgtgaaagctggggaattagaaaaaataataagtcgctgtcaggtgtgcatgaagaaaagacactgaagctaaaaaagacagcagaactcgtatttttcatcctaaagaacaaagtaatgacagaacatgctgttatttaggtatttttctttaaccaaacaatattgctccatnatcttagtacaaagtttcaatttgtttccccacaaaacaaagcaattctttcaagtcagttctgtgatctgggtctctaatctgtgctgtttcaaagttctctgtggcaacagcgaactatcacaaatatcaccaaaacctattccacttacatccaaaggcactgctcatacggtgattgtatgaagtttgaatgcagcacgttatgaaatatttggccgctggattcccacatttgtcttctttctgtctttaagactcagggaggctaaatcagtgtttgattccccgccgaacccttcctgaaacttcaagacctggtagggaagagaaggggcatgtggtatcctggagcattgtgtatagaactggattttcagacctgctgaggaccgtaaggcctgatggaacacagaactgaactgaggttcatggattttccaggactgtttcaaacatgcccattactaacggcaaaagggggattccctgatggaaccataatacccttggaaatactgtatggttttgttttgttttgttggtttttaaagatttttgtttgtttattgaattcatttcactgtagctctaaaatctgcttgtattccaagcatataaaattttcccccttagtgaattagttttaaaatgatattgttatatacatactatgaaatatgtataactttaacttctgttttaccagcatacccacacaaataacaagaatactacttatgaaatgtgcactttatcctcattccataaatgttggtgcataccttatgtaagggagcagttcaataatccatgaaagaacttaaggcatttgttggtttatcagactcggaatctattttctcattgctctgaatatgtcatcactctaggttttacagatttattcctttgttacttctctaattcttcctttgtaaaaaaaaaaaaaaagcaacactttttatgttatatgttgttcttacaaaccatactgaaagagtccattgtttaaaaatcttaatgtatcaaactgtataacttggccactgtatgtcttaaaacctgcttttcaatgtgttgatacattcccaaggttacttaattcaacttaactatcatgttattcagcaccaagcatgtcccaggcactgtactaacctacagagatgctaagagataatctcacatatacaagtagcttccctcccctctagttttttcttccttttcactgctgttatatttcatcatgataattcagcaggcccaagtaaaggttaaaaataaggtctgaataatagcagaaaaaccaacatctacnaaacattaaactagtgttatacttgatgataacactatttgatgagtcttagagtccagacacaaagagacaaagctttgaagatgctttttgatctacctaggtggagttggtggtgctgatatttttcaggctactgcttcaatctcttgctttgtgtgacatgccc

SEQ ID NO: 588011 - DNA, 206 bp, Homo sapiens
  misc_feature (18)..(18): n is a, c, g, or t
  misc_feature (34)..(35): n is a, c, g, or t
  misc_feature (67)..(67): n is a, c, g, or t
  misc_feature (78)..(78): n is a, c, g, or t
  misc_feature (89)..(89): n is a, c, g, or t
  misc_feature (122)..(122): n is a, c, g, or t
  misc_feature (153)..(153): n is a, c, g, or t
  misc_feature (155)..(155): n is a, c, g, or t
  misc_feature (172)..(172): n is a, c, g, or t
  misc_feature (185)..(185): n is a, c, g, or t
  misc_feature (191)..(191): n is a, c, g, or t
  misc_feature (195)..(195): n is a, c, g, or t
gaaagaagctctacctanctatactaatgtcccnncaaatctccttatcttataacattcacagtcncagcaacatantcactattgtnatatctatcttcagcaaacacacaactttatanccacaacgcttgagcctaatgcaatcatccncnggagtgaagagccaaanccatgcacagganactgcncttnacacgctaggc

SEQ ID NO: 588012 - DNA, 711 bp, Homo sapiens
  misc_feature (35)..(35): n is a, c, g, or t
  misc_feature (68)..(68): n is a, c, g, or t
  misc_feature (84)..(84): n is a, c, g, or t
  misc_feature (100)..(101): n is a, c, g, or t
  misc_feature (110)..(110): n is a, c, g, or t
  misc_feature (116)..(116): n is a, c, g, or t
  misc_feature (130)..(130): n is a, c, g, or t
  misc_feature (139)..(141): n is a, c, g, or t
  misc_feature (166)..(166): n is a, c, g, or t
  misc_feature (214)..(214): n is a, c, g, or t
  misc_feature (224)..(226): n is a, c, g, or t
  misc_feature (251)..(252): n is a, c, g, or t
  misc_feature (268)..(268): n is a, c, g, or t
  misc_feature (271)..(272): n is a, c, g, or t
  misc_feature (281)..(281): n is a, c, g, or t
  misc_feature (292)..(292): n is a, c, g, or t
  misc_feature (307)..(307): n is a, c, g, or t
  misc_feature (313)..(313): n is a, c, g, or t
  misc_feature (317)..(317): n is a, c, g, or t
  misc_feature (332)..(332): n is a, c, g, or t
  misc_feature (336)..(336): n is a, c, g, or t
  misc_feature (340)..(340): n is a, c, g, or t
  misc_feature (342)..(343): n is a, c, g, or t
  misc_feature (345)..(347): n is a, c, g, or t
  misc_feature (352)..(353): n is a, c, g, or t
  misc_feature (360)..(360): n is a, c, g, or t
  misc_feature (368)..(368): n is a, c, g, or t
  misc_feature (375)..(376): n is a, c, g, or t
  misc_feature (380)..(380): n is a, c, g, or t
  misc_feature (382)..(382): n is a, c, g, or t
  misc_feature (387)..(387): n is a, c, g, or t
  misc_feature (389)..(389): n is a, c, g, or t
  misc_feature (436)..(437): n is a, c, g, or t
  misc_feature (452)..(452): n is a, c, g, or t
  misc_feature (629)..(629): n is a, c, g, or t
  misc_feature (682)..(682): n is a, c, g, or t
gcacggcagggaaacgaagagcccccgggagagcngaagagagaagcacagaggacgggagcacaaancgggggggaaacaggnggagaacgagggcaanngaagggggngccggnagaagccgagggangggaggcannnaacaacaaacgagggggagaaagancccagaggccgcaccagacggccaaaggggacgaggacacaaaaaagnggagaacggnnnccaaaagcagagggccaaaaaaaannagggcaagggcagggncanngagagaaangggcccccgcnccccattacgacgangagganattnagggggatataaaangcgngganannannncacgnncgaggcngggaccgngggcaannacgnanacgcngngactcagcctcgagcgatataagggggataaatagacaacaggaacnnccgcagaggggttgngggaagagtatgtcattcaagggtgtgtagaacaaagacaagcacatggtagtgctcactaattagcagctattattcatatcacatcttgtatgtgaaaacaatttgtactttagaaattcccccataccattatttattatttttttggaaggcaccagccaaatggctcctatncagtgaaaattatggagggctgaccaactgagaatattgaatgtgggtaacantagcttttctaagatggacagttttttga

SEQ ID NO: 588013 - DNA, 3189 bp, Homo sapiens
  misc_feature (630)..(630): n is a, c, g, or t
  misc_feature (652)..(653): n is a, c, g, or t
  misc_feature (1788)..(1788): n is a, c, g, or t
  misc_feature (3093)..(3093): n is a, c, g, or t
  misc_feature (3103)..(3103): n is a, c, g, or t
  misc_feature (3118)..(3118): n is a, c, g, or t
ggggtcaaaaggagagttgctcttcatgttcccagggtaactcacagtttaaccatttggaatgagaacactagcttttaactggaaataaaatttggtataaaacggtcataccttaggtttaaaagccttaaaactaacaaatagcctaattatgtaagtgaatgattatgcacctcaatccctctaggataactaaatatggagaagagttcattgagacttggaaggagccaaaggagacaggggagccccaggttttcctggcctcccgggcagaaaaggggccatgggagatgctggacctcgaggacccacaggcatagaaggattcccagggccaccaggtctgcccggtgcaattatccctggccagacaggaaatcgtggtccaccaggctcaagaggaagcccaggtgcgcctggtccccctggacctccagggagtcatgtaataggcataataaggagacaaagggtctatgggccaccctgggcccaaaaggtccacctggaactgcaggagacatgggaccaccaggtcgtctgggagcaccaggtactccaggtcttccaggacccagaggtgatcctggattccaggggtttccaggcgtgaaaggagaaaanggtaatcctggatttctagganncattggacctccaggcccaattggaccgaaaggaccacctggtgtacgtggagaccctggcacacttaagattatctcccttccaggaagcccagggccacctggcacacctggagaaccagggatgcagggagaacctgggccaccagggccacctggaaacctaggaccctgtgggccaagaggtaagccaggcaaggatggaaaaccaggaactcctggaccagctggagaaaaaggcaacaaaggttctaaaggagagccaggaccagctggatcagatggattgccaggtttgaaaggaaaacgtggagacagtggatcacctgcaacctggacaacgagaggctttgtcttcacccgacacagtcaaaccacagcaattccttcatgtccagaggggacagtgccactctacagtgggttttcttttctttttgtacaaggaaatcaacgagcccacggacaagaccttggaactcttggcagctgcctgcagcgatttaccacaatgccattcttattctgcaatgtcaatgatgtatgtaattttgcatctcgaaatgattattcatactggctgtcaacaccagctctgatgccaatgaacatggctcccattactggcagagcccttgagccttatataagcagatgcactgtttgtgaaggtcctgcgatcgccatagccgttcacagccaaaccactgacattcctccatgtcctcacggctggatttctctctggaaaggattttcattcatcatgttcacaagtgcaggttctgagggcaccgggcaagcactggcctcccctggctcctgcctggaagaattccgagccagcccatttctagaatgtcatggaagaggaacgtgcaactactattcaaattcctacagtttctggctggcttcattaaacccagaaagaatgttcagaaagcctattccatcaactgtgaaagctggggaattagaaaaaataataagtcgctgtcaggtgtgcatgaagaaaagacactgaagctaaaaaagacagcagaactcgtatttttcatcctaaagaacaaagtaatgacagaacatgctgttatttaggtatttttctttaaccaaacaatattgctccatnatcttagtacaaagtttcaatttgtttccccacaaaacaaagcaattctttcaagtcagttctgtgatctgggtctctaatctgtgctgtttcaaagttctctgtggcaacagcgaactatcacaaatatcaccaaaacctattccacttacatccaaaggcactgctcatacggtgattgtatgaagtttgaatgcagcacgttatgaaatatttggccgctggattcccacatttgtcttctttctgtctttaagactcagggaggctaaatcagtgtttgattccccgccgaacccttcctgaaacttcaagacctggtagggaagagaaggggcatgtggtatcctggagcattgtgtatagaactggattttcagacctgctgaggaccgtaaggcctgatggaacacagaactgaactgaggttcatggattttccaggactgtttcaaacatgcccattactaacggcaaaagggggattccctgatggaaccataatacccttggaaatactgtatggttttgttttgttttgttggtttttaaagatttttgtttgtttattgaattcatttcactgtagctctaaaatctgcttgtattccaagcatataaaattttcccccttagtgaattagttttaaaatgatattgttatatacatactatgaaatatgtataactttaacttctgttttaccagcatacccacacaaataacaagaatactacttatgaaatgtgcactttatcctcattccataaatgttggtgcataccttatgtaagggagcagttcaataatccatgaaagaacttaaggcatttgttggtttatcagactcggaatctattttctcattgctctgaatatgtcatcactctaggttttacagatttattcctttgttacttctctaattcttcctttgtaaaaaaaaaaaaaaagcaacactttttatgttatatgttgttcttacaaaccatactgaaagagtccattgtttaaaaatcttaatgtatcaaactgtataacttggccactgtatgtcttaaaacctgcttttcaatgtgttgatacattcccaaggttacttaattcaacttaactatcatgttattcagcaccaagcatgtcccaggcactgtactaacctacagagatgctaagagataatctcacatatacaagtagcttccctcccctctagttttttcttccttttcactgctgttatatttcatcatgataattcagcaggcccaagtaaaggttaaaaataaggtctgaataatagngccaccatcncaaacattaactagngtatcttgatgtacctattgagagcttagggtcagcccaagggccgcttgtctttttgactactaggtggg

SEQ ID NO: 588014 - DNA, 118 bp, Homo sapiens
ggggggcacgtgtagcacaggacagggtgtgctgggcatcaaggttacagatcatgctgccctgtgtgacccaactggtaggattggccctaagaagccctctgacctgaccacgtga

SEQ ID NO: 588015 - DNA, 1386 bp, Homo sapiens
cggacgcgtgggagcggatcccgtccgagccccggtcccaagtaactgccgccgtccccgtgagccgccttgtgagtgtccccccgtcgcgccacataacgttgcctctttgcagtagcgaccacgatccccagcccggcaacgctcgtctggagccactaacagctgagaccggtgcaactggcgggatcgagggagggcgcagacaacgaacccagaatggagccaggcatagcttgggggaatcgaaagatcttatgtcaagtctctaaagactaggcttaccttgctatgcgcgtggacgctctagcaggataatgggtcaacattctctacgtcgctaccgatctgctccgaccctcttgatcgaacgcgcgacaagtattatcaccgcacgatacaccagggatgatgtcgaagcaagcattgggaaggcgagacacatataccctcaccaacacgagcatgatcctagcacctagggacatgagcaacagaacaaggttcaacggtctctgaggcaatcctggaggaacaccaaggcatgggacgcagggaacgccgcgagagtcgaacaagaacgcttgggacacatccacaatagtacgttagtacaggagtggagtacccccggtgacttggcacagtcgaattggctcgtactgcaccaaatacacccaataaaacaaggacttaccatttatggcaccgtgggccaacaggcacactgggtagacaggacgctaacaaagaaggcgacggccacggccaccaaccatacgtccaatatcgccacgtacggcacgaggtaaacaaggagcaggaccctggggccaagcgacagcaagaagaccggtcgggacactaaccccgagggaaaagacaacccacagcccacagtggcaagcaccgaaacacaacccacggttaacaggccataggtctcagctgggcaagaacacaatccacgaccaacagaacggggccaaccggacaccggttgaaacgcgccacaactcgatgaccatgggccacaccatagtcccacggacaggctttccccaaacggaaaaccgaacgtccccccagagacacttgggccaaccatagacgatgactacccaaaaaggagcacgaaaaaaaccccaaaagatatgtgggagacccgctcccaggggaaggcaaaaaccgaaccccacaagccaacggaccacggaagccacacatgtactgcaaaccaaaaaatgagactcaccccccatagcacactgagcacacacctatccacacatgagcacacaacacacgtaggaagcgaacaccgacgcgggggagacatccaatacaaacaaacgacagaacggtaaagacaaccataggacccaa

SEQ ID NO: 588016 - DNA, 3108 bp, Homo sapiens
  misc_feature (630)..(630): n is a, c, g, or t
  misc_feature (652)..(653): n is a, c, g, or t
  misc_feature (1615)..(1615): n is a, c, g, or t
  misc_feature (2939)..(2939): n is a, c, g, or t
ggggtcaaaaggagagttgctcttcatgttcccagggtaactcacagtttaaccatttggaatgagaacactagcttttaactggaaataaaatttggtataaaacggtcataccttaggtttaaaagccttaaaactaacaaatagcctaattatgtaagtgaatgattatgcacctcaatccctctaggataactaaatatggagaagagttcattgagacttggaaggagccaaaggagacaggggagccccaggttttcctggcctcccgggcagaaaaggggccatgggagatgctggacctcgaggacccacaggcatagaaggattcccagggccaccaggtctgcccggtgcaattatccctggccagacaggaaatcgtggtccaccaggctcaagaggaagcccaggtgcgcctggtccccctggacctccagggagtcatgtaataggcataataaggagacaaagggtctatgggccaccctgggcccaaaaggtccacctggaactgcaggagacatgggaccaccaggtcgtctgggagcaccaggtactccaggtcttccaggacccagaggtgatcctggattccaggggtttccaggcgtgaaaggagaaaanggtaatcctggatttctagganncattggacctccaggcccaattggaccgaaaggaccacctggtgtacgtggagaccctggcacacttaagattatctcccttccaggaagcccagggccacctggcacacctggagaaccagggatgcagggagaacctgggccaccagggccacctggaaacctaggaccctgtgggccaagaggtaagccaggcaaggatggaaaaccaggaactcctggaccagctggagaaaaaggcaacaaaggttctaaaggagagccaggaccagctggatcagatggattgccaggtttgaaaggaaaacgtggagacagtggatcacctgcaacctggacaacgagaggctttgtcttcacccgacacagtcaaaccacagcaattccttcatgtccagaggggacagtgccactctacagtgggttttcttttctttttgtacaaggaaatcaacgagcccacggacaagaccttggaactcttggcagctgcctgcagcgatttaccacaatgccattcttattctgcaatgtcaatgatgtatgtaattttgcatctcgaaatgattattcatactggctgtcaacaccagctctgatgccaatgaacatggctcccattactggcagagcccttgagccttatataagcagatgcactgtttgtgaaggtcctgcgatcgccatagccgttcacagccaaaccactgacattcctccatgtcctcacggctggatttctctctggaaaggattttcattcatcatgaaagcctattccatcaactgtgaaagctggggaattagaaaaaataataagtcgctgtcaggtgtgcatgaagaaaagacactgaagctaaaaaagacagcagaactcgtatttttcatcctaaagaacaaagtaatgacagaacatgctgttatttaggtatttttctttaaccaaacaatattgctccatnatcttagtacaaagtttcaatttgtttccccacaaaacaaagcaattctttcaagtcagttctgtgatctgggtctctaatctgtgctgtttcaaagttctctgtggcaacagcgaactatcacaaatatcaccaaaacctattccacttacatccaaaggcactgctcatacggtgattgtatgaagtttgaatgcagcacgttatgaaatatttggccgctggattcccacatttgtcttctttctgtctttaagactcagggaggctaaatcagtgtttgattccccgccgaacccttcctgaaacttcaagacctggtagggaagagaaggggcatgtggtatcctggagcattgtgtatagaactggattttcagacctgctgaggaccgtaaggcctgatggaacacagaactgaactgaggttcatggattttccaggactgtttcaaacatgcccattactaacggcaaaagggggattccctgatggaaccataatacccttggaaatactgtatggttttgttttgttttgttggtttttaaagatttttgtttgtttattgaattcatttcactgtagctctaaaatctgcttgtattccaagcatataaaattttcccccttagtgaattagttttaaaatgatattgttatatacatactatgaaatatgtataactttaacttctgttttaccagcatacccacacaaataacaagaatactacttatgaaatgtgcactttatcctcattccataaatgttggtgcataccttatgtaagggagcagttcaataatccatgaaagaacttaaggcatttgttggtttatcagactcggaatctattttctcattgctctgaatatgtcatcactctaggttttacagatttattcctttgttacttctctaattcttcctttgtaaaaaaaaaaaaaaagcaacactttttatgttatatgttgttcttacaaaccatactgaaagagtccattgtttaaaaatcttaatgtatcaaactgtataacttggccactgtatgtcttaaaacctgcttttcaatgtgttgatacattcccaaggttacttaattcaacttaactatcatgttattcagcaccaagcatgtcccaggcactgtactaacctacagagatgctaagagataatctcacatatacaagtagcttccctcccctctagttttttcttccttttcactgctgttatatttcatcatgataattcagcaggcccaagtaaaggttaaaaataaggtctgaataatagcagaaaaaccaacatctacnaaacattaaactagtgttatacttgatgataacactatttgatgagtcttagagtccagacacaaagagacaaagctttgaagatgctttttgatctacctaggtggagttggtggtgctgatatttttcaggctactgcttcaatctcttgctttgtgtgacatgccc

SEQ ID NO: 588017 - DNA, 269 bp, Homo sapiens
  misc_feature (77)..(77): n is a, c, g, or t
  misc_feature (153)..(153): n is a, c, g, or t
gtctagtggacggcagtagactcacattcatatcgggactcaaagcttacaggctctccaagattcccttgtggcancgcaagactgtgatggtggcaacgtggggcctgcctcttacaacgtagaagagactctgaccactctgcgatatgncaaccgtgccataaacattaagaacaaaccaagggtcaatgaggaccccaaggatgccctccttcgagaattccaggaagagattgcccggctcaaggcccagctggaaaaacggt

SEQ ID NO: 588018 - DNA, 3103 bp, Homo sapiens
  misc_feature (630)..(630): n is a, c, g, or t
  misc_feature (652)..(653): n is a, c, g, or t
  misc_feature (1610)..(1610): n is a, c, g, or t
  misc_feature (2934)..(2934): n is a, c, g, or t
ggggtcaaaaggagagttgctcttcatgttcccagggtaactcacagtttaaccatttggaatgagaacactagcttttaactggaaataaaatttggtataaaacggtcataccttaggtttaaaagccttaaaactaacaaatagcctaattatgtaagtgaatgattatgcacctcaatccctctaggataactaaatatggagaagagttcattgagacttggaaggagccaaaggagacaggggagccccaggttttcctggcctcccgggcagaaaaggggccatgggagatgctggacctcgaggacccacaggcatagaaggattcccagggccaccaggtctgcccggtgcaattatccctggccagacaggaaatcgtggtccaccaggctcaagaggaagcccaggtgcgcctggtccccctggacctccagggagtcatgtaataggcataataaggagacaaagggtctatgggccaccctgggcccaaaaggtccacctggaactgcaggagacatgggaccaccaggtcgtctgggagcaccaggtactccaggtcttccaggacccagaggtgatcctggattccaggggtttccaggcgtgaaaggagaaaanggtaatcctggatttctagganncattggacctccaggcccaattggaccgaaaggaccacctggtgtacgtggagaccctggcacacttaagattatctcccttccaggaagcccagggccacctggcacacctggagaaccagggatgcagggagaacctgggccaccagggccacctggaaacctaggaccctgtgggccaagaggtaagccaggcaaggatggaaaaccaggaactcctggaccagctggagaaaaaggcaacaaaggttctaaaggagagccaggaccagctggatcagatggattgccaggtttgaaaggaaaacgtggagacagtggatcacctgcaacctggacaacgagaggctttgtcttcacccgacacagtcaaaccacagcaattccttcatgtccagaggggacagtgccactctacagtgggttttcttttctttttgtacaaggaaatcaacgagcccacggacaagaccttgatgcactgtttgtgaaggtcctgcgatcgccatagccgttcacagccaaaccactgacattcctccatgtcctcacggctggatttctctctggaaaggattttcattcatcatgttcacaagtgcaggttctgagggcaccgggcaagcactggcctcccctggctcctgcctggaagaattccgagccagcccatttctagaatgtcatggaagaggaacgtgcaactactattcaaattcctacagtttctggctggcttcattaaacccagaaagaatgttcagaaagcctattccatcaactgtgaaagctggggaattagaaaaaataataagtcgctgtcaggtgtgcatgaagaaaagacactgaagctaaaaaagacagcagaactcgtatttttcatcctaaagaacaaagtaatgacagaacatgctgttatttaggtatttttctttaaccaaacaatattgctccatnatcttagtacaaagtttcaatttgtttccccacaaaacaaagcaattctttcaagtcagttctgtgatctgggtctctaatctgtgctgtttcaaagttctctgtggcaacagcgaactatcacaaatatcaccaaaacctattccacttacatccaaaggcactgctcatacggtgattgtatgaagtttgaatgcagcacgttatgaaatatttggccgctggattcccacatttgtcttctttctgtctttaagactcagggaggctaaatcagtgtttgattccccgccgaacccttcctgaaacttcaagacctggtagggaagagaaggggcatgtggtatcctggagcattgtgtatagaactggattttcagacctgctgaggaccgtaaggcctgatggaacacagaactgaactgaggttcatggattttccaggactgtttcaaacatgcccattactaacggcaaaagggggattccctgatggaaccataatacccttggaaatactgtatggttttgttttgttttgttggtttttaaagatttttgtttgtttattgaattcatttcactgtagctctaaaatctgcttgtattccaagcatataaaattttcccccttagtgaattagttttaaaatgatattgttatatacatactatgaaatatgtataactttaacttctgttttaccagcatacccacacaaataacaagaatactacttatgaaatgtgcactttatcctcattccataaatgttggtgcataccttatgtaagggagcagttcaataatccatgaaagaacttaaggcatttgttggtttatcagactcggaatctattttctcattgctctgaatatgtcatcactctaggttttacagatttattcctttgttacttctctaattcttcctttgtaaaaaaaaaaaaaaagcaacactttttatgttatatgttgttcttacaaaccatactgaaagagtccattgtttaaaaatcttaatgtatcaaactgtataacttggccactgtatgtcttaaaacctgcttttcaatgtgttgatacattcccaaggttacttaattcaacttaactatcatgttattcagcaccaagcatgtcccaggcactgtactaacctacagagatgctaagagataatctcacatatacaagtagcttccctcccctctagttttttcttccttttcactgctgttatatttcatcatgataattcagcaggcccaagtaaaggttaaaaataaggtctgaataatagcagaaaaaccaacatctacnaaacattaaactagtgttatacttgatgataacactatttgatgagtcttagagtccagacacaaagagacaaagctttgaagatgctttttgatctacctaggtggagttggtggtgctgatatttttcaggctactgcttcaatctcttgctttgtgtgacatgccc

SEQ ID NO: 588019 - DNA, 1160 bp, Homo sapiens
  misc_feature (991)..(991): n is a, c, g, or t
gatacaaaatcaatgtgcaaaaatcacaagcattcttatacaccaataacagacaaacagagagccaaatcatgagtgaactcccattcacaattgcttcaaagagaataaaatacctaggaatccaacttacaagggaagtgaaggacctcttcaaggagaactacaaaccactgctcaatgaaataaaagaggatacaaacaaatggaagaacattccatgctcatgcataggaagaatcaatatcatgaaaatggccatactgcccaaggtaatttatagattcaatgccatccccatcaagctaccaatgactttcttcacggaattggaaaaaactactttaaagttcatatggaaccaaaaaagaaccagcatacccacacaaataacaagaatactacttatgaaatgtgcactttatcctcattccataaatgttggtgcataccttatgtaagggagcagttcaataatccatgaaagaacttaaggcatttgttggtttatcagactcggaatctattttctcattgctctgaatatgtcatcactctaggttttacagatttattcctttgttacttctctaattcttcctttgtaaaaaaaaaaaaaaagcaacactttttatgttatatgttgttcttacaaaccatactgaaagagtccattgtttaaaaatcttaatgtatcaaactgtataacttggccactgtatgtcttaaaacctgcttttcaatgtgttgatacattcccaaggttacttaattcaacttaactatcatgttattcagcaccaagcatgtcccaggcactgtactaacctacagagatgctaagagataatctcacatatacaagtagcttccctcccctctagttttttcttccttttcactgctgttatatttcatcatgataattcagcaggcccaagtaaaggttaaaaataaggtctgaataatagcagaaaaaccaacatctacnaaacattaaactagtgttatacttgatgataacactatttgatgagtcttagagtccagacacaaagagacaaagctttgaagatgctttttgatctacctaggtggagttggtggtgctgatatttttcaggctactgcttcaatctcttgctttgtgtgacatgccc

SEQ ID NO: 588020 - DNA, 469 bp, Homo sapiens
agtatgctagcctcattagtcattcatttaacacacagttgttgtgccttcactggtatgcttagcgaatatacaggtgccaaggatatcgcaataagacaagacagacacagccctctagtttgttaaggaagcagacaataagtcagcaaatgaatcagataattgcagacagtgctccagtgatctgaagaatctgtaagtccacggtgaatgccgagtgatctgtagatgctggtccgtacctttaagcgtggtcaaggaaggaacaggaaggaggcaaagatatgcccccaactcctcgctcaactcccagagatgagaggtgcctcttggctccagctctgcagccacctctgctcaaaaggtacgctgcgttgctttctttattcctttgttaaacctggcaccagcaaaacaggcacctcaacacctataaatggttaggaatagatgggcaatcaagctt

SEQ ID NO: 588021 - DNA, 301 bp, Homo sapiens
gttactgtggtgttacgtcctgcacacagccacagacggctggatcccacctgcgtcggaacctacatcaagctcatggaatgcagatccttaatccactgagtgggggccaggatcaaacccgtccatgtcctcatggacactaggcaggttcattaccactgagccacaaggagaactccctatagcattttcagatctaggtttccaggctaggggttcaatgggagcagcagttgctgggctgcaccaacagccacaggtaacgccagaatccaagccatgtgtcttgaaacctaaa

SEQ ID NO: 588022 - DNA, 141 bp, Homo sapiens
gccacctatgttagaggaagtacagaagatgcagggtgtgtatccctgggtccagtccctacctggtacctttttcatgttgccttcaatcctgagcaggtattatcctagggaccagcatggacctaccagccaggtctt

SEQ ID NO: 588023 - DNA, 194 bp, Homo sapiens
atggaatatgagagagatagtaggaaaacagcaatgagagggaaataaggtaagagagatagtaggaaaacagcaatgagagggaaataaggtaagagagagatagtaggaaaacagcaatgagagggaaataaggtaagagagagatagtaggaaaacagcaatgagaggtaaataaggtaagaggtcgacgc

SEQ ID NO: 588024 - DNA, 119 bp, Homo sapiens
gtacccagaaagatcactcggtgcagaagatcacttattgtgcagaagattactcttctgcacgataagtgatcttctgcacaataaggtgatcttctggcccgagaggtgatcttctg

SEQ ID NO: 588025 - DNA, 487 bp, Homo sapiens
  misc_feature (266)..(266): n is a, c, g, or t
cccagctcagactccagagtttcctaaggtagtggtagctcaacctccagagcattcacaccttgactcaagccacagttcaagcttgggatcgggggtttaccatcactccagaatccaggagagaggttgaactttctccaaccaggagggagaccccaactcagcctcctaagaaagtggtaccccaatttcgagtatatcagggggtaacaaatccaacaccaggtcaggatcaagctcagaatccagggtcacccagcgtnacagttcaacttggggagcggggacttaccatcactccagaacccactaggggggtgggacattctacagccccgaagaggactatagtttctccaaagcatcggggggtgacccttccacatccagaccaggttcagactcagcattcacacctgactcgagccacagttcaaccttgggagcgggggtttaccatcactccaaaatccatgagagaggt

SEQ ID NO: 588026 - DNA, 534 bp, Homo sapiens
cttcccaccaggcaaagacataaaggtcagtcacatcacgtgtgagtcatttctacttattatcacctcccactaagaacttccctgtacagagcgtttagtggagaaaaatcctgcattaatggggtattaacctgtgatctggaaagctagctggctaatgaaagagggagaaaaactgttgactttacatgtgaaggcaccaacttggaaactgtgcataggttgtgtgtatatgagacccggtgagggatagtggagtgcagggatgagtggcctggctaggcagagcattcacactagagaggaatggagcataaggtcaggtgacggggtgggtgaccacagtgaactaggcaagcagaagagtgtgagctcatcaggggagtcacaagctgaaacagatgcattagcaacttatttgtgtagtagaggagttggcagtggtactgcgtgggattgaagactgctagactttaggcaaggggatcacttaaggaatttcttattgattcacattttgagtaagttggc

SEQ ID NO: 588027 - DNA, 280 bp, Homo sapiens
atggaatttaacagtcacgaaatatcacaacgttaatttgcaaattcaggtaacaatgacttggattcgatgaagcactacataagagctgggatgaaaccttaatgtccatgagtctgacatgggtaagtggcagattccagctacaatgtctactggattagagaaaaatgaaaaatccatggttcgagagtttccttggatgttcgggtctcacggcaactgcactcctattataacctgggccaagaatataacgaaatcgtggacataacagtgg

SEQ ID NO: 588028 - DNA, 326 bp, Homo sapiens
gttcttagcagtacactctcgtagggatctggtcttgtcctggacggctgtcaaatcgattcctagtaaactatacagagttttttcctgccctggtagcaggagaatgtttttcaaagagttgacttcacacaccttttggcagttgaaacaaaatcatacaattctcccccggcctcttccaaagcttctagtgttatatctcttccttgtgacagcggaccaattacaagacattttccattcttggatttcctctcgagctagttgtgcaacccttttgaactccgggatgctatgcataagtatttgaagaacctctggtg

SEQ ID NO: 588029 - DNA, 123 bp, Homo sapiens
cttctggtgtagcctgtgcggaaacttaggatgcctcagtgagctgcatcacttgaaaggcatgcctgtctcctcacttagtgcaatgtccatcgaccaaagccctgtactgatcaatactca

SEQ ID NO: 588030 - DNA, 531 bp, Homo sapiens
  misc_feature (484)..(484): n is a, c, g, or t
  misc_feature (511)..(512): n is a, c, g, or t
acactcatttgttatcttttgactttgcttgtgtattttgttcaaactttatgttgtcaagccgatcaatcatttccttgatggcttctgggtttatttaatgctttagaaaggcttccccattccgaaaagacagaataaaagcgattcacccatgttctccctttcacggtttcaacttcactgtctctcccgccgccagagcccagcaaaactttctaatccgcgaggagcccgggaccccgctgcgctgggaagccgaggcagggcgccggcctgcgggggtcttcggaaacgttcccggttcccgcggaagatcgcccggcccggagccgcgtgggctgtctgtcctcgcaggtagcagtcactcggagcagaacggtagttaggaaaaattttcaagtctccttcggctgcggggtcgcgccattccaggcggtgccaactgggagctccttcacccgccccaggccgagaaacgcgntcccagttggtcagggactaggagagnnctcgcccgccggagatgcg

SEQ ID NO: 588031 - DNA, 107 bp, Homo sapiens
ctcaggggacacaggatgaaagccatggccaatctaagagcatgacatgtgaaaagtgagtactctcactgtgtactcagcataggatagtgacactgctacaactg

SEQ ID NO: 588032 - DNA, 140 bp, Homo sapiens
atgcttgttggtcgtctctagcaggatcccctgtgagttcgccggacagcagtccctactcctcctatctctccctgtcctcagctgctggcttcactatactactatcagaccgtaaccttcgacaccacgcgttcttc

SEQ ID NO: 588033 - DNA, 572 bp, Homo sapiens
ctacgaatccaatccaaggttcccaaatcagcccgcacatccataagggtagaacttccgataactcacggacctcttgtactgcagagctaaaccacagcgctggagggcgtctgataataccaaaaagtgcggtcgctgcaagcgcgcaagttcgtacaaaaccgtaaggcatgtgtaaagaggggaggcactcgttacgtctattactaactctataagagagatgggcggattagtctatatagggactttaggggccgaatagaggcggggagaagaggagtctacgaggagtagacttacggtagagaatttcttgcgaaggaaaagccttgtcgatatgtcctacactttacgctccgacctcttagtacttttctataaagctaaagggtaaaccttccgttatgtatctctagcaaggaggccgtatcgtccttacgaaagtccagatcttgagccggatatcaaactctactacgtcctttctcgatctccttggttcgaactagctccccgactcttattaaagcctactactggatcgtttctttaaatcttatggcttg

SEQ ID NO: 588034 - DNA, 425 bp, Homo sapiens
  misc_feature (54)..(54): n is a, c, g, or t
  misc_feature (209)..(209): n is a, c, g, or t
ggcttagagggtggtaaactggaagcagtttaatgggacagtgtttgatgggantttggaggtgatgaggtttgatatagtttggatttttgtccctgcccaagtttcatgttgaattgtaatccccagcgttggcagttgggcttggtgggaagtgtttggatcatggtggtggatccctcatggtggatcccagttttcatgagatntggtcatttaaaagtgtgtggcacctccccaccacctctctctttcgctcgcttgctcgctcctgcttttaccatgtgatgtgcctgctccccctttgccttccgccatgattgtaagcttcctgaggcttccctagaagcagatgtcagcattatgcttcctatacagtctgcagaactgtgagccaattaaacttcttttcttataaaataaaa

SEQ ID NO: 588035 - DNA, 756 bp, Homo sapiens
  misc_feature (9)..(9): n is a, c, g, or t
  misc_feature (281)..(281): n is a, c, g, or t
  misc_feature (353)..(353): n is a, c, g, or t
  misc_feature (363)..(363): n is a, c, g, or t
  misc_feature (373)..(373): n is a, c, g, or t
tataacatnaaaaataggcttacaaatagagctactaggtacatacctaggctaaaggagtcagaggaaataggagacggtacataccctagtaagatagtacatagaggcgagctagggatttaaggtacaccgtatgcaggcctaggctaggaaaagacccagtaacagtagtaagccgtagatagtaggtacatatatagtacctagatagccagcctatagaagtatagcaaaaaaagagggaccataatagatagtaggtaggtatactaaccagngaggtaaatactagggccgcaccagaatttaatactagagtactagctagctagtagaagggagataactangaaggagcanggaaaaccgngaagggcctagataagccgccatactagtagcaggtacctaactagctactagtattggctacatagaaataaggtattaggaagtaaaagttacaacacaccctactatgctaaaagacaaaatagatagaataggaggtacattaacacctaactactagagaatacgtagtaggaacacaagacggcctagatatactataacaagccgggggccctagggaccaggctatacgaggtaatagcgctatgcaaatattgtatagaaggcccctagaatagggcaaaggaaggtaggcggctacaaggtagaagggctaccaactatggtacttaaaaggacctaaagagcagggaacttaggggaaggaatacactttag

SEQ ID NO: 588036 - DNA, 196 bp, Homo sapiens
ctgagcttgtttcccacagtcactgcatttatagggtttctctccggaatgaattctctggtggattataaggtgtgagtagtaaatgaaggctttaccacattcaaggcattcgtgatctttcttccctgggggaggtgtcttatgggtgacgaccatctgcccgaagctcttcccccgggcggggaagctcaga

SEQ ID NO: 588037 - DNA, 138 bp, Homo sapiens
agaggatccctctttgcttctgttctctcaccaagacctagagaagaaggcagaacatacaggaagtctcagaaggaggcagtgatagactgtttccagaacaggaaagtcaaacgccactgaggcagaagcaggaag

SEQ ID NO: 588038 - DNA, 936 bp, Homo sapiens
  misc_feature (673)..(673): n is a, c, g, or t
  misc_feature (806)..(807): n is a, c, g, or t
  misc_feature (812)..(812): n is a, c, g, or t
  misc_feature (814)..(814): n is a, c, g, or t
  misc_feature (821)..(821): n is a, c, g, or t
  misc_feature (825)..(825): n is a, c, g, or t
gcacagctggaagcgcgcgtcctgatgatgtcgaccaacaacatcctgtcgcccgccaacggcaagccgatcatcgtgccgtcgcaggacatggtgctgggcctctattatctgtcgatgatgaaggaaggcgagccgggcgaaggcatgctgctcggcgacatggccgaggtgcatcaggcgctcaacgcgggtgcggtgacgctgcacaccaagatcatcagccgcgttccgcagaccgatgagaacggcaagcagtacctcaagcgctacgagacgacgccgggccgcatgctgctgggtgaaaccctgccgcacagccacaaggtgccgttcgagaccgtcaaccgccttctcaccaagaaggacgtcggcgacgtgatcgacgaggtctatcgtcacaccggccagaaggagaccgtgctgttcgccgacgcgatcatggcgctgggcttccgtcacgcgttccgcgccggcatctcgttcggcaaggacgacatgatcatcgcgccggacaaggacaagctggtcgacgagacgcgcgatcaggtgaaggacttcgagcagcagtatcaggacggcctgatcacgcagcaggagaaatacaacaaggtgatcgacgcctggagccgttgcggcgaccaggtcgcgaactcgatgatgaacgagatcnaggccgtccgtcactatgaggacgggccgatgaaggccggagaaggacatcaatcgatctacatgatggcccactcgggtgcccgcggtcgcaggcgcagatcaagcagctcgcggcatgcgcggctgatggnnaagcngncggcganatcntcgagacgccgatcatctcgaacttcaaggaagcgtgacggcctgatatttcaatcgaccagggccccgaggcccgcggacaccgcgtgagacggggaaaccgggaataac

SEQ ID NO: 588039 - DNA, 168 bp, Homo sapiens
gttccagtggtcttggtcttatttcctcttgatggccggagttagatgtgtagggcgggtgatccccagttctttgcacctctgggtgacatcctgggcagccaacatagcacgcatatggggacggatcatctcggtctgccttaagcttcatcccaccagtcacac

SEQ ID NO: 588040 - DNA, 228 bp, Homo sapiens
cgggtgctgttctgtgtgtgagcctctgtggtgatggggcggtacgggtgctgttctgtgtctgagcttcgtggtgatggggcctgtgtagcgggtgctgttctgtgtctgagcttcgtggtgatggggctgtgtgctgggtgctgttctgtgtgtgagcttcgtggtgatggggtcgtggagcgggtgctgttctgtgtgtgagcttcgcgatgattggatgtccat

SEQ ID NO: 588041 - DNA, 741 bp, Homo sapiens
tttttttttggcaaataaaacgggctaagtgggtggcttttgggtgattagtcaaagagaccaaatcccatatcctcgtccgattcctccgatcttcctgtggcttcaaccttagcgggggctgcagcagcagcaggagcagctgtgggggcagcagccacaggggcagcagccacaaaggcagagggatcagccaagaaggcctagaccttttcagcaagggggaagggtgtaatccgtctccacagacaaggccagagactcgttggtacccgttgatgatagaagggggtacggatgcaacagtggggtagccaatctgcagacagacacgggcaacatggcggacaccctccaggaagcgagaatgcagagtttcctcgggtgatatcacgcacttcagggtggtagatgctgccatggtcgaacacctgcgggatgaccagcccaagggagaaagggggagatgtcgagcttgttcagcagcgtggcttcgcgggctcccacttggtctccagtctgtgatcagcggcacatcactcaggatttcacgggggccccgtggagattcaggggtgatacctaaagccgtggaaaaaggcaggtcctcctcgggcccgagaccaagctgtcctggggcgtggcacagtgacttccacatggggcaaggggaaccagcacgggcagcagcgtggcacccttatgggcagcaaatgtcccgaatctcaggaggcccctgga

SEQ ID NO: 588042 - DNA, 159 bp, Homo sapiens
tcagtaagcggagcaccagcaagctgcctacatcggcgtgagcaaggaaggcccgtacaaggctgaccactaccgctactaagccgtacctgccggcggacattccccgccgccggcgctatcaccgaggactgctccatgagactgctcgcttactga

SEQ ID NO: 588043 - DNA, 143 bp, Homo sapiens
ggccccctgtggaattggggaactgaggagactccagtgagggtgtccttccagtgtagagcagctataaggggccccctaagcttcctgtgcctaggaagtacagagaaccagtaacagggccatactgcacctaataccca

SEQ ID NO: 588044 - DNA, 468 bp, Homo sapiens
tcctggcactgctgggttgtgtcctgaggaatcaccgtcctgcgtctcacaaggctatgggtcgccaaagatcggatattcggaacccgcaggcgtagtctcgttcaaaatatagtgcatggtgccgatcttgtgcgagtccatcctatctgtacgagagcgcgttgtgtcagctcgcgagaaagacgtaataccttgtgggtcgcctagtagagagtcccggccctttctcagcactcgcggatgtcggctcgtgacggatatcgtacggtacattgtgtatcttgccagtgcgtcagtctctcgttcctttcgtcatgcgtgcagctccggacgattcgcatgatctaatgcgtctctgtattgaaccctgtaaaggttccactggtggtcagtatgggcggtcatacagacaccactggaacggccctggctgccatggtagggacagataggtcagcagaattc

SEQ ID NO: 588045 - DNA, 225 bp, Homo sapiens
  misc_feature (20)..(20): n is a, c, g, or t
aacttacgcgactatcgagnacgtgctttggagcacccctcttcccgcgcgggtacgataatcaaatggtattggggggatctggccccacaagtttgatgagttgacactgacgaacgaaggggacggtgacactcttacgcgaacggtgccttggttgatcattcgtgcagtcggcaatagaacggtcccagtgttctatacgctgggatggccgactaatga

SEQ ID NO: 588046 - DNA, 462 bp, Homo sapiens
ctttaaaatgttcaacatagagtactatgacccagcaatgccattcctatacattatacccaagaaaactgaaaacatgtgtccacacaaaaatctgtttacaggatgttcagagcatcattattcataatagccgaaaattagaaactaccacaatgtcccatcaactgatgaacagataaacaaagtgtgttatatccaaacaatgaaatattattcacctacaaaaataaatgaagtactaatacctcattcatacaacgtggataaaccttgaaaacattatgctaagtgaataagccagtcaccaaggctgctactgcagaattccatttatatgaaatggccagaataggcaaacccatagagacagaaagtagatactggttgccagaggctgcgaggaggctgccagaggctgtggggagtgacttctagtggacactgggtttcaatttggcg

SEQ ID NO: 588047 - DNA, 101 bp, Homo sapiens
tggcgttagctctctctttatatacactctggctctataatctcgcctgcagccgctggttggaccagcacacgctgacggggccggtctatttacaggtt

SEQ ID NO: 588048 - DNA, 187 bp, Homo sapiens
cgttagcaacaggatctgaatgaaagacactgggtgggtcttgattcagaagagctgaatttacactctgtgagtctgaagatacaagtcaggctccaggaatctttgcttacctggatcgtgtgaacatagatgatgactgggagtgcagatcgaaagaggatccggactgatttgcgggcccctg

SEQ ID NO: 588049 - DNA, 252 bp, Homo sapiens
gtttatatcgttggccaggcacaacggctcatgcctgttactcccagcactttggaggccaagccagaagatcacctgtgttccagagttcaagaccagcctgggcaacaaagaaggaccccatctctacaaaaaaaaaaaaattcagctgcccgtgctggcacttgcctatagtcccacgtacctggagtgggaggatccacctgagcctgggaggtcaggctgtaatgagcagtgatcaggccaacgcac

SEQ ID NO: 588050 - DNA, 839 bp, Homo sapiens
gcatagtgctagtactgaggccgcgtgtgaatctggccgagggtcagcccgtgagcaagagcctcgcctttgcctgatccgccgcccgtacacaccctgccgcagctcaccatggatgatgatatcagcctgcgctcgtctgtcgacaactggctccgtgcatgtgcaatggccggcttctgcgggcgacgatgccccccgggccgtacttcccctccatctgtggtgtgctgccccagtgcaccagtggcgtgatggtgtggcatgtggtcatgaatgtgattccgtatgtggtgctgacggaggcccagagcaatgagatggcatcctcaccctgaatgtaccccatcgagcacggcatctgtacacacaactgggacgacatggagaaaatcttggcaccacaaccttctacaaggagctgcgtgtggctcccgaggagcacccctgtgcatgcgtgacctgaggcccccactgaaccccaagggcaaccgcgagaatgatgacccagatcatgttttgaagagcttcaaacacccccagacagtgtacagtatgctatccatggcttgtgcatatccctgtacagcctacttgtgacgtaccactggacatacgtgatggactccggtgacggggtcacccacactgtgcccattctacgagggggtattgccatcacaccatgccatcctgcgtctgacctggctggcctgggactgctgactactcatgaagatctcacgagcgcggtacgttcacaacacggcgacggaatgtcgtattaggagacagggagtgccgattgatgtgcagtggcaacccggagcaaattcgcg

SEQ ID NO: 588051 - DNA, 294 bp, Homo sapiens
  misc_feature (8)..(8): n is a, c, g, or t
  misc_feature (177)..(177): n is a, c, g, or t
  misc_feature (187)..(187): n is a, c, g, or t
  misc_feature (207)..(207): n is a, c, g, or t
  misc_feature (237)..(237): n is a, c, g, or t
tgagagtnttctgtctaattgctgtttttcttgtgagtaatctatattttctctctttgagttcttaagtccgtctgtatgtctttgtcagtaaatgtagctattgtgggattttgcttttttctccttatggcttttttagggactttattgctttcttgggaattcttggaaggnggttaacaanctttttttttcaagttcccngggacaatttctttaggcccatttggtcantctttccccccctcccccttctattattctcctccttaatcctccttccccattctt

SEQ ID NO: 588052 - DNA, 180 bp, Homo sapiens
atcacaccattcattgcactccagcctggatgacaagactgaaattccgtcagaaaaaaaaaaaaaaggaaaccatagcacattgtatttgaattctttgtacataaaaatttttccacatctagatgtgttttcttgggacagaatccccaaagttgatttgggaaaaagtaaagtttg

SEQ ID NO: 588053 - DNA, 135 bp, Homo sapiens
  misc_feature (95)..(95): n is a, c, g, or t
ctaaaagtactgagtttattttaaagcatagcatcaagtttgaatcttatgaaacaaaggcatccctacatttcctgctgagtttttcaaaaagnaaagaccagcatactttagatatacatgataatgtagttt

SEQ ID NO: 588054 - DNA, 123 bp, Homo sapiens
ccgactctagccgctcttagctcgcatgatcccaactgctcctgcccgcgttactcctgcacctgcgccgctcctgcaaatgcaaaaaggcaaagcacctctgcaagaaagctgtgctctgtg

SEQ ID NO: 588055 - DNA, 1179 bp, Homo sapiens
ccagtctacgcttgctgcggcgccaacagggccgactgcagcgtggaagataggcggcggtccgtggtctgtcgggcctgctacctgccgtgggcacaagtgctattgctgctgccacgctcgctcgccgtgcctctgctgcggactgctcagccattgcctggagtatcgtgcttaatcctttcgcatcaagaggcgcatccagttgtacgtaggcccggagacagcagtgttacggcctgtcttggaccaagcgagctgcagtgtgggctccgagacaggtcctctcagcccaacttgccacggtgggatgtagtcggatttgattgtttgtgcacgccgtattctgatgacttgacgacatgaatagatcggtgtgccagcgctaacgtatttacggacgcatactgtgcctcttcgacagtgcgaacacaacgaatccggccctggcatgtgtgaccgcttgtgtacgcacacggcacggctgagcagcagtctcctgtgatgtgtgctcacaatctttacctgctccttacaggtctagccactgagtgaatgtctcacatcacagacagtataccttaaaccattcaaaacgtgcctgtcttgttctctatatgcgtatgtctgcccggacaccagacgatggctgccgacgccgctccctgcgcgtctgcaacgacgttgggtggtccacgcaaaatctggttaggtctccctggggcccacgtcaacttttcgagcccacgcaactttccgcatgacaccgccgcacaccccggcttgcgactgcctggccatctccaccctgggcctgcgccgcaaccggaacgctgcccatcgtgcaacgcaacatagtggcgacttgtcattttccgtcagctgcgctcagaacgcacacttgtcttggcggcatctctctcttcaacagcgtctcaaccccgctagtcactttgcaccacaccacaagcgccacatttatcccgcaccgctcggttcctacctctgcccccttccttaacgggctacgccagaagtcggcccgggctagcgggactcgcgggcggtcccccccaaatgtgtctgtaagtcaacacgtcgggctctcccgagtgggcactacttgcccgcttgtccaccactccgcgccttgtcgaacagtcatcgctttgttgcgcc

SEQ ID NO: 588056 - DNA, 443 bp, Homo sapiens
ctgagggagtacgtggagtcgcagctgcagcgcacagagacttgagcgacggagaccgtcaccggcctcagaggccccccgtgctgtgcagctgagccccaggctgtacaaggggcactgtgtttgggcactcactgtaaaataaccttcgatggacacccattgtcagagaggggataacctctcatcaagttttatgctccatggggtgggtgaatgtaagactctcgctcctactctgggggggggctctctaaaaaggagtttccccgtctcgcggcgggtcacaaaccccgccgtagactacactcctgagcgcggtattttcagcacatatactgctacgacggcgtacccccccactttatcttcttccccccgggggggagagagacaaaaatgcaccacaggagggagaagacccctcttctttacaaccccct

SEQ ID NO: 588057 - DNA, 564 bp, Homo sapiens
gcatgtgctgctgctgcgactgtgaggacgccggcttcaccgtcacagagcccagaacatgagtaaaagcctcactcttaagaatcctggaagagtagcatacgattcaggcgggataaagatgttttgggagaaaaaaatcgagcatcacgcaagacacctgcagaacgaggacatcagggttcgcagaagcgctctgaacaagctccgcgtgggatgggctgagcagctggaggggaggaacaagatgctgcagggcccagggagatgcccagacagggtcccggaggccactgagtccctccacaccaaggacaagaaaggcggcctgagggcccacgagctccagactctgcatgagcttccggagggtcatggagaaggaacaccacgcgtggggtccaagcatccacgccagagttcacaggatcttcatcatggaaatggcccgcacctcgctgaccccgtaataatcccacctcggggtccacgctgcagcagagtcccagggttctctagcgcatctctggtgcccaataaaacctaagtcaattaaaaaaaaaa

SEQ ID NO: 588058 - DNA, 191 bp, Homo sapiens
gtgattctagagtatcctggtatcctgatcaactacgacagatagtgtcattagcaagtgcagggagttcagatcatcagtagagagctggcagaacagaaggcaccgaaaagcagcacatcacgttagccttggagtaacaaaagctggaagaaaagcggtcatttgactctgcagtagcaaaagcatta

SEQ ID NO: 588059 - DNA, 709 bp, Homo sapiens
cggtggacgggcccgcccggtggggcgcttcttcacgcccgctcatccgtccagggccccgaggtgactcgcaattgtcgtcttcggcggtccgctgtctgacgggtgcagaggaggtggcggtgccgcctgtgtctcgttgggatacgtgatggtgacaagaatgagaagaacggtgtctgatgggggcaaaggtcctagtacctccttgtgcgggtattccgggcattgagcgagccaagagagaggagaccgctggagcggaacttcgtaccgtcttcattggcagccactgtccaactttcagaccgcttacaccctgtggggtctggagatcagtcccatggtcgccgagagtgaccaaaatatgcgatgttgggccattatacattgaggacctaagcctttgtcggtcggagcgtattcatcgcatcagtgtgtcccgagtgtactgaggaaccagtatcttgaaaattctaatgttgcgagtcccttcacagccagtaaaccagcttctttggagtaaccgtattcctatccactctcctacatagaatggatgctactgtacactagcaagaaagtaataataaacacatgtggcggaggtcgcgaccgtaaagtaataaatcccacttaggaagtggtgcgccatcacgtttgctttttgtggccccaaggtttatctttggctccaaaaaagtggagc

SEQ ID NO: 588060 - DNA, 119 bp, Homo sapiens
cacgctaacgatagtgattattttaatcaatctgcaataaacgctcgcgtctttttttctattcaaacatgcctgggataaaatgtgcaaggccaatgtatttcaagaagcaggaacag

SEQ ID NO: 588061 - DNA, 832 bp, Homo sapiens
gctgcctattcgatctactaccacatctacggtggcgcgggatctcaagatgcgcctccacctagctcctgctgactacgcgctgtagacggtgcagtgacaccaccgaccgacggagctcagtatacagcttgacgtaggcaacataggagacatctgcaatggtgaacggcctcgactagcgagctgcccgagggcggataccactggctagcgatgcacagacagaccattgtatccagcagggcctgataccagagattcttactacagatattaatgaccttaactacagatgggtctctattgagaataactggaacctatagcaaagacatttaaaatccccatattgacaatatagcaaatggcaacaacagtacacatttgcattcttgcagggcagtaggatacaggaattacaccaacatcctgtatcaaatagacaggtcaactaattgagttgcaaacgacgcaccacactaatgctagcagataagaagtattacgcgtatttgcaatactatcacacacaaaacaaggatgggaacaatgggcaaccgatgaaaacaatccgagatagaaatcatgacgatatccacagaacagctcggcacatagtacaggcaagcacacagccaggacagaccaacaggacgacaacaccacagagccataaccacgcgaacccaccaaaagacactagagcactcaacaacatatgatgacacgaacaggaggtagaaaatgaccaaagtacaaaccaaaagaaacaagggaaaacgaagacaaaaaggaaacacataatacgaaagagaaaacacggagaaga

SEQ ID NO: 588062 - DNA, 442 bp, Homo sapiens
tgctcactcgagtcaccattctccagctccccacagaccagcctgtgcccacctccttgccctactgctttaggctactccaacctagtagtaacagtttttggggttttttttttttgagacagggtcttgttctgctacccaggctggagtgcagtggcatgatcatagctcaccacagccttgaccacctgggctcaagggatcctcccacctcagccacctgagtagctgagaataaaggtgtgtgccaccatgcccaggtaatttttatatttttttgtaaagatggggtctcgccatcttgcccaggttggtctcaaactcctgggcttaagtgatccgcccacagtgctgggattacaggcgtgagccactgttcctgccccttctcagcacaaatttttactttctctcttttttttttttaaaaactgatgtt

SEQ ID NO: 588063 - DNA, 285 bp, Homo sapiens
ctatacacagaagaggagggataagttaatgaaggccacaacggcacgcggcacagatcctttgtggagctggacctttcgcaaacaggccgtgtcatcaccttccaagaaagtttccttcggttgtcctgtgcattataatatacaaaataacttattgggatgatcagaggctctgacggtcttgaccttcttgacatatacacatgaaaaaatgggggctgctatgctatgtgtgtcctacccaaacctgtggccgccacattttgaatttcgggataccga

SEQ ID NO: 588064 - DNA, 401 bp, Homo sapiens
tccctagtggccaggtttatcccctcacatgggggggttcacatacacagcacaaaggcaggggcaccaggggagagggcagcactccgtgccttctgaggggatctgggcctcagggtgtaagaggggagaggagggttcctcttctggccctcactagggcctagggaacccaggagcaaatcccaccaggctttccatctctcagccagggagaagccacctgggtgacgttataatccccaaccattatagtagggggagaagggatgggccgggtcccaaccattacggggctgaagatataaacagtaagggaagatacagttgggatgaggccacaggaaggcagcagatgacaccatcagaagcatatgcaggaaaggggcagtaacggggct

SEQ ID NO: 588065 - DNA, 334 bp, Homo sapiens
gttcgagccaattggttgattgcctacatacaacatgtttgtatctagcaataaaaatttacctaatataacataccacatgattgtttaagcactatggctagtgtatgcagagtcatgctggtaataccggaatacagaagcagatttacaaataaagagacagtgtcattctgcttaagggtaatgtgtgggtgtcataatactctattaccacttatatccagatgagagcatttgctataacttccatacattgtatcctgaaaggttgtttccaagttctttaggaccagcctcctaatagcgtgaaaagtcttctatatgctctcat

SEQ ID NO: 588066 - DNA, 820 bp, Homo sapiens
cacactggcatgcctcctctgggcccgaggaagcctccttctgttgccgctgctgctgctgcgtcctgcttcgcgcacgtgctggctgtcccccgtggagcgaggggcgcccaacaaggaggagacccctgcgactgagagtcccgacacatggcctgtactacctaccgtgtaccgtcctacggaggtcactcgatgtactggagacggatgggcatttccgagagaagctgcaggctgccaatgcggaggacatcaaagatgcgggaagctgagccgagagctggacattgtcagcctaccatgtcacgaaccagagctgtgatgagctctaaggcgaacagtgaggtgtctacgcgcgtgcggagtgcgtgctcgaaaggccaaggatggcacagccgagcaggatcccaatgatacggaggtggaatcatcgtgaactcgtcctgtaaacaagttggaagcaccatgggacccgtcaagaaccagcaagtacatgcgaaggcccggcgtagtctggtgagctgcatgatccaaggacggtgcacgccaggagacgcttgacccaaggtagcgactgcagacctcagtcatgacagacgttcaacgcggctacgaagagtggctatacacggacacaccggagagcacgtgcagttactctggtaggtcatcatgggcagagtgcagcagagaaacagcgaggctggcagcagcgagagcatggcacacggagcgctcaagccgcacgcgccacgcgcggacgccaaccacttaaagagttgcaacgatggcacgtgcgccaggaccaaggacaccg

SEQ ID NO: 588067 - DNA, 114 bp, Homo sapiens
cactctgaccccacgacatgacccaccaacaacacggaccgacgcgactagacggccctgacgacgtccggtaacacgacctgaacggcgtgacgctccccacacccaacgtga

SEQ ID NO: 588068 - DNA, 178 bp, Homo sapiens
ctgtttcgtcatctctgctttgccctgtatccatcactcattcgttatttaacccttcatttttttttttaatatgaaaacttggttggagttcccgctggctccatgggctcaaggacctggtgttgctgccgctgtggtgtcggtctcagctgcggctcggattcagttcctggcc

SEQ ID NO: 588069 - DNA, 199 bp, Homo sapiens
  misc_feature (120)..(120): n is a, c, g, or t
gcatcgtgataggctgttacagtggaaacacgtcgtgcctctggcagtgggcgtgcctggtgtgttggggagagacagtgaacgcagctgagcgtggcaaaggaagtcggacacagcaanagtttgaaactgcttttcattcattgccatattttcaggccttttcctatgatatctaactgagatcatgttaggttcc

SEQ ID NO: 588070 - DNA, 203 bp, Homo sapiens
tctcataaaaattcaaactataggcccggcgcggtggctcacgcctgtaatcccagcactttgggaggccaagaagggaatgggaggagaaactgaggatacagggaattttattattattatgttggtttgttttttgagatggagtcttgctctgtcgcccgagctgcagtgcagtgggtgaaagagtgagactctgtctc

SEQ ID NO: 588071 - DNA, 745 bp, Homo sapiens
  misc_feature (8)..(8): n is a, c, g, or t
tttactcntttgtcacgagcgcgccatgtgttggtcccgggattcggcattatggccgggggtaatgttttttaaatatgggggggggccgatacttcgaaattgttggttccaacgaaccccccccataaaacccccccatcggtattactgtagatctaatcgaaacatacgacggagcgcctaacccatgactcttgttaatacgtgaacaaaactctcttcccttttttgagaaggtcagggggtttaaaataacccaacagacaatcttcttaaaaatgtatgaaagggcactacccttttcgaaacaaaattctttggaatactatatacttacgactgctacctctacccaacgctatggaattattgtgcgttcctgttccactttcactcccccgtgtaaggcccccaccgaacccgtagaatgcctttatataaaccaccaacgcgaccattgacttttaacatttttttgaaccttagcaaaagatctcttatggcggtacattcttattaccacacccctgaaggtgggcttaaaccattcccttaagctaaaggtcctggtgttatgccccaatcccagcttcctggtgaaaataacggattacactaacacaaagcgggcttccccttggcctttgtcccctccaccgttttcttaaaaaggaacaaccgggttagtttgcccgccataacccccgaataaggcaacctctccctttttccaaggtaaaaa

SEQ ID NO: 588072 - DNA, 960 bp, Homo sapiens
caacagacaccatggtgcatctgactcctgaggagaagtctgccgtaactgccctgtggggcaaggtgaacgtggatgaatttggtggtgatggccctgggcaagttgttggtgttctatcccttggatcccacggaggttctttgagttccttagggagatctgaccaactcctgatgctgttatgggcagagtcgctaatgggtgaatggctacattgcgtaaatgaaagtgctcggttgccgttgtggatggcatggccgtggtctcatgctggcacaatccctcaaggtggcacggtttgcgcacgattggagtggagactggcgactgtgaaccaagcgtgtcacgtggaatcctgtagcaactttccgcgctcctgggccacacgtgctggatctgtggtgctggtccgatcgacttctgggcgaaagaattcaccccaccagttgtccgctgccgtactcatgacaagtggttggctggtgtgtgcgtaagtgcctctggcccctaacatagtattcacataacgtcgtctgcattgacattgcttgtccacatttactactttagataggttctctttgtttccctagagtctcaagcttatgtatatactgtggggatattatgacggggcctatgagtcatccttgcgattctggctaataaagagaactaattttcatctactcggtggcggaatatacaataacatacaaccaccacacaagaaccgggggtgggctcgtccaagatgattagacccctacgaagaggtccacctggcgtctttaaccgagaatgaatggttgttcagtagttcacaaaagggcgagtcgcctaagatggccccccacgtttccaatgaccacgtggcatttcttccaggcgtaaactggaaccttggacttagggggacaatttgttccgtgttgggcatccagggatagagacctt

SEQ ID NO: 588073 - DNA, 127 bp, Homo sapiens
acggagtgacgtacagaagcttgagaaatgagagtgggcatcgccgcggtcatcatgacgcctctgcggcgtggtcaccatgtttgagtatctctgtcgttggtgctctatattcgacgggtctcct

SEQ ID NO: 588074 - DNA, 207 bp, Homo sapiens
agacaggggtggcagtggtggtgcctgcagcgagccggagccgtcggcatcgccaacccggcggcgtccacctcgcctagcctgtcgcaccgcttccttgtacagcaagtttctactgtgctgtgtggtcgctcggcgacgatcgtgtagccgaggatgcacctggcggtcgtgccgatcggcaaccatcgatgctcgcgaatccga

SEQ ID NO: 588075 - DNA, 642 bp, Homo sapiens
  misc_feature (311)..(311): n is a, c, g, or t
tacaagctttacaagtgggccatctcataattgaaggtttatcagatcatggggttacatggctatcagaaggtttgttctatcacttgagcagccaaggaaaatttaggagtttgacaatgagtttctattgatacacgacgagacaaaaagtactctgcagattttcacgtacacactcatgttttaagagtagcctttttgtaaaaccattatagcctacttccctgttctgatttggccttctccgtccttgatgcttcttctctagttagtgtcagtgtggctttcatcaaagttcgtacgcatanttgtctctatgacttcccgctaatgactagagcctctgttgcatattccatgtaccttcgtgtagatcagtgacaaacgacttgcacaaaagtgagtgccacggaagcgtcctcaaacagaacggctttcacagctgaatataagatactgatgtctacgggaattccccgagaaagcactatccatgcaatagattcagttaatattgtgaaagcacaagctaattttgatagttatcatgaatagagttacccacagagaagctgtaactacatggtgacctacaaagcaggtctgtctgactccatccttgcccccacttcactcagc

SEQ ID NO: 588076 - DNA, 184 bp, Homo sapiens
taggttgtaagtgataatggattaaaaaatagtagaggtgatgatgctaataattaggctgtgagataagttgtgttagatatcaaataatgtgttaataggaaagtcatgtcagtggtagtaatcatcattattggaacaataagtaataacattgagcgtaggtatcagggtaatgtacgta

SEQ ID NO: 588077 - DNA, 228 bp, Homo sapiens
tcatgtcactggttcgaatggaaactgtcacacaggagtgtcagagacagcgtgctgcccaggtaagaccaccttttccggaagttccactatctccccttcctgccctcaactgaggacgtttacgactgcaggatggagcactggggctcggatgagcctattctcaagcactgggagttagatgctccaagcagtctcccagagactacagagaacgtggtgtgt

SEQ ID NO: 588078 - DNA, 395 bp, Homo sapiens
tcccttccgggaaattttaccccaattttttaaggtgggaagttgcaaaccacggggaagttccctttttaattattgggaaccgaacaaaattttagggggttttttaaatcccttccccgttaaaaaaacctttttttttaaaaaagtttttatttaaagccaagttttttgaatttaacgagggttttacagctttaagggtttttaaaaagggcttttttttcacttgatgggggtttagaccttttttttggaaaacccacaaaaaaattttttgggagaggtttttaaaatcatttccaaaaaaaaaaccggtttttggtgcggggttttttaaagggaaaaaaggcccctttttgggtgtgtttttttccccctttttaaaaaaaaaa

SEQ ID NO: 588079 - DNA, 534 bp, Homo sapiens
  misc_feature (13)..(13): n is a, c, g, or t
  misc_feature (17)..(17): n is a, c, g, or t
  misc_feature (22)..(22): n is a, c, g, or t
  misc_feature (44)..(44): n is a, c, g, or t
  misc_feature (63)..(64): n is a, c, g, or t
  misc_feature (71)..(71): n is a, c, g, or t
  misc_feature (80)..(80): n is a, c, g, or t
  misc_feature (98)..(98): n is a, c, g, or t
  misc_feature (107)..(107): n is a, c, g, or t
  misc_feature (133)..(133): n is a, c, g, or t
  misc_feature (142)..(142): n is a, c, g, or t
  misc_feature (159)..(159): n is a, c, g, or t
  misc_feature (167)..(167): n is a, c, g, or t
  misc_feature (175)..(175): n is a, c, g, or t
  misc_feature (187)..(187): n is a, c, g, or t
  misc_feature (221)..(221): n is a, c, g, or t
  misc_feature (239)..(239): n is a, c, g, or t
  misc_feature (284)..(284): n is a, c, g, or t
  misc_feature (296)..(296): n is a, c, g, or t
  misc_feature (299)..(299): n is a, c, g, or t
  misc_feature (319)..(319): n is a, c, g, or t
  misc_feature (325)..(325): n is a, c, g, or t
  misc_feature (338)..(338): n is a, c, g, or t
  misc_feature (346)..(346): n is a, c, g, or t
  misc_feature (355)..(355): n is a, c, g, or t
  misc_feature (406)..(406): n is a, c, g, or t
  misc_feature (429)..(429): n is a, c, g, or t
  misc_feature (449)..(449): n is a, c, g, or t
aaaagttcctttncccntctcnatgataggatcggaagcttccntcctgttgggcatgctggnncaccaanagaaggatnaaaagggcatgcctgtgncagctcgtntggtgtttgtttttggtcctaataanaagctgaanctgtctatcctctaccnagctaccnctggcagnaactttgatganattctcagggtagtcatctctctccagctgacancagaaaaaagggttgccnccccagttgattggaaggatggggatagtgtgatggtccttccanccatccctgaanaanaagccaaaaaacttttcccnaaaggntttttccccaaanagctcccntttggcaanaaatacctccgctaccccccccacccttaagttttttggaaaagctggtgntgtgagccaaaggatgtcagctnccaattgtgttttcctgcancaattccataaacccatcctggggtcatcccacccaaggtttttaggttgctataccaatggctttttaaatgaaaatggcccta

SEQ ID NO: 588080 - DNA, 136 bp, Homo sapiens
tagagaatgcaaacgtgattacctcaagtcactagaatgtagactcagaggtataaagagtgttcactgtacagccatggtgcggtggctcacaccatgtaatcccatgctgctcagagaggatgagtgcagaaaa

SEQ ID NO: 588081 - DNA, 186 bp, Homo sapiens
actttgagaggctgaggtaggaggacagcttgagaccaggagtttaagaccagcctaaacaatatagtaagacccactctacagaaaacttaagaaaaaaaaattttttaatccatgcaactttaatatttctatcatgcgtacatgtacacataacatacacgttcaaatgcagaacataggaat

SEQ ID NO: 588082 - DNA, 367 bp, Homo sapiens
  misc_feature (297)..(297): n is a, c, g, or t
  misc_feature (325)..(325): n is a, c, g, or t
cgcacgtgtgtacatgctttgtagagacagggtttccctgtcttggccaggctgatttcaaactcctgacctcaagtgatctgccagcctcagcctctcaaagtgctggaattacaggcgtgagccactgcgcccagcccgtggagtgcctatttctaagtgcagctaaaggaatgttcatgaaacttatagctggacagctggaaattaacaattcctggggtcactcacccagggagaacaagatttctctagtttgctggtagagattacctacaggctacagaagaaaacagngttatcttggttttcctccctttctttnttcctttcattatagctggacatgatttattgaatgcccatg

SEQ ID NO: 588083 - DNA, 447 bp, Homo sapiens
  misc_feature (283)..(283): n is a, c, g, or t
  misc_feature (390)..(390): n is a, c, g, or t
  misc_feature (414)..(414): n is a, c, g, or t
  misc_feature (427)..(427): n is a, c, g, or t
actatccaagcatttattcattactagtttttctagtgagtggggtatacacagatcatttcagttagttctgttagccctaactcagttatcatgcagtcaatcaagcttcagattcaaagacaatcttttatccagaacattttagatcctaaacctaattttgaattgctcttaatttctattactgcaattctcttaagattgaagctcacaaaactgaaatttatcatcctactcagcaagtggctgaagacacatctacattattctccttggaganctgctttcaccaaggggtgggggtaaatgggataagttggactaaaactaggctgagatgttgggatgggcctccctccagctatccacttcaactccttccccagntttcctccactctactggcaaatnttccaaaaccagnggccgcccaaggccgggctt

SEQ ID NO: 588084 - DNA, 930 bp, Homo sapiens
gctccttgctaccgtcttctcctgcatctggaagatccacccttctctctgtaggagactgcggatcactgctcgagaggcgtccgtggtggatggacccaatctctgtaactggaggctgggagcctccgaagtcccatccatacttctcgcgtgatcttgggtaggctcgtcactggtatctcattttctggagatgtttccgcacgagtcatcaatctggttttccgccgcagccctgagttttgaggcaggggtgccgcaacagcagagtcctctggacctgacaggagccgcagttggaaacccggggagcagagccaggtggcccacggtaccaatggccattcatgtcaccggcggtctatgactatcactggcaacatctacatctacaatggaccagtactgggggggaccaccgggtcctggagaccttcccagctacccccgaaacctccataccccattcccgaagagggggacccctggccctccgggctctctacaaccccaccaggaagatggcaaggctttggacctagcggagacagagcactgtggtgccacaccctctaaccaggggcccatggaacccatttatcacccatgactgacggatgtttgaaacagggcggaagaaggcgggcacaggcacctttcttcctttgaggctggctgccacggtgggattcacaggggcctgagttaggccgggtaagctaagcctacgggattagcctcacccttctggagtggtgcctgtggtcgggtgctccacgacttcctatgcgtgaacggggccggacccaccctgggtcactagcggaggatttactggctacgccgccaaacggcacgcactaaacccaatgtggcacaacggcacggacacgatagccctcaacgtgttcgtaaatatcactccct

SEQ ID NO: 588085 - DNA, 232 bp, Homo sapiens
  misc_feature (105)..(105): n is a, c, g, or t
  misc_feature (200)..(200): n is a, c, g, or t
  misc_feature (215)..(215): n is a, c, g, or t
aatcccaggatcccagacacctggtgtgggcttcaggtgggctcgtgcccttggccctcccagctaagtggttctgctggaggaggcagaccagagtgggacctncaaagcccccacaaccctgggccgagacccccaaaaaaacaactttaagggtgatactatcctcaggaatccttgcaaagtaggaaaattgaacnccagtgattgttttncaagatagctttatgtt

SEQ ID NO: 588086 - DNA, 214 bp, Homo sapiens
taaagggcacagaaatttagtatatcaagtttagtgtgatgaacactatgttacccactgtgaatgaagtacaagtatactactaacaaacatactatcttgctacatatactaacttagatagatttagaattgtcaagttaataccactacccttaataccagagatccaattatgtgcctatccatcatgaagagttctttaattgtttag

SEQ ID NO: 588087 - DNA, 301 bp, Homo sapiens
cagttaacttcggcctggcccaggtgggtgggtgggctctcaaattcagctctgtgtaaaaattttttaacggggtgggctcccaagttccccttttttgtgaaagtgaaaaattaggacaactgtgttttttaaaaccccctttctgtttcccccccatgggcccccccccaggtgggggaggaggaaacccctgcatttgttggctcagggccccagcctgtgcaaacagggggcctgggctgttgtgtttcctgtttgtgccgatttttattaaaggactcccttttggtgggcctga

SEQ ID NO: 588088 - DNA, 352 bp, Homo sapiens
aattaggtcacgcagggtgtgacaggaactattgcatagccaagaaagggggggaaaagccgacaaatatgggcactccaggctctagtggtaagtactgcacactggagtgtaaggggatatcagaaaggagaaaaatcgcgagaaatgcagtatttgagccttgataacagactcatgtctcatctcttgctgcaagcgtggggaatagataacaattttatcaacgagacctgtatacattactcacctattcacctcattcctagccacctttggttgggtgagtataaggaaaaatgaaacaaacttcttgtatgacaggaactcatgatttactatatacatttgg

SEQ ID NO: 588089 - DNA, 456 bp, Homo sapiens
cggcgactctagaggaccccgatcacgtgcattgtgtgatattccccttcctgtgtccatgtgatctcattgttcaatttccacctatgagtgagaatatgcggtgtttggtttttgttcttgcgatagtttactgagaatgatgatttccagcttcatccatgtccctacaaaggacatgaactcatcattttttatggctgcatagtattccatggtgtatatgtgccacattttcttaatccagtctatcattgttggacatttgggttggttccaagtctttgctattgtgaataatgcggcaataaacatacgtgtgcatgtgtctttatagcagcatgatttatagtcctttgggtatatacccagtaatgggatggctgggtcaaatggtatttccagttctagatccctgaggaatcgccacactgacttccacaatggcacgtggat

SEQ ID NO: 588090 - DNA, 437 bp, Homo sapiens
tgtgtcgaattggtgccggtcctcgttcttaagctcaatttgcttaacttggtcaggttggtgttctgctatttccctttgtcccgcacccctaaaggtcaaaaaggaaaatgtaatgtttcaaaggttgtgttcttcggttgttatggggtcacgacgtggttcaatgaagggtgacaaagggttccgtgtcagttaattattagtcatcaggttcaagattcttgtaaaggaccttttgttcctgcgtggagggcaccgagatacgtaccggacggtgactacttagtttaagaattcttggatgctggcagactatgggaactcctctcgtgggagtatcttagaggtcgtagtccggagtcaaaagggtagacattttctgtcggtacgtttcaccctctaggcgatccgaaggtctagcttcagtagcgcga

SEQ ID NO: 588091 - DNA, 924 bp, Homo sapiens
  misc_feature (409)..(409): n is a, c, g, or t
agtccggccaaggttattatgtgcatctgtatatttcttcagtacttgtaaacagagcgagcatgatgcttgtttaatgtcctgttcttaggctcgttagagccagctgttgaaacgttggtcttaccgtggaacggaggcgtggcttggcttaggcacgcttgatgagtaagtgagggatgtctccatctagagatcaccaggcaagagagtaggctgcaccaggtacgaggctaaagcccctggggtaacagtcgccatcgctaccgaggtgaaaacaataaaagctatgtggttgagctcaggcctctcgtgcctggtgtcagagaaggcagagcccacagtaggtgcaggttgcaagggccctgggaggggactggcagggaaggtggtatagatggccctcagnattgcggggcccagagcaggtccccacctctgcccgtccatcttccctggctccagcctcattctctctttagatttaactatgcaaagagaggaggttgagagtgttctggcaaactggagctctttcctggtccttcctgcctccgatggggccacctgtgtcggggcagagtgcccatgtttatggagatcagaggtgtcctcactgtgtggctggagggagctcgaggcgggtagcaggagtctatccctggtgtccctgcgctggcggtcgtaaggggggtcttaagagaccctccgtggatggcggggggcccgacatggactggagtggagggacgggaggtagggccaagggaacgaaagtgagcgattcggtgcgggtaatggtggcccgtgaccgagcgggggggcgggagatcacacgctcgggagagggcaacgagaggcaggtcagcaagggaagggggcagacaccggggggacaccaaaaggggggggaacacggagcgg

SEQ ID NO: 588092 - DNA, 367 bp, Homo sapiens
agcgaggaccgatatttccttagtttattttgaaacctatatgttttgaatgctctggtgtctcttgtgcctttgacttcctttactcccagctcaggacctagagtctagtgtgtgtggctggtgtaactcacccctgtaccaacttgtcagatggctgtggtcccctgggactttccaggcactgtagcaggaagaagcagactgggagcatgcaggtgcctcttcctctggattccagggggcacagcaggacagggaggaagagggtagcaggaggagacaaggggcatcagcttattaccaattaccaggccctttgcaaacacaaagcctccacctaaataataaacgttaatttatccag

SEQ ID NO: 588093 - DNA, 282 bp, Homo sapiens
  misc_feature (178)..(178): n is a, c, g, or t
  misc_feature (254)..(254): n is a, c, g, or t
caaggggaggtcacctctggcttttattcccttctccgcaggcccaggaactgcatcgggcaggcgttcgcatcggcgacgatgaaagtggtcctggcgttgatgctgctgcacttccggttcctgccagaccacactgagccccgcagaagctggaactgatcatgcgcgccgaggnggctcttcggctgcgggtggagccctgaatgtaggcttgcagtgactttctgacccatccacctgtttttttgcangattgtcatgaataaaaccggtgctgtc

SEQ ID NO: 588094 - DNA, 222 bp, Homo sapiens
ctccactctctctttccgtgtcgtgctcccagatgacaaagaagagaaggaacatggtcgtgccaaataagtgtgccgcggccacgtgcagactattcgctgtgggggactgtgcccgatgcgtgccgcaggacgaggccattaagaaattcgtcattcgaaacatagtggaggccgcagcagtcagggacatttctgaagcgagcgtcttcgatgcctatt

SEQ ID NO: 588095 - DNA, 112 bp, Homo sapiens
gagtggttatcggtggatctgaatcacaatcaggaaatagtctttatctgcgtgcaaccatcaatttcaatttttcttcggagcgaattcgaaggaggtgagatcgttctgg

SEQ ID NO: 588096 - DNA, 949 bp, Homo sapiens
agccgcgcgtgaaggggcggcggaggaggagaggcgcagcgaggacagagagatcgggtgtggagaccgaaggccgtaacctcgttggtgaggcctatgtgcggagccccgacatgtgctgaggcactgtgggcgtggacttccggaggaagcctgcagcgcgctgaggaaggggaccactccccgctctcctgggcctcctcagtcgaacaaagcagcaacagcagaggcagtgagtgatgaggagatagatcgagaaggcctggaataatgcaggccgatgttaaatgatgtaaatttcccagctgtaatagcatagggattttggaagcagtctgctggtggacgtgggacatcagtggggcacaagggttctcctgtccctggttcagagctgtgaataggctttcaccgtgtgcgtgttcctcggtgatggccttgtttcggggttgctgtgggtttgaggtgggaagagggccatctgcctgaatgtaacctgataggctctccgaaggccctgcgggcctggctgtgtgtgtagcgtgatggacaggtggtgggccgcgcgtgtgccgggtgcgtgtatgcctacatgtcccgtggctgttgaggcgactgtatgtcagcctgcacccctcccgttgtgctcatagagtgctccttttgaccattttcaaagaaatatggatggcgagctcctaggcctcttggcttacctggtagagggcggcactgcgcgaacgaggtctgcgtgggtgtggattggatgctggggtgtgggggttggaagctctctgtggcccacttgggcacccacgcgttctgtccacttctggttgccaggagacagcaagcaaagccagcagtacatgaagttgctattaaatgacttcggatatttgtgtgcataagctctgtgattactatatcgccgggccgccggggggct

SEQ ID NO: 588097 - DNA, 154 bp, Homo sapiens
agtcagctaagaggttctgatgtggtctggtgcagatgaatgaatcgatggaccaagctgagggcaagggtagcggtggggagagtgagatcctggaaatcttttggagatggagctactggacctgtgcattagaaggatgaggtgttcaagg

SEQ ID NO: 588098 - DNA, 626 bp, Homo sapiens
  misc_feature (117)..(117): n is a, c, g, or t
  misc_feature (169)..(169): n is a, c, g, or t
atcacatcggtactgggatgctggagaagacggtggaaaaatgctgatctccctgaatggcggagcagccgctggtggtcagctgcattgcaagtcggggtgcggaagactcacaanctgtccttcaggactgtgagtcctgcagggcgtctatcgaccagcctcgtgnccccacatgctccgcgctccagcacgtgttctgggggaggctgttctagccttctctcctgcactggctgaagtgacgcgtggcattggccgtggccgcatggtcatcctgcgcagctaccacgaggaggaggcagacagcactgccaaagcccatgttgactgagatgtgccttggagaggaggattccctgcagctcgagcccaggaaggggttggcatcacttcctgcctcaaggaatccggggggctccttgagctttgcagagtcagcaaacttgaatcttagcattcattttggatgctccaggcccgccatcttcaccatcaaggactcttggctggacggccactttggcttgggcacactctcagaaaccgactcgcactcccaggaccgtggctccccagagggtcaccagccagggcctcagctccaggtcacaggaaccccaccg

SEQ ID NO: 588099 - DNA, 261 bp, Homo sapiens
tggggtggcccggggggggggggcccctggggggggggcccccggtttttgggggggggggggggggggtgtttttgggggcccgcccccttgtgtttgtttttcgggggggggggggggggggccccccttttttttccccccggggggggtattttgggggggggggggcggggggggggggtttttctcccccccccccccccttttttttttttttgggggggcgcgggcgggggggtttcccctttttttttttta

SEQ ID NO: 588100 - DNA, 1639 bp, Homo sapiens
gctctgcagtctcgtcgcgggcaggggcccaggcttacctgtcgaatagactgtctactgggttcgaccgagactccctgtggcaacgtctcacgtctgtgcagaggggtgagtcatctctcttcaacatcgccgcaacgtttgcccgtaatgggcgctgcttggtcaacacggccttactacctaccacctgtgtgaaaatgcctgtgagccgagcacacgtgccttactgcaggcacttctgaacacaaccacgtttccatatgcaattgcacccatgaagcgacgggtgggcacttcgacgcggcacagccctccaatttggtccgaaatctgcctttatctcgtgtggcccacttgccggccctgggcgcgaatttgcccccaggctagccaccacgcggcactcactctttgccctttttccgtgcctttgacctcttcggtagcttccccgcgctcctccgcgctcccacgcgggccatgcccttctggtccacctcctcaggcaccctcttgccccagggctccagggcgccctattgtgctccctcgcggccgcaccccctgcgtggggcgccccggccccttccacttccccgggccagctcccctcaatttctgttccgcgccgccccagtgcgcgtggtctctgcccccgccgtacttgcgactctgcccccttttcacctgcgccactccgctttcccctgttggcccttcctccccagttgatacacgtggccgcgccccgttcgctcgcccaaccctggggctcccccggacacgccgctactccctccgcgcccttccgggctccgtgcccgctgccccccaccgtgccgtcggctcgtccccccttcaacgcgcgtccgactcccccaggctgtcagcccctgggccacggcgcctgcccgtcttcacacccctgtcggacgttcgccaactcggcttgggccccacccgtcggtcacactgccgggccccccggtggcgtccactgtgcacccccatactcgtggccacgcatctacacacttctgcacgcctgcaccgcgccccactttcttcgcggctgtgtcaccctcacacctacgtccccaccgcgccctggcaccccttcgaccttgtggcccctcgttgtgtctccccaccctgcgccgcgctaactgtcacaacggcagatcccctctcaccgcgatgaccctgtgtcgccctcgccgggctgtccgatcccttgcgcgcctcgtctcctgacgcacggtcttggcccgcttgttgtgcccgcccctgtcgcgtcggaccccagccgagctagaattccgctgcggtgaagtcctctccccgccggcccgtgcacctcctcggcgctctcccccactgccactccatccggtccctgctcggcgtgccttgtcgtttgcccgcccccatgcttggcgggcgtctctccactcccatcactcgggtgcgccccgcccccacgtgcggatgcgtcgcgtggtgcgccccccctggtcgttcctcgccgaacaccgcctccctgttctgctgcttcccgggtgtttccaccacgcagtcgatccgcgccgccccaccttgtgtccccgtcggttgtccacccctcgcgcgtgcccac

SEQ ID NO: 588101 - DNA, 416 bp, Homo sapiens
cttttgtaggatctgcaaagggatatttctgagtccattgaggcctatgttgaaaaaggaaatatcctcacttaaaaactagacagaagctctctgagaaacttcttagtgatgtgtgctttcatctcacagatttgaacctttcttttgaaggagcagtttggagacagtctttttgtagaatctgcaaatggatacttggagtgctttgagcgctatggcgaaaaaggaaatatcttcacattaaaactaaacagaagctttctgagaaacttctttttgatgagtacgtacatctcacagagttgaaccttgcttttcattgagcaatttggaaacagtctttttgtaaaatctgcaaagggatattgctgcgaagcttgagaactgtggtgaaagtatcttcagatccagcg

SEQ ID NO: 588102 - DNA, 102 bp, Homo sapiens
  misc_feature (102)..(102): n is a, c, g, or t
tgcgcgccacttgccaggcgttgcaacagcaccgcagcgggctacaggcgccaagctataaacgtcggtggtggcctggcggtgtcaagttagggtggggcn

SEQ ID NO: 588103 - DNA, 153 bp, Homo sapiens
  misc_feature (144)..(144): n is a, c, g, or t
cttggacaactggaatgtttcagtttgggaaatctggatgccaaacgagattggggccatgcaaggactatgtggaggctatgtggttgatgttgcagaatgacgagccggagacttcgttatagctactggggaggtccatantgtccggga

SEQ ID NO: 588104 - DNA, 117 bp, Homo sapiens
cagcctacccccagccccgagtgtgcatcccggtaaaaaagctgagggctctcttcagggagcagcccatttaggtttcttttgttgttgttagggagaatacccctcttttttgga

SEQ ID NO: 588105 - DNA, 519 bp, Homo sapiens
  misc_feature (85)..(85): n is a, c, g, or t
  misc_feature (143)..(143): n is a, c, g, or t
acaaccaaaggaggggcgcggcgtttctttttctttttgttttggtggttttttttttttgggcgcccgcgggtttacacaagancaaaaagggcccccccggggttgggggggccctcccactttttccaagggggcggggnttttggccccgtgtgttttttttttttctttcccaaaaaagggggggttggtggaggggggcccccccctcctttaaaacccccccccttttttttttggggggggggccccccctttccccccccccccccgggggggggggggccttctttttttgtttattttttgaaggcccattttttttttttttccccccacccattttttttttgtttttttttggagagaggcgcctggggcccccccccccccccttttttttcccccccttttggggttttgggggtttttttttcccccggggggggggggggggcccgggggtttccttttcccttttttttgcccccttttttttagggggcccccccttta

SEQ ID NO: 588106 - DNA, 148 bp, Homo sapiens
agagcaaggcacatgaggggtcgctgtcactctattgcgagtggcttcacacccaggtggtcagtgcagcggcacggttgaatgaggccatgactttggccacccgcatgcctgctgacctggttaaatctgcaattccacaggggtg

SEQ ID NO: 588107 - DNA, 331 bp, Homo sapiens
gctgtatctcgtgctcttgtctagcttgggaggttccactcagtatcctaccccacccgctccttgcaagggaccagattctaccacagcagcagttacaaaacaccttccccaggctggcacgtggtggctcacgcctgtaatcccagcactttgggaggccaaggtgggtggatcacttgaggtcaggagttcgagaccagcctggccaacatggatgaaaccccatctctactaaaaatacaaaaaattcagccgggcgtggtcagcgggcgcttgtagtcccagctactctggaggctgaggcaggagaatggcgtgaacccgggag

SEQ ID NO: 588108 - DNA, 1212 bp, Homo sapiens
gctggctcgcaggcgtgtgcgggcggcggacccgttcgaggacagcgcgggcgggtcgggtcgcctgtgggctccgtagacaggaggacgccatggacgacaacggagttaacttgaactactttagagatctcagactgacagacgaatgatcctgaccatgtgactcagcacgtggcatgaccactccggaccgtttgactggacgttcttgaacgatgagagtcaaagggagaggacaatcgcagggatcatgacgggcagaaatgctcacacgagtgcacagtaggaacacccgtgtgtgggatgttggaccgtcactactggtgagcgcagtgatccgtcgtgggccagtggagagcatcattgccgtcacgacattgcatccaggtgctgtggccatcgcctgggacatacatcccgatttacctccgaaaattgtcacacagagcagcatcaatgaatgtggaagcggggtgcagcaaaacgttttaatacgtacaaggaagcaacattatcgacgtgatcgaaggacacacacaagactgtgcgagcatcgtgttgaccactagctgtatcagtcaaagacgactggatgcgcacaaataatttgacctccacctgccatacgtcccagaagatggatccatgcagagctcctgggcaacagcaggactgtggagctggccaacgcacagcgcatacaagtgtactagcgtcaaccagagtacacacgacttgactgtggtcagcgtcaaggaacactggtacacatgccgtctggcagcctcaaaagttcccatgttcacatgtaggtgctagcatgctggctgatcggctacatcaatggagaacagcagatcttggtcatagttgagtgctgacaggagtggtggaaaaacggaggcattatacacaagcatggacaccaaacagatgaatgagtgttacaacagaacagaaacaagctgcaaggtggatgacgcacaattcaaggaatgccggcacatccactacacacagacgagtcacaatcgacagcatagggcgaaccccaaggatgacaaatgaaaaggccaagagaaccaggacaaacagcaagcaacaacggagacagccgggaggaaccacaagaataccacacaagaaagagacagagcagaaaaaaggtctaaacaatagacaagaaggcaaaagagatagaacaaacca

SEQ ID NO: 588109 - DNA, 862 bp, Homo sapiens
  misc_feature (39)..(39): n is a, c, g, or t
  misc_feature (115)..(115): n is a, c, g, or t
  misc_feature (157)..(157): n is a, c, g, or t
  misc_feature (198)..(198): n is a, c, g, or t
  misc_feature (228)..(228): n is a, c, g, or t
  misc_feature (254)..(254): n is a, c, g, or t
  misc_feature (274)..(274): n is a, c, g, or t
tcaggtagtcactgtattttatgggaaaacattgatatntattttccttcacagcttgaactgaacacaatattgcccggtttaaaaaaaacaaaaccaaaacattccgaaaatngtccacagcctcacgcctacctggcccttaccctcagctctnggctggggtctcccactatgccccatccctccttccctcanaggctggggtgccagaggtgtggatagaanaagagattctcaaagctggggcaggncccaggaaaagccacttgancgacctgggcagtgaggggaagcagggggtggggggtaggagtaggggaggtaggtggggggagccagatgcaatgaacagaaaaggggaaaaacacccagacgactgaccggcccacatggactatactggtcccagaggcgaaagtcagaacccaagggcacggatcatgctcatccgatgggggagctatgggcgcaggcaggtggccgagggaagaggcagggaaacaggcgcacggaagcacagatgtgaggaaacggcgccaagtcaccagtgaaaaccgggagcgtgctggcggaccaggaccgcacaaggctgctagaacgctgccgtaccctgggggcacctggccgacacacacgggtgaaatggcagggcgacgttacacacatgagaaccacacggtgggatgagcggcccaaaatgtacaccaatcgtaccccaagcccatgaaggcgtaacccacacatgtgagtacgtgaacagaaagtagaagagtcttacaggggcccaatgcaggggggaacagaaagacacacacaagagcacgcacgcaatattacgaacaggcgaacacatacacac

SEQ ID NO: 588110 - DNA, 576 bp, Homo sapiens
  misc_feature (39)..(39): n is a, c, g, or t
  misc_feature (115)..(115): n is a, c, g, or t
  misc_feature (157)..(157): n is a, c, g, or t
  misc_feature (198)..(198): n is a, c, g, or t
  misc_feature (228)..(228): n is a, c, g, or t
  misc_feature (254)..(254): n is a, c, g, or t
  misc_feature (274)..(274): n is a, c, g, or t
tcaggtagtcactgtattttatgggaaaacattgatatntattttccttcacagcttgaactgaacacaatattgcccggtttaaaaaaaacaaaaccaaaacattccgaaaatngtccacagcctcacgcctacctggcccttaccctcagctctnggctggggtctcccactatgccccatccctccttccctcanaggctggggtgccagaggtgtggatagaanaagagattctcaaagctggggcaggncccaggaaaagccacttgancgacctgggcagtgtgaggggagaacgcacgggggtgtgggcgggtgtggcggtgtgggagacgggtgggtgcgggggacgccaagatgtgaaatgtgaccaaggaaaagggggacaaaaacccagagacagacctgtgaacactgtgcgccaacaattgtgagacttctcactgtgtgtgtcccccaagagaggccgaaaagagtctcaagaagagccacagaggggcccagcggatctcaagtgtctctctctcgcagcgctgttgggggggagagtattagtgggagggccgacagcca

SEQ ID NO: 588111 - DNA, 1749 bp, Homo sapiens
  misc_feature (305)..(305): n is a, c, g, or t
  misc_feature (1446)..(1446): n is a, c, g, or t
ggaacgcgacagcagggctgcgggccctccacgtgaagcttccacatacgtggggactggcgacgagattggaccgtggcaacgcaagtggacaacttggaggaatcatatcaacagtactaacatggtctgcagatgtatacttacggggaagaacggtacagccaatgcgcatgaaagacatgatggcgcagcatacacctgctgcccatggcgctcagccaacgcgggtacgcgtcattcgatgtgaggctgcgtagaagactgatggcaatccatgatgcgctgggactcatcgactggcntactttgtactataccaggaaggcgaatcatgtacgggagttatgagcgaggaggctcgtccatctaagggcatgatcgataacttgttctatcctagtttgtgcgtacgccgagattaatactgtttctacaacccgtggcacgtgtccaacatcgattggttccgctccagtgtgcctcgtgtgggtgtgtgggctgaaggcgagtgtgcgcttgtgccggtaacacgcctcgaaaaccattccataatgatcctatggcctcgccacatcgacatgggggcctgtagcacagactacgtcctatgggaaccttaatcggcgggcataacgcagcatttgcgtagggtacgttaagggtgacaccccatgcgcggatgcgttcgcgtgcatctggtgagaacctttccttgggggctcaatgtcctgtctcggtccctatgtagttgggggccctttgggtctatggcacttttgggcgcgatccacgtggcgttggcgggaatgccgaagtgggtttatcaaatcgggatggcgttttgacccctacgttagctaggcctcgaagggacgttttcgaccagttgcactaggcatttccctaatgaggcctcggttgtggccaaaggcgcggcttcggtaactctataacttgggcgcactccatgcggagcggacgtacagtcccagttgtggggaagagaagaccatttagattggctttttccctagagacaacttcgctggagggcggcgcaaacgcatctgtttggcattgtggcgcccccgttaaaaagttcttttcgcagtccaaataccttttcacacactgggtcggcacaccccaaggagcgtccaacatgatcctcttcaatcctttacacacactttacagttccaaaccggtttcccctgaagaaacatgaaagggggcgggaccctatcggaatgaagaaaaccgcgagtggcggggcgccacacagggacaaggagggggcaggcccagtcacacgagatgaacaagcagacgccccaggaaggaggggtgcgccaacacgcccgccaggggggcgaagagtgcgcccagcgatgagataacaaatagccagaagacatatgcagcagcaacaggagcaggtcnccgcactcagcgcctaagacaaaaacacaaccgcgagcgaagggggcgaaagtgaggagacacacagtcgacgacgtagaaagaaacgacgcgcgcagagaaatctcttcagcgccgcgtgaacaacatattacactcggtacttccctgctcgtcattacacagactgacacgagagcaaaactgatagcaatagaacagaacaccacacgcaagtaaggttgactaaaacaacttcgtcgctccgctacgcccttcccacgttgagtcactcatcaagaagaagaaagagaaagagggacc

SEQ ID NO: 588112 - DNA, 128 bp, Homo sapiens
ggtggctattgcggtgccactggtgtcggcagaggcttaggctgggtggcggacgcagctactcctatggacagatggtctatggcgttggacggtggctatcagttccacgcagctggcagagccat

SEQ ID NO: 588113 - DNA, 995 bp, Homo sapiens
  misc_feature (490)..(490): n is a, c, g, or t
  misc_feature (519)..(519): n is a, c, g, or t
gctggagtttggggcacagtgaggtactgcagcttcctccacagtccggcatgtggagcagcaggacctgggcccttctgcctgggcaggagaactatatagtttggtaccctactcagagacatctattttgctgggctccaatatcgcctagacatgcgcgaccaactgttagactagtagatgttcacataccgtgtactagtgcgtttcgtctcgcttatggagactgtcctaggtgggcgcgctaggatccttgtatcattgccagacggtcccagaagctacaggggctcctatggctagagtggagcctaggagttggggcccctggaggccctcgtgcgcgcgcgctgcctggcatcttatggctcgcgcatggccactcgagtcgctcgtgcccctgttgagtacacgggacatggccatgggtgctgtctcgtgctgtcactatcgccgtcttaaaggagagcgatggctcatatagcantcacgggggatcccaaggcgaacttgggngcatgggggcttggggaccggtatcggggttgtcacccattggttgggcgagattgtgggaggtagatagcgaaggcatgcgctggaggtatcgccccaactggggcccatggatgccatcttgactttttaggggaacacccttgatctacaggatagggtctagctgatgttctcgatcatttcacatttggctcccattaggcccccaggggggcctcggatttccctagacggaacctcgttgttgccatccctagttgaacgtcaacatgggaatgtggcttagaggggggacatgcccttactgttcccttctttcgaggatggtttggatgggggaccaccttaatgtcttggattggcgagtcacctttataggagtaaaaggggcgtcgtaacgtaaagggattacatcccttggatgacacgccattggtgggcgtcatttggtaaggggctgtcgtgggaaagga

SEQ ID NO: 588114 - DNA, 341 bp, Homo sapiens
cccaccctaatatgtaactaacctgcacattgtgacatgtaccctaaaacttaaagtataataataataaaataaaatttggaaaaaaaaaaacttcctgggctcggccagacgtgggggttcacatctgtaatccgagcactttgggagaccgaggcaggaggatcacttgaggtcaggaatttgagaccatcccaggcaacaaagggagaccttatttctactaaatacgtgcttacatacatacatacatacatacatacatacatacatacgccaggctgcatggtggcgtgagcctgtagtccaagctactcaggaggattgcttgagcccaggag

SEQ ID NO: 588115 - DNA, 382 bp, Homo sapiens
ggcgaaggctggtcttgactcctgaccttgagatcagctcacctcggctcccaaagttggaattactggcgtgagccactgtgcctggccgacgggatcctttataagagaggtagtgtactgaaatgaatcttaaggccagagaataaaagtttgattgccatacatgccaaggaatttatatttatatccagaaaccaatgtagagccattttagaaatattctaaactggaaagtgacatcagattttccttttatttttattttttgagacagggtcttgttctgtcacccaggctggactgcagtgacattaacaaggctcactgcagccttgaccccctgagttcaagctatcctctggcctcagcctcctgtata

SEQ ID NO: 588116 - DNA, 226 bp, Homo sapiens
ctcttactatgtgcccaggctcgtctcaaattcctgggctcaagtgatcctcatgcctcctaaagtgctgggagtaggaggtataagccacctcacccagcctgattcactatactatttttatttttatatgagatggagtctcgctctgtcacccaggctagagtgcagtggtgtgatcttggctcactgcaacctctgcctcccaggttcaagcgattctccg

SEQ ID NO: 588117 - DNA, 697 bp, Homo sapiens
  misc_feature (1)..(1): n is a, c, g, or t
  misc_feature (73)..(73): n is a, c, g, or t
  misc_feature (99)..(99): n is a, c, g, or t
  misc_feature (135)..(135): n is a, c, g, or t
  misc_feature (137)..(137): n is a, c, g, or t
  misc_feature (151)..(151): n is a, c, g, or t
  misc_feature (157)..(157): n is a, c, g, or t
  misc_feature (163)..(163): n is a, c, g, or t
  misc_feature (171)..(171): n is a, c, g, or t
  misc_feature (173)..(175): n is a, c, g, or t
  misc_feature (178)..(178): n is a, c, g, or t
  misc_feature (180)..(180): n is a, c, g, or t
  misc_feature (183)..(183): n is a, c, g, or t
  misc_feature (189)..(190): n is a, c, g, or t
  misc_feature (195)..(195): n is a, c, g, or t
  misc_feature (204)..(204): n is a, c, g, or t
  misc_feature (206)..(206): n is a, c, g, or t
  misc_feature (220)..(220): n is a, c, g, or t
  misc_feature (352)..(352): n is a, c, g, or t
  misc_feature (357)..(357): n is a, c, g, or t
  misc_feature (361)..(361): n is a, c, g, or t
  misc_feature (390)..(390): n is a, c, g, or t
  misc_feature (412)..(412): n is a, c, g, or t
  misc_feature (415)..(415): n is a, c, g, or t
  misc_feature (442)..(442): n is a, c, g, or t
  misc_feature (601)..(601): n is a, c, g, or t
  misc_feature (603)..(603): n is a, c, g, or t
  misc_feature (606)..(606): n is a, c, g, or t
  misc_feature (695)..(695): n is a, c, g, or t
ngcgggaggggctcaaacactctttggtgctccagggagcttggatttacctgccaaaagtaaaaagtaaacncaggtccgtgggtgtgtctttaaaanacagccaaactggctgggctgtcagcagaaaggagngncctggacaggaggnggcccnggtggncgcccaangnnncgngngcngggggnnggggnctctccggngnggcgcgcgtgcagnggggagaccttgcctgcggggccctgcccccaaggatggtgaggggcgctccgacaccgatcagcctgggcctctgggcacaggttgacatctgggggttcctcaggccagaggtggcgggcttgggcgcgncccgncctnggccgcggggggggggccggggcgggggnctggggccatgccccccgtgcnccnggcctcacgtggactccagcgtattgngtgggacaggttgtggttggtgggcgtggaaaagtagagctgctcactcgacgcgtggttgtcgcacgggctgcttagccccagcgtccgctcaaagtccagcagctgccccatgaagttgaagttgggcgagatgttggactttttcctcttgacaantngtnggcgtcgttgagtgacaggttcatcttctgcatcagataggccacagtgaccgtcactgagcggctgagcctgccaggcagtgcaccanga

SEQ ID NO: 588118 - DNA, 117 bp, Homo sapiens
ttttttaaaggaaaaaaaatttttttttgggttttaaaagtcagctgtatgagccgggggggccctatcataacctgctgatatgatagaaatccattaattttttcctttccggga

SEQ ID NO: 588119 - DNA, 402 bp, Homo sapiens
gatcaaagtagcttactatatctaaactgtaaaacaatatagtttctcctgaacacctgctttccttctgggagtctggaattttggtatgtgccaggcagagactacctttgtgaccagctcccagtaaaaaccccaggcactcagtctctaacaagcttttctggttgacagtgtttcacaagtgctgttacaactggttgctgggagaattaagctcatcctctgtgattccactgggcggaaggattcttggaagcttgcacttagtttcccctgacttcaccccatgtgtcttttttcctttgctgatttgtttgtatcctttcactgtaataaatcatggccgtgagcagaacctgctaaaacaaacacaaaacaaaaaacaaacaacaaaaagag

SEQ ID NO: 588120 - DNA, 341 bp, Homo sapiens
ctcgttcttggatggccatgactggactgccgctcatccgtccgcctcgggcagcgtggcttgcacgggcgcatgcgcgttgatcagactctggatctcctcaatgctgtggaccatgaacatatcttgcagatcctccatagcgccctccatccaattgttgaaaggagcagccctcttggcaaactccaggtgaagctgatcaatggtttctagcaatttctccattctctctaagggcttctctcctcttctgagtaagcgttcccagtcggtcccactggtccacaaattttctggcaccgatcattgacattcacagaggcgtaaccgagctcgaa

SEQ ID NO: 588121 - DNA, 274 bp, Homo sapiens
tactgaaactgaaagtgtattgaaaaagctgattgcaaaatctcccttagctccgtagcattatataaaataccggaatccagttcctgccggcattacctcgtccagctcaatgtgctgtacgtccatatagtattcctgtgcaagctgttgtatatctaatgccgggcttatatccatatttacaggcggaagctgtgctgtatcgccaataaatatcattttacagttgtcgccattatatacatagctcattaaatcgtccagcaccgat

SEQ ID NO: 588122 - DNA, 136 bp, Homo sapiens
atttctgtgcggtatcacctgggaacggaattgctaggttcttggatagatttacttttttttcctgagacggagtctctctctgacgcccaggctggagtgcagtggtgtgatctcggcacactgcaacctctac

SEQ ID NO: 588123 - DNA, 1145 bp, Homo sapiens
ggtataaccctaatgatgaatgtagctccgagtcatgctaagtccttccgcagtgctttgagtgaaccgggtgatgctggaacctgtgggttgtaacttgcgttggactgtagaggagccgttgagctgtatcgcagtttccgcgatcccgaaggtcattttcaatcgcgactcgcctctagagctcacgaaatccgccgtcgtcgagaagtcagacgagtgcggtagttcgcctctgtgcttgcctcgtttttggactctagggtactgcttgtactcttcggtaccgtgcgcggtacgagtccttcttcgatcatcgtactctttgtgtccccttgcccattgactcgtatctgagcctctatttggttgtcttgctggttgccgtgtctccaggctgaggctggttcacattatgcccagttgccgcttgcgccagggtcgtcaggtgtgcgcgtcggtgttcgagcggttttgtagctctcgggagaggtagctcgtggccctgcgtcgcggtctggagctgttcaagtggttccagggaacgcgtgagccaccggtccctcccgatctttcgcgcagttccttcctgaggcgaagttgcgtccgatcggtcccccggtgcgcgtcgtgcttatcttggttggaggcccggattcgtctttggcccgctattgcttgcccttggtgttgcctcgcgcggtgcttgtggcttgataggtggtaggccttgttccgtgggaccctggggcccctggcatacgttttccggcacttgttgcctttagaaggctggttcatgagtggtgtggctatcggatgcactggctacatccttagcccgagctggagctgctaccgggggaagttgcctagggccgcattatgccattatatgaactaaagtacctaatgccgacatttgggaagggactttcggccgttcgtatagagatcaagtgcctcgtaaacgaccgattcgggaaggataggtcaggcgtgtcacatgggttacagaagaacgtaggtcaaaaaaccgattatgggtacgtacaataagaaaacacgctgaggaaagcaatcatacacaaaacaccgtgcctacagacctctcaaattttccttttctttactttctttctatt

SEQ ID NO: 588124 - DNA, 1040 bp, Homo sapiens
  misc_feature (499)..(499): n is a, c, g, or t
ctagatcgcgagcggtcgccctttttatttttgtttgggtctttatgtgcattaaactaacgcgtgaattataagttagccacacaaataaggagagtttaatttttttgtatggtggcttcatctccaaattcgagcgcgtggttagggatatatttctcctttcatacgagcacttttccgtgattttggcagtggttctcattctcccaaagataggtcatacctttagttttacacctcaaagggtagcacgtgtggtgggacaactttactgtgcaccagaaacagcgggcctggcaaagagggtggcacgagagggggaaaaggctgtgttccccctcttgtggtcgtgagcaataaactcgaggtgccccacaaccccgagaacacccgaagtatttctcgtggaacacattttatcttctccttttctataagaagcccggttttgtgataattcccaatccattgaaagagctccatccaagttctacanatttctcgcctcgctcacttatggggcggttctacagagacaaaagagctcggtgcttgtgcgaccccccactggggcaagcctgtggggagagacatgtgcagtgggcatacacagagggggcgtggcgcgtggaacacccgctctgtgacactgtgggacccaccttctcggtggccagatcagaccgagcgagcgtatccacgtggcgagacgaaaagctctgtggggccacgtgagcgcaccaagaagcgagaaggggcagtgtataacactcggtggcataaccaacctccccatgtggcgtacacccgagggcgtccaacccaaggggggtgtacgccttctgaaaggcagcacaaccgcggctacaacccatataaacacggggaaacacaccccagaaagcgccgagcggaaaaacaaccgtcgtcagcacaacataaacacacggggtggacactgacgccccacaaaagagctccccggaacacagtcgggactcacacggggggggagcacaaacatcccatcggggcag

SEQ ID NO: 588125 - DNA, 463 bp, Homo sapiens
cacattttcttcactccagtctatcatagctggacacattgggtttgctaccaagctctccgtccattgcgcaataacagctagcaagaggcatacgtgtgcatgtgtctttatagcagcatgatttatagtcctttgggtatacacccagtaatgggatggctgggtcaaatggtatttctagttctagatccccgaggaatcgccacactgacttccacaatggttgaactagtttacagtcccaccaacagtgtaaaagtgttcctatttctccacatcctctccagcacctgttgtttcctgactttttaatgattgccattaaactaaagagcttctgcacagcaaaggacactaccatcagagtgaacaggcaacctacaaaatgggagagaattcttgcaacctactcatctgacaaagggctaatatccagaatctacaatgaactcaaacaaat

SEQ ID NO: 588126 - DNA, 422 bp, Homo sapiens
gcccagtgtgtgcttgcagctcactttgttgaacttctctttattggaagagatatcatcctacttctatcggaagcatttttcagttctgagcattttcgaaaccgttatctgagacagagtttaccatgtgtaaaatgttcccaccttccttcatttccctcaaatgaaatcacacgttctttaccaccatctggagggaagtatttgccatggtgcttactgagtctgtctttgcagtgtcacctgtaaagttaaaacttctaccttacctggtatttcctttgtttgtatttctgcttaaatattaatcatgtcccctatttgtgaacataatcctttttggttcaaacatcttgcaggtagaatcttaatgtcttcaaaaatagcctggagcccttaggagtaatatgattccacaa

SEQ ID NO: 588127 - DNA, 229 bp, Homo sapiens
tgtgaggaggagaaggaggcagggagtagtatgatggacggagagagctggacagcccgtgggcactcagagccaagttggatgtgagctggtctggagaagagagaaatgcagaggggagaggagagagagatgatgaggggagtgagtgacggctgcacctatgcaggcggtgggctcggccttaagggatgaccaaggctggcttgcaacagttgacgcaaaggac

SEQ ID NO: 588128 - DNA, 102 bp, Homo sapiens
cccgactagcccgacagggagcctcccaggagcccgagtggcaggtacatgcacattggcaccatggtggagtttgcttttgccctgctgggctggtcgggg

SEQ ID NO: 588129 - DNA, 669 bp, Homo sapiens
  misc_feature (15)..(15): n is a, c, g, or t
  misc_feature (22)..(22): n is a, c, g, or t
  misc_feature (27)..(29): n is a, c, g, or t
ttcatgtgtataggnatatccnccccnnncgggtaattggaatcgttgaccaggtctcgggcttgtctggatcacggtccaggaagatctggccagtgggattctactccctggctgtgcacctggtgtatccctacccctgtctacgtcggctccgcacttcgcggcttgagactaaaagagcatccctggcagggtggccttccatgccccaaagcagcctgtccagatgacccccaaattctgatgctgaagttgtgatggcctcctggggatgttctatctttaatcttttagaatgtggttagagcgggttgaggctgcctgaccccagcctaatggggtaggtagtgccttgtggaagtgtgagcatgggggcaaaggatccaagcattgagccttcatacctctattccccataccagtggggtgccgaggctcagtgcagcatgacgacggagacctttgtgaaggatatcaagccctggtgatcaaagaatcttgaaccttactcttacacttgtgcctggacgacagtgccgagatgacccaagacaacagtgacggcgcatgagtgttctggaccttgcaacagttggcgtgacaacaacagtgcagacatcaactatctctgtactgggaacgaatgtcaggacaatcctgatcccg

SEQ ID NO: 588130 - DNA, 183 bp, Homo sapiens
gatatccggaggtaagacacggatgctcacgtgtcgacggaccttgtacaggcaggcatgcaccgcagctggtgaatacacgtcgaccaggctccatctttacgatattatggacgtcaacacggtgctcacgatatcgacggaacttgtccagggaggcatgcaccgcagtggtgaatacac

SEQ ID NO: 588131 - DNA, 83 bp, Homo sapiens
  misc_feature (2)..(2): n is a, c, g, or t
gnttttttcaaaatatgaacttttatttaaaaaattggatgttgatgtatggcaaaaccaatacaatattgtaaagtaaataa

SEQ ID NO: 588132 - DNA, 101 bp, Homo sapiens
ggagagtgacatcatagaggatcccgggattgactacttgtgtcgacggacctgatccggcaaagtcgtgattgtgatgcagcgtcacgaccgtcgtgatt

SEQ ID NO: 588133 - DNA, 1311 bp, Homo sapiens
  misc_feature (693)..(693): n is a, c, g, or t
  misc_feature (1311)..(1311): n is a, c, g, or t
gctccaacatcgattggacggcggataaatagcctttgtcatcagtgacattaagggtgttgggcgaagatatgctacatgttggtgttgaggaaagggtgacattgagctccaccgaaggaagcggccgggatgaacgtctagcttgagcgacttgatgagcttagtgagactcgtagtcgatcacctagtctaattgcagtacaatccgacgccaggtagccatcgaatctccgatgacttcggtgctctttgaactacagaactcgaatcggattcgtaaatcgcgatcggatagagcctagcgatgacgcaggggattcggttaggactcgaaaattgcgctgcatgcgcaccaagacctaaacggcctacactgattggatattgaagccattgaggaatgcccgtaacactggtaacagcacagcgactttcagggggactcgcaaattaaaggaaagaggggcatttggctgctttcaagcccttagtcgtcgagaagcagcccctttttaacacggttggaaaaccctcgggatggtggcctgctaaaagactaatctaggacccccataaaggtatcgcaatcgttttggaggacccgcgcgtccagttttcgtgacccttggagggcccggggtattgtgacgttttgtatgtgcacctaacgggaaaagtcgaaacaattantatctccatgaagtgaaaggaggcgcgtttgggctcgtttatggtttaaagaggttactacgagttagccggtcctgcaatttagtatagcccgttaaacttaacaatcaaaagtcgggaactttaaaaagcggacacactttctgatgaggatgggcgcgaaattcacaatcttcgccgtgcgcgttgcgatgcgtcgccggtaaaaagaagaccagcaggggcgtttagactcgggcacaccctggggccgtgtaggaaccccaggggaggggggtccctaaccataagagagcgaccagacggtagataactgaaattcggggcgacagggggggaccaaaccccttctaaaatagtttcccggccaagaaaggcgatataaggtgtttttacccaaacccaagaaagaagtaccgcgggcgcattctaacaaagtttaaaccggtttcgccccattcccgaggttgtcggaactttcccccgcgtcaatgaacaccgatagttggcgaaggttaagggaacctcaaggtgtcaaagattccattcgccgccaatactcttttgttgacagcggcgtgtctttaaaccgtatgtcgttacggcacgttgaacggn

SEQ ID NO: 588134 - DNA, 735 bp, Homo sapiens
agcggttggggctacaatgagccatgattgcaccactgcactccagcctgtgcaacagaacaacagcctgtctcaaaaaaaaaaaaaaaccaaaaaaaaaacaaaacacaacgcaaaacctggtttaatgtaatcattctccatgttgagcatttggtcttttctaattaggatggcgattattcacagcgtaaaaagtgtgattcttctttgcacgtgcattgcattatgttttccaatagtgtctacagtggcaatacgtgtaaacctttgagtaacacctttggggacccacaataaggtgccatttagtgatgtacggaaggtggtctcccaaaaaagcaaaattgatgggcgtttataaggaagagaatgtttaatcccttgatagggaacaagattggagatctataggctggcagttggcctggccatttcaagacaggatggattcagtctttggtaaacaaatggatataaacttgacgggtatcaataagtaccagtacaggcacttattaacggtacttgcctccttagtgatgtcttggtgaagtaagccttttcttaagcttcttccatcggtaaggaattacggtattgtaccacattaaccaattagaaacatatttttacttgccctggttactcaggtcaaggagtccgggtgacataaccagtctaacgttcgggggagtaaaagacctggttgccaatctttgactgtgtcagggg

SEQ ID NO: 588135 - DNA, 337 bp, Homo sapiens
taggaggtatgaaggcagctgcgggctgagataggtggggcagaggatgtcggaactcacaagcattgaagaggccttcctcgcttaaccctgcatgagatgagggcagcagagggttctgcgcagcgacgccagccacgcatgtgccttggttttacaaagggtggctctggagattctagagcagagagggcaccagcaggcagaccacgacacagtgcaccacgacacagtgcaccacaacacagtgcaccacgacacagtgcaccacgacacagtgcaccacgaaacagtgcaccacgacacagtgcaacaagaaaacagtgcaccacgaaac

SEQ ID NO: 588136 - DNA, 404 bp, Homo sapiens
  misc_feature (5)..(5): n is a, c, g, or t
ttttnaggattcgaagttactaagacaggaccttaaggaagtcagtttgacctcatttccaactgagagagtccatagatgtcattcaagactaattttctgattctaaggaaaaagggaagtctttttttttcttcctctctttatttttgaatgaataatgcttgacatggacaacacagacttttagtgaagacagagagtcctagtgatgaaaccacctttgcaaaaattacaactgagaaaattatgacagtgaaagagatctgacctaaccaattccatcttgcttctaaactctgtccttgttcattcctgggcataggcagaactaactctggaaggaacttagtttatagtgtaactttgaaacaaagatgataacagctcattctgaaaacaaa

SEQ ID NO: 588137 - DNA, 1091 bp, Homo sapiens
tcctacccttatatacttatgtgtgtgtgtgtacttgtatgtatgtatgttacataggtcatatatatatatatatatgttcaccaacataaaaacaaaaaatgaacacaggtccagacaggcgagctataaagagatatagtgagaataaatatacatatatgtgagatagaggggaaaaagagactacacaacgacaacattctaacataacgaatctcagatatcatggaataatagttgacaaatagatcaagaacgtgctgcaggaagatgtcgcacgcgatcgaatgatgtgacatctaaataagtcaacaattaacatataaataagagggattcgtgtaaccatatactaacttgtctaacaatcaacatacatcgaaatgaagatccgtataaagagacaagagaacaaaaaataataacctattataaaccataagacatagaacaaagagacgaaataagaaataagatgaagggaaataacataccatactgactttactatacccaactaccataaaaacaagaggagacacagacgcacaatagatactacaaaaacggagaaccacactcaacgccaacaccacccaccaccacacgacaacataaagcaccaaaacgaagacaagcagaaacgaaatagaaaaacacaacaccaaaccacgagaaccgacaagcacaccaaccagacaaaaccaaccaaaggactacaagttgaaccaaccaaacactcgatgaacgagcacgcggaaaaagcaaataacaagaacggaagaggctgcgatcagaaataaaaagatgtgacgtgatgtatgagacgatcaggcgcgcggaatgagaataacgacagagaagggaagaaagcataggagatagaagaaaagagaaagcaaaatctattgttagagctatcaataagtcaaagtagtaatgaaaagaataacaagttcatgaaaaacaaaacgagataattccgatcataagactgagcagatcagaaattagatggtctgtatcatatgatcaatataggtacaatacgaaagattcagtagcaaagagtgaagctacgatgataa

SEQ ID NO: 588138 - DNA, 849 bp, Homo sapiens
  misc_feature (254)..(254): n is a, c, g, or t
gcgtgccccccccagtctggcccgccctcggttggaaaaagtccttcccgtggcgggaggtcctaatttcgcgccccgttgtagggttctccctcggttctcttctcccccgcttatggagtgcgctccgcccgcgcgccgtcgggttcactctccggagctttcgtcttcctgcgagacctactctgcactgggttccggtctcactcgctctctggtggtgactcctcgctcaccctcacggagaccagtgntcactctctctcggagcgcgcgcaagggcttgcgccccgtggccagtcccacggacccccccctgttgctacaccattcgcagcggaccaacccggtttcctggtcttgccccccgcacacggcctgtctacccggcggtgcttttcccatcgacccggtgtttacctgcgcgcacgtgtacttgctggatatcatcttctgcccccccgacaaagcagaagcggcggtgccctgtttctccccagcgggcacacgcgagattggatcacgcttcgaggactacgggtacggacgcctcctgagcaaagtaattatcttctcgcttctgggtgtcctcccacgcaccctcatggtctattttggtgcgcagctcaacgccccccaatcgatgttggtcagcgtcgtcagcgctcttgttctatctcgcaggtatgcgcgtcgcctcgcgcgatgtctgttcatggacaccacccattgcctcgcgccgctatcacgtatctatggatctcaacgcgcgggctctatgctcgccccacgccatatggtcatcatacattaaaagagagttctaaacaacaggcacaacataacaca

SEQ ID NO: 588139 - DNA, 133 bp, Homo sapiens
atcttctttatagcttattttccttcttcatacccttcccctcaaactaacaaaaggatttaattttacagcataaaagggtttataacaatctttcaacaataaggcttttccaataaagaaggagaataag

SEQ ID NO: 588140 - DNA, 393 bp, Homo sapiens
  misc_feature (275)..(275): n is a, c, g, or t
  misc_feature (361)..(361): n is a, c, g, or t
tcactcttgtcacccaggctagaatgcaatggcacaatctcggctcactgcaacctccgcctcccaggttcaagtgattctcctgtctcagccgcccaagtagctgggattacaagcacttaccatcacgcccagctaatttttgtatttttagtagagatggggtttcaccatgttggccaggctagtctcaaactcctgaccagcggtgatccactcacctcggcctcccaaagtgctggaattacaggcgtgagcaccgcgcccagcctgtntttcatgttagatcataatatgatctcaccagatccttactgaaaatgtaccttattacaagtagctaaatttccacatagagggntaaaaagattggggaatcaggttatgactttt

SEQ ID NO: 588141 - DNA, 1836 bp, Homo sapiens
  misc_feature (272)..(272): n is a, c, g, or t
  misc_feature (313)..(313): n is a, c, g, or t
  misc_feature (323)..(323): n is a, c, g, or t
  misc_feature (593)..(593): n is a, c, g, or t
ggcatctcttcgacactctgtgcctgcctgccggcatccgccgtctcgatctctcgtgccaggctcagcccatgcggatcgatacgacgcatctccgtcccgtggctcaaatgagtccaatgcgactgccggactatgctagacgatgtggctgcgttatatatggatgggcgatcggaccagactttccactccggatgaccagctcgattattcatatacacgagtgctgctgccgcgtgacagtcccactccaggaaaacaaccaaagngggtcagataccatttgtgctcgtggacgaatagtggggcnctatgacatngtgtaaccttcccttagacgatagagcgtcgtccctgattgggcctcgagagacagaccaacttgccgtagcgcctgtccattgagacaccgggagacgggtgaacaccacagatttgagagcagattgagcagtacggtccacgcaagccttgtggagcgagcacttggagagataccgaatccttgagcgagcacaaacgaaccgtttcgtaccacatcagaaggcctgccgccggttgggctcctcggagagagtgtagagcaagcnccaaagttgcttcgcatgaacgcggaggggcgctcccccgatgataaccgaccaaatgtgtctcaaaatcgaggaaagacgacagaggaattgaaccttccatgcaatcttagtgcgttgtgtcgcatggacaccttttgctagagcaaagccaccgcgggtacactagttaggttaaccagtttggggacgcctagttccgcatggcggctccggatttgaccttggttcccccctttccttaacgggcccttccttgggtggcctggccaaagcccaactttaggggcaaattttgttcccactatggtgaaccttccgtttgggtaaacgaaccaggggggggttaccaaacctccgaaaccgagcactggtggttagagccccccgaaattcctttaacctagacaggggggtctttaccagtgacacatccttatctcgcgcccccgatcagcgccctaattacccctttaggcctgtttccctctggggcacaccccttggggcgttacgagggcccctgggggagaaacgcctttggaacgctggaacatttaacacccttccaatttgtcacaaggacattcccctttccaaactttgggaaggccggaaaagtggtgcttttaacacagggggtttttccgagcccaagcccctaacgggggggcccggataaggccgggggggcaacacactatgcctgtttgggccgggccggcaaccaatttccacaaggcgcgagggaaacaagcccttggggtgggctttcacagagtgacggaccccctatcgggaacactttttcgggaaggcccaaggggaaggaatagtgggcccccaccggggcccggctgaaattatcccatcacccctgctgttttccttccttgggggaacgaaaacgcaagcgctttacacgaagaggcttgggcccccggaattagtgggccgcagagtgccacaatcaacaaccccattttggttggcaaattgagagacggcgtgcaccacggggaggtccccagggaagagcagcgcttagtttccacaggcccttatcctttatcccatgcgcggatataggagaacatctgtcgcggggtcatcacacggagagaacaccgtttaagtccccagtcattgcaaacatgtgttcacactgggaacacttcgcagagaaaacattgtgtcagcaagaacacagggaggctgctgctgcagtgggcgagccacacca

SEQ ID NO: 588142 - DNA, 211 bp, Homo sapiens
  misc_feature (143)..(143): n is a, c, g, or t
ggtcgagtcggacagaacatgtagctagctgagatattttgctcatgtgtaacaattatatagagtagtagatatgttgtacagaaactataagcttatatatgtactagtacactaacactctaaagctatataaagatacnaaataaattgagcgaagtgttatagacacatttccaaataacagcactaatttatgggacagaagatg

SEQ ID NO: 588143 - DNA, 122 bp, Homo sapiens
aataaaaaacaggtccaataagaaacaggcctagagattaattgattcagggccatgaaagtcgaaaacgaatccactaagggtttttgttgttgttttgtcttttctgtgccccgtggcaa

SEQ ID NO: 588144 - DNA, 223 bp, Homo sapiens
ttaaggatatctgtatttactaggggtagaaagatgtagccgagtttcttgccgacctcatggcgctacacctagagctaacgtctttacgtgggtactggcgcttacttagaaacctacatcagggatagctgaagatggcggtatataggctgagcaagaggtggtgaggttgatcggggtttatcgattacaggacaggctcctctagaggggtatgaag

SEQ ID NO: 588145 - DNA, 231 bp, Homo sapiens
  misc_feature (181)..(182): n is a, c, g, or t
ctatttagttgatatataagtggcgcagaaaactgtattacgacccttagaaatcagttcagccacaattataatatatatattgaccaggataacggaaatctaaccaagtcaacgtacacgtattgataaatcgaagaagagctgcaaggactagtcacgtaattaaacacagcacctnngcaatccatgttgccaccgcgtgaacgaacgcccagcgagcatatgaaa

SEQ ID NO: 588146 - DNA, 395 bp, Homo sapiens
agcaccacttaacctcacctatgggggttggctctcctgccctgtcacgactacttggacatctttagacatgcttccatcagaaagcaagttaacccactccggggacagccctgcaaggcccagaagctgcaggagtatttacacagttaaccagcatactttatttaactattcctacttcaagctatttggcagggaagtggggcggataccaccctagaacaaataccaattgtaagcttccctttcacattgccagcaagcagatcttttccaactggggagtaatatcctgttagctatgtttaattcctatttacctgggggattgagagtaccaaatgatttcagctgctcaggcattacatttcgatctgtcctctccttctgcc

SEQ ID NO: 588147 - DNA, 463 bp, Homo sapiens
  misc_feature (3)..(3): n is a, c, g, or t
ggntaagaaaaaagtgcgtgctcttgatgtgatatacataaacatctcaatgccttaaagagcagtatgcctccagcatgtctcacctccagccctaaggcggttttctcctatctcagtatatggaatatacaattgggttttaacacccagacattccattgcccagggatgagcgggagacagatgccctcctcttatctcaactgcaaagaggccttcctcttctactaatcctcagcacagcccctttactggcgtcgggctgtcaggtctttcccttcccatgaggccatatctcaggctatcacatggggagaaaccttgggcaatacctggctttcctaggcagtgttttgtgtccctgggtccttgagagtagggagtagtgatgacttttaacaagcatgccgccttgaagcacttgtttaacaaagcacgtcctgcatagcccaaaatccat

SEQ ID NO: 588148 - DNA, 945 bp, Homo sapiens
tcctttgagctaatgaggagcaacgcggacctgttccagctgggctcgcgcccccgcggatgttgctggatcgtgtgcacgacatctgaagcctgcagatggagaagggggaggacccggtccccacactgcctcacccgcacggggcatgttcctgccgatatccatcatgacagacctgtgattcccgcatgtggctgcacagcaatgcaaggagcagcgcatgacgcgacgctgaaggcctccatgtgaccagacgcagaggaccatgtgggacagcacgacgatccggtgccttcacacgagagggatctaggaaagtgctcagagaggctagcaagggaagatccggagccatcccggttcatagatatcccatgagaaactgagagcacaatcacatcacagaaccagtgaacaagaaagtcgtccaaaaacgtgcctagacataacatcctatttccaatccgacacatccgaggcatatccaaggcagattatactccacatggccccatgaatttcataccaaccccacatgcgaatgaaaacggaacgcggagtgaggacacgcatgcgatatcagtcggtaccgtggcaaccaacagccttgagggaaacagtttggagcgggacaccgttagcacgcaaatgccctggacattttaccctagcgaaggtcaggaataaacggacattccgaggtgaaaagccaccccggcaactcctcgaaatcctccaaaagaaacaggaggacgtacactaaccataccattttttggagacacttcgggcatcacactcgaacgacacggcacgacaggccacacaggggccagcttagagaagaggcccaagctgtctgatggagctttgagcggggaattgtttctacctgggagcgattccacaagcacgggaagtttggcgctggggacttgctgc

SEQ ID NO: 588149 - DNA, 165 bp, Homo sapiens
  misc_feature (101)..(101): n is a, c, g, or t
aaataaaatccagctcttaattgagatttgtggctgggcatggtagctcatgcttgtaatcccagcactttgggacacttagcagggaggattgctggagnccaggagttcaaaaccagaatgggcaacatagtgagattccatgtctcccccccccaaaaaaaa

SEQ ID NO: 588150 - DNA, 563 bp, Homo sapiens
tctactagctctacagcttcctcgtgtaaattagtgctatggctccgtgaacatcattcatcataataggaaatgtacatgggcggaaatggattgccttatttccctcttggcagctaatgggctcttagcaagttgaaacaggagagtttatcatgaacgaagaagaagtactactaagtatacactactgtgtccatgtcccatgatcccgctctcttccatcgcccacctctgagatgaaatgagttcctattttttctgggagagggggggatgattagaaaaaaatgtagtgtgttccatttaaaattttggcatatggcacttttctaacttaggaagccacaatgttcttggcccatcatgacatgggtagcattaactgtcaagtttgtgcttccaaatcactttgggtttaagaatttcttgatactcttatagcctgccttcaatttgatcctttattctttctatttgtcaggtgcacaagattaccttcctgttttagccttctgtcttgtcacaacattcttaattggtggcatgtacttggaaaaagc

SEQ ID NO: 588151 - DNA, 142 bp, Homo sapiens
gggtcctggctgcaggcccggatttccacttcttccagtagtttcaaaagaagctattatttttgaaatttggtgaaaattgtggaattctccttaactttataaatcttgctgctgctcacatcgttgggtccgtggccat

SEQ ID NO: 588152 - DNA, 131 bp, Homo sapiens
ttttttccccccaaaaaaaaccccggggccggtccctccttcgggtttttacctagggcggggggggggtaaccatttttccccgggggccgctttttccctttgggcttttttgggggcccctttcaccc

SEQ ID NO: 588153 - DNA, 620 bp, Homo sapiens
ctgtagtctcggcacttggcagctgaatcatcacgcactggtccagtgaaggcctgccggcgctgcgcgaaatgctcacgctttacgacttgtcgcactcggccacctcgcagcgccagatcggcggcatcgtcgcgctggcgcactcgccgaccacgacatggttgcggcacaagcgcggtacttcgctggcgcatggcgtggaggtgcgcatcacgctggacgaggaggcgtttgtcggcagcagcatgcacttgtatgtgcagcttatcgatcattttctggggctgtatgtgcaaatcaatagcttcatcgaactggtggtgctgtcactgcaaagcggagaggagctgatccgatgcaagccaagaagcggattgcagaatctggtgtaatccaacacttgctcgccgaaccgtaccgctaccagttcgtgcaggcggtgcgtattctgctgtgctggctacgtcagcagaacgtgtcccatgcgcaagccttcggacaggtgctgcgcttcaggagcaagctgtccttgagttttccagccagtgaaatcgagcggctctcgctcgacgagcatgaacaactggacctgataacggggtacatgcgttaactga

SEQ ID NO: 588154 - DNA, 1978 bp, Homo sapiens
tgacccaagcaaaaaagtctagatgtgagagaagacaaattggaccactgtgataaggtgtgttttcacagaaggagaagtcaaaagggcccaggggagttgtagggtcttcttctgaaatctctctctctgctctgtctcctttctaagcatgctgttcttatctccccttcatctcattggggtactttcaggtttgggcctctcacctcacactgcggccccagaatggccaggaatgggacgggaaagcactgctgggatgggccatccagctgtaggtctcatagagaagggctgtttcttttcttcatttaatttctgccacagtggagaaaggtcagagctcaatggtcaagatcaaggtgtgagtttcaggtaatggagaccgggatgcatagtatgggcacctctcatctagagtttgaactggttcctaaagcttgccaccaggaaacatgatggaggtgtgtgggcaaagcaggtggacacgcacacatacatgcactcacggagtgctagggtggttggtcaaaactgttgcagggtagaaggtctagatatgaggaatatggaactgggcatgggctgtcctcacagaacctgtggtctccctcagaagacaattacatttctgtaaagttattgcatagcatgaataattataataagaacacaagaagagtaattctgtccaaggtgcatagttgggcatgtccctgtcctggtcattgttgtagttttctgcagcatttcacagaccctcacaacaccatgtaagttaggttccattattgttacctccggttctgcaggacactgagcacaggggtgcagtcacttcctcaggggcacacagagtggaacccaggctcactctgaacctggtgcatcatccttcaattactgaaaaggacaagtagacatgcttgggaagaaacaaatctatctgcatgggagtctgggaggctttatggtagagacactgagtaaatggagtttgctgggtgtgggaaggtactggggaatggaaggcattgaggggaaagcttgatgcctctcccaatgaagctccaagtcgaaggaaccccacattctgaaatgaccttggacagatagtcaagggccaggtaataagtcatttatattttctgaaacttgagtttaagtcatcctttctccttcattgtttcgaaaagttttatatgttcaccatcctctctggcatttatgctttttagttttaccttgcttatgtgtaatattaaaatgcactaagcaacttaattacatggatgatttaaaggatttctgaattttagaaagcttcagaagtcactttatccagcatcagtagctttataccatagatgttcagagtgctagctagcagaaagttctagataatgcaagtgagttcagcaaaataacagaatggtgaaagaatacaaaaacaaggagatctcccagagcaaatgtcatgtaaatgacctttcaattaaggagaacgtgaaggataacgaggaaaattgcctgaccagaaagctctgttaggaatgatggttgaaccaacctgtaaacaatgccattgtagacagttctgcttcaacctgaaatgatgcagccatgctgcctaaaaactggaagatattctaggaatatctttggtgtatgaacatgggctctccactatgaaattatggtattggccgggcgcggtggctcatccctctaatcccaacactttgggaggccaaggtgggcggatcatgaggtcaggagatcgagaccatcctggctgacactgtctctactaaaaatacaaaaaattaaccagacgtggtagcgggcacctgtggtcccagctactcaggaggctgaggcaggagaatggcgtgaacccgggaggtggaggttgcagtgagctgagattgcaccactgcactccagcctgggcgacagagtgagactccgtctc

SEQ ID NO: 588155 - DNA, 142 bp, Homo sapiens
  misc_feature (67)..(67): n is a, c, g, or t
cccacctaggcctcccaaagtgctgggattacagcgtaaccaccgaaccctgctagagctggaattnaacatatgcattatgattctggagtctttgaagtgctattcctaattcatcaacctgaactgcttgcttgatgtt

SEQ ID NO: 588156 - DNA, 141 bp, Homo sapiens
gtgggttttatatcttaagagaggcatgagacatcagttaaatacattgaagaaggccaggcgtgggggtgaggccggtaatccctacattggggaggccgaggggggcagatcacctgaggtcgggagttcgagacgggt

SEQ ID NO: 588157 - DNA, 814 bp, Homo sapiens
gagccagtcccgggatcatcggcgcgcgcccctcccagtccgtgcgcgccctgcctgtcgtgtttgctctgctgcacgtccctggtacggctgcgacttccggatctgctcctggccgcagggggcgccgctgtcgcacatgagtaggcctgggctggggctggcaccgcgtcgactggtgcagcccaggtactatccgtcggcagccgggtccgctatgggcagcaatgccggctctctccctactgcagccctcccgcccgtcctaccgtccggcgcgactggcggggcattagctcgctggaggcggtgcgcaggaagatccggagcctgcaggagcaggcggacgccgctgaggagcgcgcgggtcaccctggtcagtcgcgagcttggaccacgagaggaagtctgagggagaccgctgaagcctgacgtagcttctctgaacagacgcatcagctggttcgaggacagagttggatcgtgcccatggagcgtcttggcaacagctttgcagaacgctggagcgaagctgatcaaggcagcagatgcagagtgagatgaggcatgcacagtccttgacgagtcgagcccaaaatggatagatcgaccaagaatggaaattcaggaagatccaatgtgagaaagaagggcaccacgcacagttcgctgaacaatgccgaccgccccattattcaagcaggttggcccggaagctgatccatcaattgacaaggcacccgtggcaccgtgcaaacgaacaggcgctaagcctctcagagaggcaaacatttgctgcacctagactaacaat

SEQ ID NO: 588158 - DNA, 231 bp, Homo sapiens
  misc_feature (95)..(95): n is a, c, g, or t
ggttaatagaatgtgagtgtcattgtatgtagcaatatgaaccagaagaattgagctgtagccagcatttatttaagcatcatttttgccatctnggattcttttgtggggaaagaaccattcgaagggaattgcctttggttacaaaggtgatttgacttttctctctatttatatgtgcaccattccactggcaccgttgttcaaggttccataaagagacacttttgt

SEQ ID NO: 588159 - DNA, 407 bp, Homo sapiens
  misc_feature (1)..(1): n is a, c, g, or t
  misc_feature (136)..(136): n is a, c, g, or t
  misc_feature (400)..(400): n is a, c, g, or t
ntgatccaccagcctcggccttccaaggtgctgggattacaagcatgagccaccgctctcagcctattaatgtttcaaaaatagcttttccctcattataaaaatagcacatgttgggccggtcatggtgtctcanacttgtaatcccagcactttgggaggctgaggtgggaggatcacttgagtccaggagttcgagaccagcctggccaatgtggatgaagccctgtctctactaataatacaaacattagctgggcatggtgcacacgcctgtagtcccagctactcaggaggctgaggcaggagaatcacttgaccctgggaggcagaggttgcagtgagctgaggtagtgccaatgaactccagtctgggcgacagagtgagactcagcctttnaaaaaaa

SEQ ID NO: 588160 - DNA, 992 bp, Homo sapiens
gccacaacctctgctgtatcagagggggccttcgcggccgacggccccaccaccgcccctgccgccatcgccactccgccgctagcgccttgggtgccctcctccttcaccgcccccttcaccaccatctacacgttctagcgccttctgtcctggagaagaagcatatacgtcgtatctcccatctgtggtgcccggggcagcaagccatgcgccggactggcgcgacgtgctggcctgggtcggacactggccgcgcgtgggctggcggacagacactaagcaccaagagaccatacttgcacccgtactggcaacactacgcaccttgcgtccggcataacatagtgaggcgcaacgcagtgagtgagcacagcggttcgagcccccccatttcagaaccccagagaccttcccactagacccctaccgcctgtgacgcaccaccagaccagccattcaagtacgccttctttcaaatacgactgcagaacagccaacgccgttcacacagaaaacccccgacggcgaacaccttatttattcgaacccagtacgtacctcacgcctcggcgcgacaccttgacccttgagttaccggaacctggcttgatgcacgaagcccaacaacgccacaagcatttataacacaaaaaacaaccctttgaaacgtgcaccggcacaccaggctcggtaacttacaacattatcaccgtgatgagctcctagaaccaaaccaaattcacctggcgacaccccacctgcctcaagggcgaccactctggcgctcaccatctccccccttaccccgcacacatgcgaacaccccgcacaccgcagcacatcaccccacagaattttggccatacacaccaacatcggtcgacctcccactctggctcactcggccaccatggcaacgccactggattgcggacatatccaacaggcgaccacccacagcaggggaccaactcggccttccccgcaca

SEQ ID NO: 588161 - DNA, 138 bp, Homo sapiens
cgatacgtggccatgacacagtgcggctccctaggccctcccctcttcaaggggtctacattgcaactgtgcggcggggagattccgtgtggtgggggactgagtgtggcaggaactccccagacagtgcagggtctc

SEQ ID NO: 588162 - DNA, 323 bp, Homo sapiens
cttaagtcaaaagagagaagaggcaccactaaaagatcgcagtttgcctggtgcagtggctcacacctgtaatcccaacattttgggaacccaaggtgggtagatcacgagatcaagagatcaagaccatagtgaccaacatagtgaaaccccatctctactgaaagtgcaaaaattagctgggtgtgttggcacatgcctgtagtcccagctacttgagaggctgaggcaggagaatcgtttgaacccgggaggcagaggttgcagtgtggtgagatcatgccactacactccagcctggcgacagagcgagacttggtttc

SEQ ID NO: 588163 - DNA, 510 bp, Homo sapiens
atatgtaaaaacttggaaataataaacttcttttttttgagacatgagtattgctcttgtatcgcccaggctggactgccatggcacaaccatggttcactagctgtctctaactcctaggctcaaggcgtatcctcctgtccgtagcttccaaagtagttttgcggccactgtgcaatgcaccaccaccatgccctgctaagttataccttttatgtagagatgtagatcatcgctatgttgcccaggtctggtctcgaactcctgtaaccaaagtgatcgtcctgcctaagcctcatcaaattgctgggatgataggtgtgagccatcaggcttggtcgaaaaatttttgacatttttgaatactccctccccagtccccagctctgcccaggcctctttggttatttgacccacatgttccccttttttgctcaagccagcttgaggagggtttctgtcactctgtaatccaatctaaagcccccagtgatcaccctcctctttcga

SEQ ID NO: 588164 - DNA, 457 bp, Homo sapiens
  misc_feature (29)..(29): n is a, c, g, or t
  misc_feature (74)..(74): n is a, c, g, or t
  misc_feature (89)..(89): n is a, c, g, or t
  misc_feature (96)..(96): n is a, c, g, or t
  misc_feature (183)..(183): n is a, c, g, or t
  misc_feature (185)..(186): n is a, c, g, or t
ccgggaaaacttttcaaatcaaatcctgnaaaataacttaggctttccccagactaaagcagtcccttcctctnatccctgaaatttgnctttccnagttaccttccttctggacacattcatttcccagtgccccttctgttaaaatgggcccccactagaatctctgttgctgggcacggntnncacgcctgtaatcccggcactttgggaggctgaggcgggtggatcacctgaggtggggagttcaagaccagcctgaccaacatgaagaaaccccatctctactaaaaatacaaaattaggcagacatggtggcacgtgcttgtaatcccacctacttgggaggctaaggcaggagaatcgcttgagcccgggaagctgaggttgtggtgagccaagatcgcttcattgcactctagcctggacaacaagagcgtaaatccgtctcaaaaaa

SEQ ID NO: 588165 - DNA, 113 bp, Homo sapiens
tttgtcatccccttcgtctgtcatcagagtttatttcttggttgctattggaaggttcatcttggtcgactttgttctttcctttgtttattaacttgaatgcgttccttgcc

SEQ ID NO: 588166 - DNA, 303 bp, Homo sapiens
cgggaggcggaggttgtggtgagccaagctcgcgccattgcactctggcctgggcaacaagagagacactccatctcaaaaaaaaaaaaaaaaaacgggacccccctttttaaaggaaacccaaggctcactccctttagcccacacagggccccccaattttggggggtcccaatttggaagccctcccaagatttccggaccggggggtccacccccctactaaaggccaacttaaggtcttggaaacatctaaacctttaacatgacaaaaaaaggctccggtggcccccggggaatata

SEQ ID NO: 588167 - DNA, 361 bp, Homo sapiens
aaagaggctcaacagcaagcatatttagcacacacatgccgatgaacagaatagtccgccacatcaacgggtacaagaggccgcccaccacaacctcttggtggaggtacagcacacagaagagccaacaatgaaaacttctaaaaaaaggaagcaaaaaaaaatctggacctccagcaccagaggaggaggcacgcagacgaacgacaaagtggacactacggaacagaagcacaaagaaacagacctgctaatacttttcaaggacgattcctttgccaaaaaaacatgcagcaaagaacacaaactacaagtggaagctaaattacgagctaaacaggagccagaagcaaaacacaag

SEQ ID NO: 588168 - DNA, 433 bp, Homo sapiens
agtgtaaacctttttaatgcaaatccattgtttccattgcatattatgcagataaaatccacagagtcaatttttactgccagaaaagacaccccttttgacattgcaactattttataaatccagaaatctttgtactgatgtaaatgattgcagctatttaggatagagtatggctaacaaaaggagagactattttcatgcatattgctaggttagatattttggggtttatctcattttaaaagtagtaaacgacttggaataatttcacatatactagcaaattaatatgatgccgagtacacaggcggaaccgggaaacccccatgaaattttaaaagcttacacaaaaaacaaaactctctgagcaatttcccatagttactaactctccaggctctgaccgccctaccccaaaagatcccaaacc

SEQ ID NO: 588169 - DNA, 569 bp, Homo sapiens
  misc_feature (26)..(26): n is a, c, g, or t
  misc_feature (238)..(238): n is a, c, g, or t
  misc_feature (242)..(242): n is a, c, g, or t
  misc_feature (251)..(251): n is a, c, g, or t
  misc_feature (253)..(253): n is a, c, g, or t
  misc_feature (279)..(279): n is a, c, g, or t
  misc_feature (359)..(360): n is a, c, g, or t
  misc_feature (383)..(383): n is a, c, g, or t
  misc_feature (405)..(405): n is a, c, g, or t
  misc_feature (425)..(425): n is a, c, g, or t
  misc_feature (428)..(428): n is a, c, g, or t
  misc_feature (441)..(441): n is a, c, g, or t
  misc_feature (446)..(446): n is a, c, g, or t
  misc_feature (451)..(451): n is a, c, g, or t
  misc_feature (472)..(472): n is a, c, g, or t
  misc_feature (476)..(476): n is a, c, g, or t
  misc_feature (479)..(479): n is a, c, g, or t
  misc_feature (487)..(487): n is a, c, g, or t
  misc_feature (491)..(492): n is a, c, g, or t
  misc_feature (495)..(495): n is a, c, g, or t
  misc_feature (503)..(503): n is a, c, g, or t
  misc_feature (508)..(508): n is a, c, g, or t
  misc_feature (513)..(513): n is a, c, g, or t
  misc_feature (515)..(515): n is a, c, g, or t
  misc_feature (524)..(524): n is a, c, g, or t
  misc_feature (526)..(527): n is a, c, g, or t
  misc_feature (533)..(533): n is a, c, g, or t
  misc_feature (543)..(543): n is a, c, g, or t
tgtggctgatgacatggaaggacaangatggggagaacagtgagcatgtgctgaagatactaggggagagcacaacactcgcgttctcattcgcgtgattccgttctctctccacacacactcacgcgctctcattcgctcgattccgttctctctccacacgcgctctcattcgctcgattccgttctctccacacatactcacgcgctgtcattcgcttgattccgttctctctcnatanacactcacncnctcattcgcttgattccgttctctcnctccacacacactcacgatactcattcatgtgatcccgttctctctctatatacactcacgacgctctcattcgcttgannccgttctctctatatacacacangctctcattcgcttgattccgntctctctctctacacacacncgngtactcattcgcntgatnccgtnctctctctccacacacactcntgtnctnattcgctngatnncgntctctctncacanacacncnctctcatangnntgatcncatctctctntctacacacactcgtgttctaattcg

SEQ ID NO: 588170 - DNA, 116 bp, Homo sapiens
caggcaaagctcctacaactgagaaaaagtggagtagaaatatctaggcaggaggaaggatgagatcatagtccatgtctagtggtaggctagaaaaatgccccccaaatagattc

SEQ ID NO: 588171 - DNA, 121 bp, Homo sapiens
agaagtcgagcgcttgtaccccagatgagaagcgcgcctgtttgacagcctggatccaacgctggcacgtggatgcatgaaccatcctgcggtacaggctgcgtcgatgcgctgctgtcgt

SEQ ID NO: 588172 - DNA, 678 bp, Homo sapiens
atttcaacctaaaacaaaacaagggtcaattcatttaatccaataaggcaaatttttggaaaatttacaagccccaagcctttaaaaaattcctaataaaaaaaataccctgcaagccagtaaaattttcgaaatgtccggggccccttcggtgtcttgtaaaagagtacatgggcctttttcaaaagaaggtcagcaaagctgccgtcaaagatacttttctaactttaaccaagggcctgttgggagaacggaattcaaaggtgggcccccagtgccccctactgaaaagggcagtttacctcgtatctttgggcttctagaagatggtagcaattgatcccttaaccaataatggacagccctcatcactgtgctgcttaataggtgccaccttgtgtgtttaaagaaggcaagctttgtacctttatagtggaggtgaaatgaacgactggcttgatgcgcactgaaaacagcatctgatttcgtgctttggggccaatcaatcaccctatgaaattggtgggtggtgtatttataacataatccttgctctgccgaatgaagctgggtctgataaaaaccctgaactgacaaatgaagtgccgggcacgacaacttttcttctagtgtttcctccccccactgacaacccaataatgcatgctcataaggcaa

SEQ ID NO: 588173 - DNA, 138 bp, Homo sapiens
tgcacgtcctcggcgcggcccgtgacgcgggccagcacggtatcgaagaatgcggagtgcacgacctcgacgccggcctccttcagccccatggccaccgcgagcgcgtgaccgtgcacccggtgcgcgatggcggtc

SEQ ID NO: 588174 - DNA, 743 bp, Homo sapiens
cttcacacgcgcttgccgggagatgcggccgcttcgtcctctgcagttaacgaagctgggcgcgtcgaggactgggatttcaaatatgcgtgcattacgagaatgactttttcaattctcccccaagacacaactgttcggtttggtggaactgtgacagaagctcttgctgaagtacaaaaagctccaccctcagcagatgataatactcaacgacacctgccgagcgtctgcggagggccgcttccaccctcacgcggatgactaatctcaagacaccttccgagcgtcagcctcactccccttccaccctcacgctccaccctcagcagatgatacctatcgagcacacctgccgagcgtctgcgggggccgcttccaccctcagccggatgataattctccgacaccttccgagcgtccgctcacctccccttccccctcagctccacccctcacgcagatgactacatctccccgaccccgtgcccgagcgctcctgcggccgaagccgtctgcggggggcccgcaccccacccctccgccggcactgatcactctcaaggacccatacccgaggccgttccgcctcactccccgttcctgccctcagtctccatcctctccagccctgctcctctcacgatccctgccgagcggtcctggcggggccgctccccctccgcggatctactccccgacctccccgcgtggtcctcctcacccagctctcccctccctct

SEQ ID NO: 588175 - DNA, 129 bp, Homo sapiens
  misc_feature (61)..(61): n is a, c, g, or t
tagatccagcattttgggatgaggaaaggaagtgagcagaaggtcatgagtaatagcattncctgtagctctcaaagcaaatttgagctcatttttctttttctgcaagctcagcagcagaatgcccag

SEQ ID NO: 588176 - DNA, 379 bp, Homo sapiens
  misc_feature (11)..(11): n is a, c, g, or t
  misc_feature (373)..(374): n is a, c, g, or t
  misc_feature (376)..(379): n is a, c, g, or t
ggcccacaggnaattattttggtaaggttattaataaccccccatcaaccctaaatatggcaacaaggtgagtgcctggttaataaaattatccttaaaaaccccaactcagtgtgaagagtattaaaatttttagcttgggcccatggtaaactgctcatgatcccattaaaaaaagaattactaaaactcaacaacaaaaacaacccaactcaaaaacaggcaaaggatttgaacagacatttctccaaagaagctatacaaatggccaaaaaaaaccatgagaagatgctccatgtcattaatcactagggaaatgcatgttcaagccacaatgagactacttcacacccacgaagatggagatactcannannnn

SEQ ID NO: 588177 - DNA, 252 bp, Homo sapiens
cagaggattacccaaggaggatatagagaggcaaaggggcttagtaaaaactgaaaatatactggtaggggaaaaggtagaacttctctgggtagtctcctttaacttaaaaaattaataggcccttgatgtattccccatactttgtaacttatagcttgctagtcatatctactggctctagattttatctatcttaaacctacttgtaaaacgtatgtactacagctactagctattgctagacaaagg

SEQ ID NO: 588178 - DNA, 237 bp, Homo sapiens
agggcccccaccccccccccccggggtggtggtgggggctgggcccggccttctttagaaaatgcccttttccccggggatttcctggttctttatgggggaagacccggccctggtcccctttgggcccctttggggggccgggaattctgccggggggggccgggccccgggtgggcctgccccggcccccggccggggggggcaaagggggccattaatccttttcaaggtgga

SEQ ID NO: 588179 - DNA, 215 bp, Homo sapiens
agccgtctctagagtacccccccagaatggaatccatatgtatatatacacaagtatgtatacacttagaaatataagagttacatatcctggtctcttacatgcgaatcagtacatacacaaatagtattagggctacatcatgtaatcttgcacaggtaataggaaaaaaatctgtgaaatatatttcacagattttaacaatatatacataa

SEQ ID NO: 588180 - DNA, 164 bp, Homo sapiens
aatggagacatccagccccacctctctagaacagggagagatgactagtgcggaaacacaagttagcatgggaacaggggtcacggtggacaccgggataggctggctctcacagctcctcacattatgctaacaggtacgccgacacattcaggtgccttatc

SEQ ID NO: 588181 - DNA, 1233 bp, Homo sapiens
  misc_feature (533)..(533): n is a, c, g, or t
aatacaaaaacctttatgataataaggcgaaccctgcaccagctatcaatttttacctatggaaccgaaccattagtgaccagcgatcatcattcccgcgtgcaacgtctacaccacataactagtttcagttctagcactacatgatcccatagcttgctgagaccttcgcctgatacgtatactaataagaacaaaataagaagacaaggaggggcgtgggctggagatgagagaagattagcgcccttcccagtatgagagagggccaatagacccattgtgaggtgcgtgttgcgcataaacgaactttgcatagagcgtagcagacagtggcgctccgcttggatacatgcgacagcgcactgaggtataatacatacacgtatagatgagcgcacatgaggcccgaggcacgctacgcacacacgatgcacgtacatggtgagacacgtgtaatacaatataggtgtgagcacacacaatgggggacgcaacaccgataggcgacgatgcatatagtgccgacaacncttactaccacatctggacatgtgaagcgatgggggtggaccacaatacttcacaatgggggcgtcagcaacatagcttgcactctgaaacccatgggaactattggctaaggcacaatgacgacatctcagaggcagggaggaaaagaagcacaagataataatcccataagcaatacccgtgccctaagcagacgtcagagtcactcctaccacgcagctgaaccaggctttggggacgcacaaatgaaccgctctgggagaggaaacgaccacgacttaggctccgccgtatagtctagttagggaccagtcagtcgaccacaccacgacggcttgagcacgcttggaggtaggaaaatacacatacgaagctattcaacaatgtaggcagcactaccacgcagtgactcgggttatcataaaccacccacccagacacgcgggggccatacagcaccgcgcaggactatatggaacttgtccgcagaaccgccccagatctagaccacagacggcccaaacgacaacctgcgactgcacacttcaatttacggcaccgaggcagcaaagattagggtatcaaccacaggggcaaaatcggtccacgaggcacacccatctaacaccacatacttacaaacagggacaacaaaacacgtcttcgaggacatacagccacaagcagccccaccctagg

SEQ ID NO: 588182 - DNA, 358 bp, Homo sapiens
aacctgcatgatattagtgtgaaattatctgacccttggacagactatgtcttttgtgttagagtcctctttgaacccaacgactagctttaccaactcattcctgactggaacctcccggatgaaatcagaaccagataaggctgatcccttttcctttgaaggtcctgagattgtggactgtgacgggtgtactattgactggaagaaaggaaagaatgttactgtcaaaaccatcaagaaaaagcagaagcataagggtcgaggcactgttagaacaattacgaaacaagtacccaatgagtcctttttcaacttcttcaatccattgaaagcatccggggatggagaatcactg

SEQ ID NO: 588183 - DNA, 517 bp, Homo sapiens
tgttctaatttggaaaagattgggaaagtggagaacatgtttggcaggtggacgcggggttttctatcgtgcagagtcacaatttggtaagatatctgtgttggagaataccagtattataatagagtgaaacacatttaaaaaagggagttaatttcctgttgggatagtctacagtattttggaaaatagagtatgagactaccacttaggccttgtattctactgtttatggataagttcatcaatgtttacctcgtttaatacatcacttaggaacaattagtatattacacatgaagaaaggtaatcgttacttaaagggtttggagattttccgcccacattttttttccggatacattagttattgctggacaccctatttatctcaaaaatctaaatatatgcagacccacaggtctcttgcattccttttgaaataactggttgtgacaaagctaattgttgatgcgagattcactgtttcatcatatttattgtaagatagggtcta

SEQ ID NO: 588184 - DNA, 842 bp, Homo sapiens
cctcgtcctgctactctcgtggggccctgtgccctgatcccagacctggtgcggtgctcccactccatgagcgtatttctacacctccatgtcccggcccggccgcggggagccccgcttcatcgccgtgggctacgtggacgacactgcagttctgtgctggttctgacatgcgactgcctgcgagccatgtatggatggatgcctgctgggcgccgtggatagtagcagtgatggggcctggtgtatttgggacctggaacacactgtgaatgtgaaggcccagtcacaagactgacctgaggtgtgacctgggtgaccctgctgctggctactacaaccatgagctgaggcctggttctcacaccatccagatggatgtatggcttgcgaccgtggggcctggactgggcgcttcctccgctgggtaccaccagtacgcctacgacggcaaggattacatctgccctgaaaggaggacctgcgctcttgtgccctgctggcggacatggcagctcagaccaccaagcacaagtgggatggcggccatgtggcggagcagtggagagcctacctggagggcacgtgcgtgtgatgtggttccgcagataccttggagaaccgggaaggagactgcttgcagcgcactggagcccccaaaaacgcatatgactcaccacgctgtctctgaccattgaagccacctgagggtgcttgtgccctgagctttattacctgcggagatcaccctgacctgtgcgggatggggaggaccagaccagggacacggactcgtggcgaccaggctgaggggatggaccttccagagtggtggtggatag

SEQ ID NO: 588185 - DNA, 833 bp, Homo sapiens
gacattgtgtgggtctgatcgtccgtatattgaccgtagtggagtgctctgtagtccttgtatcacatcctacagacctatggatttgctcacgcgtagaaaacctgcagtttgcaattcataggcaagctcactgcgagtgggtgaatgtctggtgccgaacgacgatagtgggaacgctgcatgtgatgtaaacgagtgaatcttgctctagtgatggaggatgtgatagagagagactatgaaggaaggatatgggagtaacaggtgtcgtgcaagaaatatgggtgtgtaatcatgtcttccatggttgacgggagtggccctgtcgggtatgaggagtggctcctggatgatggcatgtgagaggaatgtgatcacgggatcagtggtttctaagtaagcattaatgaaagtgcgggaaatgggggacattcatctatggtgactggattttcaatgcacattcgcaggtcattatagattgatctaggtggaaagaaatgacacttttcctacatgtccgcgtactctacgttttctaaaggtgtaattttgatcatatcgagtgttaacatggtgtcgtcgctatggatgttagaaatatgttgagtattcattgccaagggacaagcataaatgtgtctgaagaaatccacgttttgaacgtacgtttttgaaatatcaagatgagatatatggattttatatcgaatacagtttattggtgcgaaggttatcaagtgaaagtataatttggaggtggcgcggggagaagaaagtgcatgaggggtggagacattctggggaacgcaatgtttgggggaaataag

SEQ ID NO: 588186 - DNA, 159 bp, Homo sapiens
gacatgttgaaggtcttgtcctcatcaacattgatcccatgccaaggttggatggattggcagccacagctaacaggctcacctcttccattcgagatgatccttgacatctttcagccagtagagctctctggaatgctgagtgatacaaaagtacag

SEQ ID NO: 588187 - DNA, 371 bp, Homo sapiens
  misc_feature (318)..(318): n is a, c, g, or t
  misc_feature (349)..(349): n is a, c, g, or t
gacccagaaaatggagctagctacatttctcacacttactgtcataattacatgtttatattctattagttgtaattatttttcacctatcctctcattagaatgttatacctatagagcagataccattccagttttaattttttgccccgactcctagtaagtacgtgacctattacagggaacttaaaacaaacaaaaagtctgctgagtctgggatgttttaaggatcgaaggaacatgttggtccaatttgccttcacagagggttacctctgcttttctaccgaatgtggaattgctcccatgtggattttnaaggaattccagtctaccctcaggggaaggnccacatgtaatgccagaggtct

SEQ ID NO: 588188 - DNA, 176 bp, Homo sapiens
ttaccaccactgagagcgcaagggccatccctggctagacagtctactgtgggactttccttatcacgaaaacgccaaggaaaagatagctcattgatagtgtgagcacttacagaactacaagcccattcgtgatttctacaagtctgtcaactccctctgcaaggaacccacgc

SEQ ID NO: 588189 - DNA, 329 bp, Homo sapiens
cagagtccaacagtgcctattgtgacgcagtcttgccctgttacccaggcaggagtgcagtggcacgatctcagctcactgcaacctccgcctcccgggttcaagtgattctcctgcctcagcctcccgagtagctgggattgcaggcgcccgcaaccgcgccccgctaatttttgtatttttagtagagacggggttttgccatgttggccaggctggtctcaaactcccgacctcaagtgatccacctgcctcagccttccaaagtgctggcattacaggtgtgagccactgctcctggccagtgctttacttctgtctttagtaca

SEQ ID NO: 588190 - DNA, 709 bp, Homo sapiens
aaaaaaaaaaaaaaaaaaaaaacaaaaaaaaaaaaaaaaaaaaaaaaaaaaaaaaaaaaaaaaaaaaaaaaaaaaaaaggaagaaaaaaaaaaaaaaaaaaaaaaaaaaaaaaccttgtggggcccccctgggccccattcgaattttaaaattgggaccaagtttttgccttgcgggcccgaatattggggcctccattgggcccatttcccccctttgaggggagtcgttattaacaataaactgggcccgggggtttaaacacaccgtcggggccgggggaaaacacccgtggcggttcccccacctttaatatccctcttggaagacaatatccccctttttccgccagtggtggggtattataccaaagaaggcccccgccccggtatccctctttcccaaacaattgtgccacacccttgatgggcgaatgggaaaattgaacaccttaatttttttgttaaaatatccggcgtaaaattttgtgtaaaaaaagcttatttttttaacccatatgggcccgaaaatggggaaaatcccccttttaaaattaaaaaaaactacccccgacatgggtgttgaggggctggcccccgtttgggaacaaagaactcacctctttaaacacggggcctcccaaccgtctgggggctcccctttgtttccggggtgtggggcgaccccctgtcggagccgctctcctct

SEQ ID NO: 588191 - DNA, 132 bp, Homo sapiens
tctagaggatcccgtctagcctcgccaggtgcctctccgtggctgaatggtgccactccatgtgcccaccatgccttgtcatatatagaattaatgttgtatcatttataaaaaggaagaaggagctgttaa

SEQ ID NO: 588192 - DNA, 123 bp, Homo sapiens
cgtacagatatgcagagaaccgtctgtctcagtgtctctatctctcttctctcgagtctctgtctccctctgtctctgggtctctgtgtctctctctctctgggtctctgtccctctctctct

SEQ ID NO: 588193 - DNA, 408 bp, Homo sapiens
  misc_feature (138)..(138): n is a, c, g, or t
  misc_feature (153)..(155): n is a, c, g, or t
  misc_feature (157)..(158): n is a, c, g, or t
  misc_feature (165)..(165): n is a, c, g, or t
  misc_feature (169)..(169): n is a, c, g, or t
  misc_feature (185)..(185): n is a, c, g, or t
catctgagcccctgatgccccagctgctctctaccatacaattgaagaatatattataatctttgaagaagaagaagttgaatttatcagtgtgcctgttccatagttcgcagatagtgatcctgccaacattgttcntgactttaacaagannntnncagcctntttngatctttgcctggatnagtgctatgtgatccctctgaatacttccattgttatgccacccagaaagcttctggagttacttattaacatcaaggctggaacctatttgccttagtcctatctgattcatgagcacatggttctaactgatcgcattgaatacattgatcacctgggttactttatttatcgactgtgtcctgactaggaaacttataaactggaacgcggagaaattat

SEQ ID NO: 588194 - DNA, 781 bp, Homo sapiens
cgcacggggaagtcgagacattataaccatgcataagatagcagggactaacacctatacctacttgaataacgaagtaactagaaacaactttgcatggagagccaaagctaagagcctggaaaccagacaaggtacctaataacagcctgaagagtacacacctgtgtgcctgcagatagctggttgatcaagatagaatattagctcaactgtaaattagcccacagaaccctctaaaatcccttgtaaatttaactgctaagccaaagaggaacagacttttggacactaggtgaaaacctttgggagagaagaacaaatttaacacccatggtgggcctaaaagcagccaccaattaagaaagcggtcaagctcaacacccactacctaaaaaatcccaaacatataacttgactcctcacacccaattggaccaatctattaccctatagaagaactaattgttgtatacgtaacatgaaaacagtcttcctcgcataagcctgcccccgatataagcactgtagtgacaattaacaacccatatctacaatcaaacaaaaagacatttttaccttactgtgaacccacacaaggatggctattatggaaaggttaaaataaaaaaaaaaaccctctggaggggccccgggcccaaatcccccttattgaggcgatttactactgggcgctgtctacaaccccgtgaccgggacctggggttaccacatattatatcttggagaacactacctcttttgcacgttgtgttatatc

SEQ ID NO: 588195 - DNA, 176 bp, Homo sapiens
taaccagggtggctcataaaatagccattggccagtttagcagccacttcgggtgcctcccccttctcaaagtatttcacctctttaagagggccccgggagaacgaggcacgtgctgaacacaacaaatatcacacattctatggggtgaaaattttcataattcccaagaattc

SEQ ID NO: 588196 - DNA, 176 bp, Homo sapiens
ccaagattccgaatagaaagaaggccaagggaaagacatggtggctccggctctagcttgtcgtcaagaagcaggatggctaagaaagtggtgaatcccctatttgagaaatggcctaagaatttttggcatttggacaggacattcagcccaaatgagacctcaccctgtttatt

SEQ ID NO: 588197 - DNA, 480 bp, Homo sapiens
  misc_feature (480)..(480): n is a, c, g, or t
tgagccaaaaaacggcacgaggacagaccctgtgatgccctcatgggaccattttggggtatcaagcactgtgcgtactgtaacccctatacggatggggccgagactccattgatcacatctgcttactgtaccaattgtactgctatcagagggcggccaacaactgcatggtggatcttgaaataaaatttacgtcggcctgaatacatgagatacttcccgccaaacctgggaatacatttgaaggacccgcttccttaaaactctttatcatccccgacgccaaaaaaagattgcctgctctaatggaaactacgaatgagggctggatttgtagacctttcactgtagcgtgactataaggcgattccccactcgtctaggcatctgaaggaatcacatagctacttgtgttttaaactacatgtgattctaaggaattggaggaacctgtctagctttaacaatgagaccaan

SEQ ID NO: 588198 - DNA, 334 bp, Homo sapiens
caggctggagtgcattggtgcgatctcagctcactgcaacctctgcctcccgggttcaagcagttctctgcctcagcctccagagtagctgggattacaggcacccgccaccactcctggctaatttttgtatttttagtagagacggggtttcaccatcttggtcaggctggtcttgaactcccaacctcatgacccacctgcctcggcctcccaaagtgttgggattacaggcgtgagcacttgcacctggcctagcctttcttaatcgtgtccctcatcaatgaaatggtagaaaagccaatctgttttacaggtgtgggtagaaggggaa

SEQ ID NO: 588199 - DNA, 331 bp, Homo sapiens
gttgttctgggcgcggtgaactctctcttgtatttgcagtccaggccttcgcgtctcctgcgccacagacggtgcccacggagctcccagctgaggcgctgcttctccgggctgtcgattggacccgccctccggtgcctactgagctgatatcagttctcattttacacactggctcaggtcagcagggacaggagtcgagccttagcaaaagcctcgtgtcttaaggtcccaagttaagagaacttgggcttccacttcgcgcaagaaggccccggtccaactttcgtccaccgggccggcggaagcagggttccaataatttcaatgt

SEQ ID NO: 588200 - DNA, 131 bp, Homo sapiens
  misc_feature (2)..(2): n is a, c, g, or t
antgcctctcatgtgaatggtggcgtcaggttctcctcagcactcgcatgtcgctgctcttcatgtgaatggtggcgtccgggttctctctagcactcgcatgtcgcctgctcttccatgtgaaatggtgg

SEQ ID NO: 588201 - DNA, 819 bp, Homo sapiens
agcggattgccgcctccgggtggcgcttcccggtgtcgtgttcgtggaagcttatcggtcaccatggagcttgctggagagagtacgtcgggcaggaagggaatgccgtcagaaactgcgggtgtcctgtgaggcgccgggtgacggctgatccctttactcagaggccctgattcgtctaggacgtggcacacacgtatgaagggacatggtaagctgcgaattgattcagaacctcgtggtacacgagggggaagtgcatggctaccgtggtggtcggagcagcgacgtccgatgatcgcaggatcttgagacgggtgatgtatgaacgatgattgcaagaagtactgacaaagtaactaagttgatagacgatgaagcgtaaaccttcggaaatggacccatcgtgcgaaaaggcggcctaaagagaatccacgccgtgcttaactgacctaggccgttcatttgacagttccacaagaggacatggcttgttcgtatccctgtagtgtgtcacaccctaggacaattcatccggataagacctttatgcgtctagctttgggaaataaccgcatttggtgattgttcgtcctgtggacaatctttggtcaaagacgaagaacgggattatttctggtttctaggagagatagtaaacggcttacgaaataaaatctagtttacttagagaagataaatttcaggaaccgtggaaggaaaatatgaacacttcagtaagtgtatacaaatggtctaagttgggaactgagtattatcatgtctggtatctttaaaataatcattgatatgcgtgag

SEQ ID NO: 588202 - DNA, 205 bp, Homo sapiens
aacatctatgggtcaagatattgtgagtagccacaggctctcacggacttcacgatcaatgatgggctcacctttcctcactatctgtttcatccgccaactaatatttcacttaacatccaaacatcactaaggattcgatagccgtcgcattgatactggcattttgtaaatgtggtttgactattcctgtaatgtctccatc

SEQ ID NO: 588203 - DNA, 354 bp, Homo sapiens
  misc_feature (7)..(7): n is a, c, g, or t
  misc_feature (259)..(259): n is a, c, g, or t
  misc_feature (289)..(289): n is a, c, g, or t
  misc_feature (296)..(296): n is a, c, g, or t
cgagtgnacctgaagataatggaattttgagtatacatatctttctagtgggcaaagattatgtagatcatctacagcatttgaaaggtttagttcggatttcggccaaagtggtttttttcttccaggctcactgcatagtacttggtaattatattactgctgggtaaagatatctgatataacgtaatgtaatttcttcagtctctagatgggtatatttggtgctactaggcatcaggagacaaaagaatccttnaaattggagggatttcctttagaaaatganattctanaccaattgtcacaatgattgtacccatgatactatcaaccatcatttctttggcaatc

SEQ ID NO: 588204 - DNA, 973 bp, Homo sapiens
agttcagcaaggaaccatttgtgtggtcacatagaatcttgagaggcataataggtcagagtgctgagaacctgctctgtaggttgggccgtgtctaaccgggaaatgcttataggtcaagaacatgcgtccttgaaatgtataggctacacaagactgtaattatcattgagcttgttagttgggcgttgggaatcatataagtcagcggatgaagtgcaatttacaaagtatggctaagaaggttctacagtcattttgcccttatcatcatcataaagcgacattcagtgttgttgatgggagaacgccttttgaagtccctggatgacaccgggatatgagtgaactcaccatattgttgcacctatttgttgcaaaccagtgaggcctgaatatctgtgactgtacttatacacggaggatgcattgatgcccttcctgttagggctcatcactgtagtgaagtgcccctctcaaggtgtccagttttgctcaggcaggttgtgtggcgctgcctgatttaaattaaagaattcaaatgccgtggatgggaaccagcaggctagtgtaactggcgtttgggtacccaagactaagatgatatgaacctagttgagactgaccctttgtgtagctgagtggtggtgatcaccgctatattagcgtgggcacattctttcgttaagctagacaaggatagatagcattgctacccatgagagtggcccgtggcgctattatagtcaatggagatgcctggtcaaaatgttactggtagcaagttaatagtgtcctactggtcatgtagacaaagtgcggggactgcaagcgatttgctgaagagaaacttagttggctttgtcgcaaactgacggggggatacagagaggacggccatatgggtacacgacctggttaaacgagccaaattgcgctttgtcccaaggggcccgggataaaggaaatcggg

SEQ ID NO: 588205 - DNA, 103 bp, Homo sapiens
ggactcttcctgctgctgcctcctcctgctgctgtcctcctcctgctgctgaaagccaaagtagtctacgccgccagaagagagagacggaaacatcggagag

SEQ ID NO: 588206 - DNA, 679 bp, Homo sapiens
tatacatccattcatgagaggttaacacctgacgttaatttcagaaagcttctatatacctatcagggtcattggagaattggcctaagtctccctttatttgcctaaggtactgtaatgagaagggaacttgaggggcccctgaataagggggatccttagattgttcccctggaagttacttctctaactttggtgaatcatttgctattggcctgcctgatatgactactaaaagagctgggttgattttgtgacacctgcaaaggtctagtaaggccatgcccttgtgcaaaagaaaatgagttgatttttctttaaattattagagtcaaaggagtccttgtgcttcagaatgtactccagaggggtgcaagctgaagatgatctgttacccatctagagagagaagtgacaaaaaggcatctcttttttcaccttccttttggtgtgacccagggtggagaggaaaacagtggggacgtccctcctgctgttttccctctgcggtttctgggtcctggcaccttgtttaatgtgccacccatggttgcaggtgtgacccccagccatggaaccagaggaactaagtgattgggattagtcacactgattcatgcaactcaagtcctctgactgtgatttcctttgattcctagactgtgtgatcctcctaagc

SEQ ID NO: 588207 - DNA, 1049 bp, Homo sapiens
atttactttctttaacttatttttttggatcttcttatattaatctacttgttgtacttatacctgttattatattgtacatatttcacttttcttactctccagttttatgctaacaattttttattttcttcttcttgcttctactttgttctctctctttagtactactctattctactatactacttattgctatcttactttcgctcctatcttacactatagtatttatttctcacctattttactaactagtgatacactctctgatcttctctgtataatctcctctgtacttcctttgtgtatatctctttttgttcctttgcttgttctcttttcgtgcgcttatgcctgggtcttgtttttgatggggggtgtctcttggcctccgctcccgctggtgggttgcagccctcccggctttttttttctgccccccgtgtgtttggccgacccgtttcactagtcgcccagttgggtccaccgagtgccgatgtcttgtttgtccttcttgcctgacaggcttccatttactctactgtgacttctttacctgtgtttcacattctgtgcgaacatcttttttttgtctgcccgtattatgcttctgatcttggggtcgtttctgtttttgtgtttctgtcgcatagaatcgtatgttgctttccccttgggaatatcttggggtgatgcccttcttccgccatcacttgtgtggggggcactattgggggccatcgccgggccctcacctcttctcgccgtggttctgtgtctcacacagctgttttctttcaaaattgggaagtccttccctgttgaggcccgccccgagaagatagcgagattttaatctctgcccaaaaagaaaactactttaaaattgaaacacacaagagccaagcaggacttataaaattatatatatatatattaaaagtctctattcttcaccccccagccttcctgaacctgcctctctgaggataaagccattcattttctcccaccctcggccctcttgtttttcaaataaactttta

SEQ ID NO: 588208 - DNA, 409 bp, Homo sapiens
  misc_feature (118)..(118): n is a, c, g, or t
tagagaccgtgttgcaatggagtgtgcacccgcaggttgtggtgcctcacacctgtaatctcagcaccatgtccagctaagtgtttggtctttaagtaaagacagggttacatctggntgggccgggcttgtcttcaattccctgatcggtaagtagatctggcttgtctagggtttcccaaaggtgctagtagggattacgaggcatgagccatgtgtgcctggccatggtcccgtgcatttttaattcacagtcacggtatggatggtcaaagggtgtgtataaatggcggtatctccggttcaataagtccagtgtaggcaaattatgggaaagacgacacgatgtttcccggaagttataagacattttcacgtgacatttgcaacagggtctctcagggtaccg

SEQ ID NO: 588209 - DNA, 145 bp, Homo sapiens
ggcgtctgtgaaattccaccttggtgtgctgtacctccatcgtgtatgccacggaggaagaagcagaccaatggtggaattcccatgaggcccgacaaatatagaggagacactcaagtgtcctaactctatgagacctccccgc

SEQ ID NO: 588210 - DNA, 102 bp, Homo sapiens
gcggccgcctactactactactactgctcgaattcaagcttctaacgatgtacggggacatggcccccaataaaggcagctgcctctgctccctctgaaaaa

SEQ ID NO: 588211 - DNA, 831 bp, Homo sapiens
  misc_feature (372)..(372): n is a, c, g, or t
gttcgccgtactctgcgcacatcgctatggcggttccgaggcagtgggaagagatgcggccctggacatctgtcgagctggcggaaccggaggaagtgggaggtgctggagcccgagggaggatttcaggagcagtttctggctcccggtcatcaacgagatgcgcgaggaacattccgcgtcggcttgaacgccgcaagaacacaaggggagaggggcggtgtacctttgcggggacaccgggagccaagcctggtggggaacgatggcgaccaaaatatgtggcttcaatacccaatggcatttcaagacaccgggcaatgtggttgaggaggggcccttcgggcgaaggagcaaagacgcgtgcccctnatcaaaacaacacatctttccaaagaaaacaccgggtgagccccgcacgtgtcgtcttggccgctccaagaaccccggaacaacctcgtgggagacactggcatcggtcaccattgaaactcatttttttaccacgcgggtgtctgacttttggcgtggacacccttttgttacccaccaacccgttggggaggagcaccacaactacgggttagcaatatcccggtgtgcttgagcattagaaacacaattctggtggacaaaagcaacgggcatgccattcacttgtgccgcaccgggagaaaattttaatccgtggggacaaaaaacacgccccgaggacttatacacgatggattatggggtaccgccacgatgtcggcatctaaataacaccagacaaacacgctccgcgggtaccaaccgcacgggtagacacattactattattagtctagc

SEQ ID NO: 588212 - DNA, 259 bp, Homo sapiens
tatatacttcataagtcaaacaatcaggctgggcgcagtagctcatgcctgtaatcccagccctttgggaggccgagctgggcagatcacttgagatcaggtgttcgagaccagcctcaagacctccaacatgggccgggtgcagtggctcacgtctgtaatcccagcactttgggaggccgagacggacggatgatgaggtcaggagatagagaccatcctggctaacatggtgaaaccccatctctactaaaaatac

SEQ ID NO: 588213 - DNA, 305 bp, Homo sapiens
tggctggaacctctgactcagagcatgtctttaaagagtccacatctggccaggcgcggtggcacatgcctgtaatcccagcactttgggaggccgaggcgggtggatcacgaggtcaggagtttgagaccagcctggcaacatagtgaaaccccatctctaataaaaatacaaaaaattagctgggcgtggtggcaggcgcctgtaatcccagctacttgggaggctgagacaggagaatcacttgaacccaggaggcggaggttgcagtgagccaagatcatgccactgcactccagcttggg

SEQ ID NO: 588214 - DNA, 397 bp, Homo sapiens
  misc_feature (392)..(392): n is a, c, g, or t
  misc_feature (395)..(395): n is a, c, g, or t
caagttgaaaaatagattcaagttgataataccttagtacctagattctccctgaatcgactttgggaattctgagtcaaccctaaggactatattacaaaggatcagaccttgacttttaggccagttgtagtggctcatgcctgtaatcccagcactttaggaagccaaggcaagtggatcacttcagtccaggaggttgagaccagcctgtgcaacacagcgagaccctgtctctaccaaaaatacaaaaattagccaggtgtagtgtagcacctgcctgtagtctgagctactgaggaggctgaggttggagaatcaactttaaccccggatatggaggctgcagtgagctgtgatcatgccagcctgggcaaggagcaagaccctcnctnaa

SEQ ID NO: 588215 - DNA, 239 bp, Homo sapiens
cagacctcatcgcttatacttcctcgacgtataagcgttaaggaagtataagcgttccagtaagtataagcgttgagcaacgtataaagcgttgaggaggtatacgcgttgaggaagtatcaagcgttgaggaagtatcaagcgtttagaacgtataaagcgttgaggaagtatacagcgtacagaagtataaacgcgttgaggaagtataacgcgttgaggaagtataaagcgttgag

SEQ ID NO: 588216 - DNA, 1010 bp, Homo sapiens
catatagcatctcacgttctaggagtactagtatatcgctcacacctcatatcctccctactatgcctataaggaataatactatcggctgttcattatagctactctcatcaaccctgaactaaccagcataccaccttcttagccaatattgtgccttatcgctcatactagtctttgccggctgcgaatgactggtgggcctagccctacttagtctcaatctccaactcatatggcctagacttgacgtactatataccgtaatacctacatcgcacaatgcgtatacatactaatcgatcccatacacaaatatataacgaccactgacgtgaatttccaaaaaacgcatactttagaatacatacgctaaccactcctacagactaatttatttagcgatcatccttctagtatattttaggctacatatcaagcaaagaactctaagtgtatgggcttgtttccccacttaaaaacctaggcttctctctcgtacacccccttggtatcacaagcacgggtccctctcataaattaactcaaacgtaccctgaacatccataccaccgcttcgggacactacactgggtggagacccatatgggcccacgtatatactcatgtgcaattccgactcatgcacggaaacgataattgcttaacatgcacatgtatgtagttgaccctatcaagaggtacttcgcttttatttcataccacgattgcatcatgcacacacagaacttaaatcatattgtgggtagttccctctttcgaaaatcacaggttatgggcggcacctttgggtgtatcagtcaccccgaatgagtgcaaccagacgggaacggcctgaaacgcgaggccagatacttatcctaatttcttacagcccctagttagtgtcccattccccttattcatgcgcaccttagtgtaccctcgagaaacacctaagggctcacttaaacgatttagtgaggtcactctcactggcccaagaatat

SEQ ID NO: 588217 - DNA, 403 bp, Homo sapiens
  misc_feature (152)..(152): n is a, c, g, or t
  misc_feature (167)..(167): n is a, c, g, or t
  misc_feature (173)..(173): n is a, c, g, or t
  misc_feature (180)..(180): n is a, c, g, or t
  misc_feature (343)..(343): n is a, c, g, or t
cagaaaaattcttatgagaaacaatgaatccctgggtgcttcaagccaacaaagttgggatggttttttacacagccaatagataactgaaacccaaggggaagaatactgacacagacttagtatttattcctgctaggtatagctacacnattcccagcctccgnttgccnctgaaancaacttttaagattaatttaaaaagcaatcagtaagtggttaattgtggtgagcataaatatactttcataaaaggaatggaaaaaatatgttaaagtactgcacggatgaagattcatggctcaggataatacttcctgtgacatgtatgattcaggaagtnccgtgtctctaacgacttagataaaagtgaggacagatgctctgaaaactgttggatgga

SEQ ID NO: 588218 - DNA, 1192 bp, Homo sapiens
  misc_feature (111)..(111): n is a, c, g, or t
  misc_feature (628)..(628): n is a, c, g, or t
  misc_feature (644)..(644): n is a, c, g, or t
  misc_feature (673)..(673): n is a, c, g, or t
cgcacttcggtatgcccttcgggagaacgggcccctaatatgagattgcgccggcacaccccaatggtaaaccaccaattggcgtcccccaattgtccagtggtctatggncacgcgccccgggaagcaagttttaatgtccaatatgcaaacaatccaggctggcgtgcctgggggtttgcttgtgggccacccatgggttcacccattacttgggggttccagcgcagaaagaaaggctgagcttgcaaggcctgcaatcactttccaggaagcttcaagggaaccaagcaagctcagagcaacaagctttctttttatatatcaaacagttttctggagtgtgcccagaaccagggtgacatcaagctctgtaagggtttcaatgaggtgctgaacaagtgccgacttgcaacggatttggcctaataaagaagttcaacctggacagatggagaatcagctctcataactaagttaatttagtataaaaatagaattgatagtgagggtataaagtgtaaccatcagttaaacctctcctgtcattcctaggttccttgcttcagaattgaaatggaagtgggggtgtccctactctgtagaatctgggactgggcaaatgttngtgtggcctccttaanctagctgttatgttatgattttattcttngtgagttaattagaataaagtcagttttcttccagaaagaaaaaaagaaataaagaggaataaaaaatattgttgggggggccgcgggacctggggagaaagttttttgaaaaccacgagcagtgtgggaggagggcgggctcgcaacaagagtgggacgtgtgcagaacaggtggaccagaagaggtgtatgcccaaagggagaacccggggggcgcagggaagtaagcgtgcgggggggattttccccacgactaaaaaataagataggcctcgcggggggagcaagagccggcagcgttgttctagagaaaagatacatcgccatacataagaggagaggtcataacgaggaggtgtctcaacaagtgggggatctctatcatcacaaggggggggggctcccacagtcgggagagagtcctagatattgccaaaatttaggccccgtgggccggggggtcgttggcttgaagcgagcgcaacgcaggggaaggcccgtggcaagccctgaatact

SEQ ID NO: 588219 - DNA, 595 bp, Homo sapiens
ctaggatgcaggtggcatgtcccaggctggggcctgtcccatggaaaccattttctggtccggggcctccaggcctgtgatgggaggggctgccacaaaggtgtctgaaaggccctggaagccttttccccatggtctgggctattagcattgggttcttcttcacgtatgcagatttctgcagccttttattcctccccagaaaatgggtttttcttttctaccgcatgtccaggcggcaaattttcccaaggtttatctgcttccctttaaatgtaagtgctagtttcaggtaatctcttggttcatgcatatgagtatatgctgttagaagcagccaggtcacatttggaatgcttggctacttagaaatttcttcggccagatacactaacccatctctctggacttcaaaggtcgacagatccctagagcaggggcacaatgccaccagtctcttggctaaagcatagcaagagtgacctttattccagttcccaataaattccccatctccatctgagacctcctcagcctggacttcactgtccatatcactatcagcattgtgatcacaaccattcaacaagtctct

SEQ ID NO: 588220 - DNA, 375 bp, Homo sapiens
cttctgaactcttctcccatccagcccatagtgtcggtgacagtgtgagggtggcagacacacttgatggcactcctttccatctgggagcatgactacttccagccttgctgagtctgtgtaggacctggcagacagttcctcttgcttagaggatggaagaagatcaggctgagtgttatgcgcccactgtgtccggcggagagaagtgcgcgggggtgtaccactaccttgcctgggctttacatggggcggggcggggagaagctggcactggaccctcaattgacgggcccttctgtgagcttggggctttggctttcatggcatggtccccgcacttggtataaagcgcaaggtcctgttgggcctagg

SEQ ID NO: 588221 - DNA, 195 bp, Homo sapiens
caatgccagagctatgatcagtcatggcgacactgcagtgcgtacttgagtgaccatatcagtccggctccgtccctcccacacgggggacaatgcttctccgcaggaggcctggccaaggtggaacaaataccctgatgtcgacaaatgtctcaaaatcccacagacggaattttcacaaagaggagaaacctc

SEQ ID NO: 588222 - DNA, 324 bp, Homo sapiens
  misc_feature (9)..(9): n is a, c, g, or t
  misc_feature (62)..(62): n is a, c, g, or t
cggatctgntaggtcgatcactgtactattggtcgatcactggtactagattggactgactngaaggtatggagcctgttgaatatagattgacaaataaaaaagaaatgctagaaaaaaaaaaactatagctacattatgtttattatcaaaattcaccagacattccatttttaaagaacctgatggaaaaatgcttcccctaacatgaactatggttagatagcattgtctgtcaggaaattcaccatttcagtagctgatctttatgtggaaccaacattagggcttggtccttattcataagtccagtgttcgaccaag

SEQ ID NO: 588223 - DNA, 1207 bp, Homo sapiens
ggtgtgtggggttggggtggtgtgtgtgtgtgtgggtggtggggtgtgggtgttgggtgttgggggtgtgtggtgggaaagaggcgcggttgtggggtgggggggttgttggttgtttttggtgtttgcgtgcgggctgccgtgttcctgtggtgggttgcttgtacgggtccggtgcggctcggtgggtgtttgttatggggaggtctggggtcggcggtgaggtctgtgcgtgcggcgttcctgcggtcgttcggctgtggacacggggccgggccgggtcggtttagcgcttttgcaatggtggcttgtgctgcttggcaacgggccgccaggaatgggacgttaacgtgcaggagccggcgccggctggtgggtggcgcgtgggcgtaggcgtgcggttggctgtcggctgggcgtcgggggcgcggcccgcttggtctgcagccgccagtcctggtgcctcaagcgctactgagcgttgagtagctgggccttccacgacgggccagcgcagtccggcctgcggcccgcggcgacgaccgtcgaccggctcggcgtctgtcgtggactacgaggccggcgtcctcgccttggtaggacgtgacgggcggcatgagccaccgtgcagaccgggccgcgccacgttccaggagccgctcgtgcccggccctgcggctctgggagggggccatcagcatcccccggctgccctaggggccaggaccggcgtgacagcctccagaagtgtcatggaagcagaagtcgtacagtagtgttcccttctgcatatgctgcgtttctcactcagcatcatttccttgagatgcagtccaggctgctgcacgcagtcaatagttcattcctggctgggcgcggtggctcacgccgtgtaatcccagcgctttgggaggccgatgtgggtggatcacaaggtcaggagtttgagagctagcctggccaagagtggtgaaagccccagtctctgcaggaaaagtagcaagaaagttagcacgggcagccatggcatgtgcctgtaatgccctgctagctcaggaggctgaggaaggagaatcacgttgaagcccgggcagacggaggttgcagtgagcgcgagatcacaccacagcactgcgagcctggcaagaaggcgggggctcggggtgggggggggcggggggcgggggcgggggggggggggggggga

SEQ ID NO: 588224 - DNA, 193 bp, Homo sapiens
accccgggcatgcctgtcccatcacgtataccccgatgaggagattgccatggcaacgtgtcactgccctgcgtcgcactgtgcccccgtgctttcccagtgagtgacctatcctgctctggtgggtcagacgcgaagaacgaggcatcacttcaaacctcaagtgccactcacaccggctgcaccccttccc

SEQ ID NO: 588225 - DNA, 484 bp, Homo sapiens
ctggtggttacaaataccctcaacatttgcttgtctgaaaaggatcttcttttttgagatagagtctcactgtttcacccaggccgggctgcagtggcgcgatctcaggctcactgcaacctccacctcccgggttcaagcgattctcctgccttagcctcccaagtagctggggctacagctgcctgccaccacgccccgctaattttttttttttagtggtttttttagtaaaaacaggtttcaccttttgggccaggctggtctggacctcctgaccttgtgatctacccgtttcagcctcccaaattgctgggattacaagcactttgagccggctagaattgaaattcttggttgaaccatttttcctggtatagagtctttcaggagttctctgcttttcctgaatttgacggttggcctctctagcaaagctggggaagtttccagggacaatatcctgaaatatgtcctgtaagtc

SEQ ID NO: 588226 - DNA, 742 bp, Homo sapiens
gctgttttcctgcgcaggagccgcaggggcgtaggcagcatggcgccagccggaatggcatggtcttgaagccccagttccatcaaggactggcagcggcgcgtggcacgtggttcaagcagccggtccgtaagatccagctagacagtaaggtccggcgaagccaagaggcgcgccgaatcgtcccgcgccccgagtcgggtcccatccgggccatcgtgcgctgcccctacaggttcggtaccactacgaaggtgcgcgccaggtcgcggttgttagacctggaggagctctagtggtggccgggattcacaagtaaggtggcccggtagcatcggcatttctgtgtgatccagagagatgggcggtgaacaagtccacgggagtccctgcaggctccgatactgtgcagcggttggaaggagtaccgatctcatagactcatcctcttccccaggaagccctcgggccccaagaagggagacagttctgcatgaagaactgaatacgtggtcacccagatgacctggaccggtcatgcccgtccggagacgtctataagaaggagaaagctcgagtcatcactgaggaagagacagaatttccaaagcttcgcatagtcgtccgttatggccgtgccaagcccggttcttcggcatacgggcaaaaagagcaaggaagccgcagaacaggatgttgaaaagtaaaaaattaagccctctgggacttggacatcagtcgc

SEQ ID NO: 588227 - DNA, 240 bp, Homo sapiens
gtccccttgtggccgatcaccctctcaggccggctacccatcatcgccttggtgagccgttacctctccaactagctaatgggacgcaaagctctctcacagcgcttatagctttcataattataggatgccctattatcataatattaggtattagcattcgtttccaaatgttgtccctagctgtgaggcaagttctttacgcgtactcacccgtcgccacccaacctaagtaaaacc

SEQ ID NO: 588228 - DNA, 477 bp, Homo sapiens
agagagaacaagaagtgatcatgtcaaagcactccttcccctacacatgcacggcgagataaaaccccaaagaacgtcaggaaaagagcaataaggaaactgacatcttagagtggcggaatctgataatgcaccacatcccatacctcttaagtgtacacactgaactggcacagacagacacattatcttcattcccccccgccttacttactacactctggcttccatttttcccaagttcttcctctgaaatcttgctcaaattatctaagtagtggtctgatattgtgtggcacaagtcttcaaacgaataatccttttcttgacagagttttatttcatccaagagttttgataattctccagtgacggtttcacttttggtcttttgggaaggagactcaacaggagatgaaatgtgtgtttcttgtgttgcatcttcctgtacaggctcttcgaggactgtagatcttc

SEQ ID NO: 588229 - DNA, 774 bp, Homo sapiens
tctgctgcgcacctgcacgctctgaacctacagcgcaggatacatttgggacttgccggctctcagaaagcgctcccagagggactctccgagctttggtttgcctacggtcggcgagagcgccgcggcagggaaccggtctggcacttcgcggtaaccagccagacttttgtcatggaaccaccgctcccggggctatgctactccctgtgccgaagacgtggcatcgtcttcatctagtgacgtgggtcgagttagtgtgtagtgttgtgtgacacagtatttgctattcatactggacctagaacgctctttatatgtctcttctggagtgatcagtgaaaaggatctactcatcaagctatttcattgttgtcgcgggctgtactcgcgccgaaggatgtctgcttggtttttacctgtctcggtctcctcgggccggctctcaccaggtgtattcctgagtggcgggaagatggtgcattgcgtgctctgtctgttgctgctgcttctccatgggcctggctgcgcctgggttgggtctggtgagtgctgcaaccgggcatgccccgtcaggggggtcacggatgaggcttccatagtgccgtgtgttgaccaacactgatcaacggcccaggaccaatgtagaatggggctgctggaattggactgcgtctggtgctagagcaacgggtgatgatgagctgcagaagatgtttggaatctggtgtcgtcgcctgtccgcggcttgcagggcagtcgaggccctaactg

SEQ ID NO: 588230 - DNA, 219 bp, Homo sapiens
  misc_feature (20)..(20): n is a, c, g, or t
cctagctgggactatgactngatttccgcgtttaaccactattggctcagtgactgtcgccttgttattgatcctgttgctgacccttgttgcttctgttgtcacctccaacaaaagggcaactcagggaacctacagccccagccgtcaggagaaggagggctcccgagtggaaatgtggaacttgatgccaccccctgccccggagagaccgactca

SEQ ID NO: 588231 - DNA, 166 bp, Homo sapiens
  misc_feature (45)..(45): n is a, c, g, or t
gcacaactcgcgccaaacggggcctaagagaagccggacttcgcngcaccatgcagtgataagggcggatcgggaatgctaacactggagattccatcgttagtgctgaggcagtatgggatcacgtcaccatggccacccgggagtacgattgttaaagctggca

SEQ ID NO: 588232 - DNA, 425 bp, Homo sapiens
  misc_feature (343)..(343): n is a, c, g, or t
  misc_feature (368)..(368): n is a, c, g, or t
cacgagggtcgaccacgaagtccggcacgtcgtagccgacccagcgtcgctggtcgggatcccaccagatgtagcgcttgcgttcgctccacggtttgccgtccgggtcggccgacgcgcggttgtagagcacccgccggtcggcgggccacgcccagccccactgcgattggctgggcgatgcaccgccgttgggcacccggcgcgcggcctggttgacggcgttggcgtacaccccggtgtagatccagcagccggcggcggtcgagccgtcggcgcgcagctcggtgtaggacgccaacgggtccgcgggctcgccgacccggtatccgttgatctcggncagcaccgcctccccgtccgggtcnccgtgctcgtcggtggggtaatcccaggtcagatccagcaatcggcggtcccgcctc

SEQ ID NO: 588233 - DNA, 133 bp, Homo sapiens
ctgaacagatatctggtgcaggatcagttcccagtgacgcccgtcagcacgctgtgtgcagaggccagtggaaacggcgcggcgcagctggtgacccactacgatgaaggtgcagggcccgtggtcatatcac

SEQ ID NO: 588234 - DNA, 235 bp, Homo sapiens
caataccgtcctctactcgcggtgctggctgggtgcggggtggtcgcattttatcccagcactttcggaggtcacggtgggtggatcacttgaagtcgggaggttaagatcagcctggacaacatggtgcaatcccgtctctactaagaatacaaaaattagccggacatggtggcgggtccctgtaatcccagctgctcgggaggctgaggtaggagaatcacttgaattcagg

SEQ ID NO: 588235 - DNA, 437 bp, Homo sapiens
tccccctgaatggaatcctcttacttactggtgggaatgaaatggcatggacgtgggaaaatagtttggcagttcctcaaaaatatacagttaccatatgacccagtaattctactcctaggtatattatgagagaattgaaaacatatgttcacacaaaaacttgtacgcaactgttcatagcaccattgttcataatagccaaaaaccagaaataatccaaatgtccaaatgatgtgtgaattaacaaaatggggtctatccatacagtggaatattattcagccagaaaaaggaacgcagtactgttatatgctgcaacatgaatgaaccctgaaaacccgctaagtgaaatcagacagacccaaaaagacaaatactgtatgattacacttatatgaggcccctagaataggcaaattcacacagacagagag

SEQ ID NO: 588236 - DNA, 240 bp, Homo sapiens
  misc_feature (5)..(5): n is a, c, g, or t
tcccnggggggcccttttttttttttgggaaaattttgtttttccctggggccaccctttttcccgggttcccctttttaaaaggcccgggtttttttttaaaaaaatttttttaaaaaagggggcccccccccccccaaaagggcatttttttttgttttttggggaggtttttggggccccttttttttccgtttctttaaaagttttttccctttaaggttttttttttttttaata

SEQ ID NO: 588237 - DNA, 953 bp, Homo sapiens
  misc_feature (277)..(277): n is a, c, g, or t
  misc_feature (284)..(284): n is a, c, g, or t
  misc_feature (536)..(536): n is a, c, g, or t
  misc_feature (586)..(586): n is a, c, g, or t
gtctcgacagtaatagatgtgttatccctctggtgctgtagctgagctgctgctgcggtattgtgcggttttgctgcgtgggtgggcctcgttttgatcgtgtgtgttgctcctgctgtgtgtctgcgcgctcggtcggctggggaccgcgccccgctgggttacccctcccggtgtgttttccccctcctatgcctttctccccccccgatgccgggccccgcgtcctttggcggggaccctcccgaaaatttctgttccgcacccctttacaagngttcctnctccgttcccgcacaaaattccccgggtttcttccccttctccgccccggggtttttttcacaggacgcccccccatcatgcgtccgcggtcttcgcccccacttcctgctatggtgccccgcccccgcggtttttattcaagtactaccttctaaccgcctgccctggcgctcaaagtgttccaccacgacataccgcgcgcgttctcgcgaggagggcgatctcccccttattctccgccccgcgaattntgccgctcccctccaactcgtagttcgccgcgcgtttgtgctcgacgccncctcttgggtagcgagccgataatctacaacggggcccctctcaaggcggtttttcccacttccatggcgcactgaagcggtgagggagacaagaggcactatgctgacccatctattcagtcctcgaggcggttacacccccgtgacactgcgagagagtttctgagactttattctcggcgcactcaaaggcgatctcttacgcttcttgcggcttgcgtccctcgttgttaccaccccttccgcggtgccgccgctcgcctaccccttgggtgatgaattcccaaaccgccttcgggggcccttttgaaattttttcggggcatgtttttttttccaaaaaaattgggccccccccacaaaaaa

SEQ ID NO: 588238 - DNA, 1077 bp, Homo sapiens
  misc_feature (406)..(406): n is a, c, g, or t
  misc_feature (1067)..(1067): n is a, c, g, or t
tcgctgaactctcgtcttcgacccatgactgctgtgttctcatctcagaagctcgtccgtaaatgagccccgaacagctgatgaacctcttctgtgctgggtttaccttagacacacctgatgatagccttcactgagctatgttagcatgaatgggccacaacgctcacccgccgctgtgttcgtaagtgacgagatccaagacaagcgacaagccgcctcgcagagcgctgtggtggttctgctcagattatgctgagctgctgggaagggaggatggatgtcaggctcattgatactgctagaggctcaccatgacatgtaggatgcgcagaggtagtgcgaagcagtgaggaactgtcctccagaagaaagattctcaatagacgcaggttggccatcttanagtggtgctgaagatattctgtgggttagctagtttgaatgagagcacagctgcaacgaagcatcatcctaaatgaaaattcattgggcaaccaagtatggacacacattgttgtccgtgatctagaacattctggagtgcccccgatgctctgcgacaacgcaccaaggggcgtgtgccgttttgtaaccgttagacgaccatgagatcctgttggataagaatcagtccatttcagcaaattacctagtacctagtgaagtggccatatcatgggaatgtaacatagaagccctgtgacaggcaatagatgggtattgctttcaaccgagcgaggaggtccaacttggcctgtcacttgggggcgcggtctgtggcggctggtccctgggcctgcgacttggggcgcggtggcagcgttccggacttagtcggttgtttccgcgcccgcttggattagctaccccggggccgcgaatgtggtgggaggcgggcccctgggttgcgccgttaccgttcgcggtcccaggcgctgtcaactcccaaaggggggtcggccgctctgcgttcggggcctttgaccccacgccggttctcgccttgtgggttttccttcgcgcgggggccccctgtcccccgcggcgactcctgcaccatctancctatctact

SEQ ID NO: 588239 - DNA, 420 bp, Homo sapiens
tgctttggacttattagttttttgttctttcagttcccttgtcaacttcaacttgatcgcttgcatttactggccacctccttaaatgagaatgtggagcggcacacacagctctttcccatggagagagtgccaccttgtggatctctaggatattgccgaggaggctcttagatcctggctccatttttccatttactggtaaactgaagttcacatctttgactttcaagcactttaataccttacctgggttcctgtctattcagttcattaatttacttattaagaaaatatttgagtgccaatcaagcattatgtagtgtatatattgggggtacttaagagttagaggagtttactattgaggagctcccaatgtgaatttatgacgttctggcacctgcgtcacgtgagctg

SEQ ID NO: 588240 - DNA, 477 bp, Homo sapiens
  misc_feature (251)..(251): n is a, c, g, or t
tctagagatctcctgagacgagtgtgctggacggctgttcaataggtgaggcatttgtcattgtacatgtgggaaagcacagtatagacacacagatattcttaggcacgacacagccacagtgacactccctccccagcacagcgtaaggtggaacagctagcaaatatctatacacataacttgcagatgatcatgcctgagtaacatggaggtggaaatatgacccaaattgggcaaacagacttgtnttcccaagaaactggaattttgatgtgagatgcatagagggtgagttgtttacagcccaccaggaggacagtttatggattcctaccagtgagtttcccagagtttccctggttattcaacagttcccaagattccatgagataccccagtatccttccactaaagtcaactttatgagctgcagttgttgtttgagccagaaccttaactactacacttccccaa

SEQ ID NO: 588241 - DNA, 251 bp, Homo sapiens
tagagcggtctcctgtgttactgtttcggaagaggtgcaaaatgaggaagtttcacatcaaaaaagacttagaaataaaacactcggatgagccaaaacataacagtgctaacggagctggtaacaaatcagagcctgagtgagcggagctcacggggcggggcaagacgcaagtggggtcaccgcagcgtcactgggaatcactttaagggaaatattctagatttttgtcctacctctgagtatggacc

SEQ ID NO: 588242 - DNA, 974 bp, Homo sapiens
  misc_feature (1)..(1): n is a, c, g, or t
  misc_feature (112)..(112): n is a, c, g, or t
  misc_feature (297)..(297): n is a, c, g, or t
  misc_feature (304)..(304): n is a, c, g, or t
  misc_feature (341)..(341): n is a, c, g, or t
  misc_feature (350)..(350): n is a, c, g, or t
  misc_feature (355)..(356): n is a, c, g, or t
  misc_feature (363)..(363): n is a, c, g, or t
  misc_feature (368)..(368): n is a, c, g, or t
  misc_feature (378)..(378): n is a, c, g, or t
  misc_feature (384)..(384): n is a, c, g, or t
  misc_feature (404)..(404): n is a, c, g, or t
  misc_feature (415)..(415): n is a, c, g, or t
  misc_feature (424)..(425): n is a, c, g, or t
  misc_feature (429)..(429): n is a, c, g, or t
  misc_feature (432)..(432): n is a, c, g, or t
  misc_feature (460)..(462): n is a, c, g, or t
  misc_feature (479)..(479): n is a, c, g, or t
  misc_feature (489)..(490): n is a, c, g, or t
  misc_feature (498)..(499): n is a, c, g, or t
  misc_feature (511)..(511): n is a, c, g, or t
  misc_feature (514)..(514): n is a, c, g, or t
  misc_feature (517)..(517): n is a, c, g, or t
  misc_feature (530)..(531): n is a, c, g, or t
  misc_feature (550)..(550): n is a, c, g, or t
  misc_feature (555)..(555): n is a, c, g, or t
  misc_feature (569)..(570): n is a, c, g, or t
  misc_feature (578)..(578): n is a, c, g, or t
  misc_feature (587)..(587): n is a, c, g, or t
  misc_feature (605)..(605): n is a, c, g, or t
  misc_feature (611)..(612): n is a, c, g, or t
  misc_feature (623)..(623): n is a, c, g, or t
  misc_feature (626)..(626): n is a, c, g, or t
  misc_feature (635)..(636): n is a, c, g, or t
  misc_feature (640)..(641): n is a, c, g, or t
  misc_feature (649)..(650): n is a, c, g, or t
  misc_feature (678)..(679): n is a, c, g, or t
  misc_feature (702)..(702): n is a, c, g, or t
  misc_feature (708)..(708): n is a, c, g, or t
  misc_feature (713)..(714): n is a, c, g, or t
  misc_feature (721)..(723): n is a, c, g, or t
  misc_feature (728)..(729): n is a, c, g, or t
  misc_feature (779)..(779): n is a, c, g, or t
  misc_feature (782)..(782): n is a, c, g, or t
  misc_feature (789)..(789): n is a, c, g, or t
  misc_feature (792)..(792): n is a, c, g, or t
  misc_feature (795)..(795): n is a, c, g, or t
  misc_feature (799)..(799): n is a, c, g, or t
  misc_feature (834)..(834): n is a, c, g, or t
  misc_feature (839)..(839): n is a, c, g, or t
  misc_feature (841)..(841): n is a, c, g, or t
  misc_feature (847)..(847): n is a, c, g, or t
  misc_feature (859)..(859): n is a, c, g, or t
  misc_feature (861)..(861): n is a, c, g, or t
  misc_feature (889)..(889): n is a, c, g, or t
  misc_feature (895)..(896): n is a, c, g, or t
  misc_feature (930)..(930): n is a, c, g, or t
naatatctccttccatcaaacaccaccaccaacacataccaactcttcccaactctcttcaatccatcttattctcatcactctttcaacaaacaacttcaacctcttcacntccttcatcacatccactcttcaatatatttacatcaacctctcttcaaatttccacccacaaaccactaaactatatcaccatatcaaatcaacaaatcaccattcccatccatacaacaacatattcctctataaacttattaaactactcctctatataaacaaaatcacctccgctctaanaacacantttctttcatacagtatacgttcactgttgtccgcancgtcaccgnaccanntaaggtntttcncacacgtgtnaccaanacacactatccaaaacagtnaccgatataanacacaacgnntgcngtntcaaaacactatcacgttgcgtgacgtnnngtagtacagtcaggtangtgccacgtnnaagtaagnnacgtccgtagtngtnggncgtcccacgcgtnnctaacgaccacgtcgcgtnccgtncgtagtatcgtcgnngtcctagntcgtgtgcncaaacaacccacccagtnggacgnngtaaacaagtnggnaaagtaaanntgtnnaacaacgnnaaaaagtagtgtacgtcccacgcgtaannaaagtcccaaaacaaacgtgggnaacggngtcgnncaaagtnnngtagnngtcgtatcaaagtaacgcaagtcgcgtagtaacgtccccactagggttgngtncgtccgnccnaanagtncaactaacaaacaactataactacataggcaacgnaaaancngtaggngtttaaggggtnancggtaacaggccaacgggtggcccattnttcgcnnaacaggtcccggcaaaacaagaaacggcggtccnatagtcatccccaatgaaaatacacttttacaatcccaaaggaa

SEQ ID NO: 588243 - DNA, 231 bp, Homo sapiens
gaggaggtcagtcatagccgccttaacgccggcgcctgatacggtcccaggagaggaggacgatgaacctgtttccccacagacaaccgaactgttactacggaaacaggggtcgacccgactcgtcccaccgagggattacatccaacccccggaacaaagatcgtacaagagatgaagagcgacgtggacccgtccctgtctccctacgccggcgcttaaggtcgactc

SEQ ID NO: 588244 - DNA, 699 bp, Homo sapiens
gagagaagccaaagcaccaccccgctccagcctccaaaggctcggaagtctggcatccctacttccgagcctggatcccagtaaggatcttgccctccctgcaacaccgagtgccttagacagctgctgcctgagaactggcctccagccggtgtcctcattccatggggctccctgctgactgcatttcctgatctgggatgatgtttaccagtcacaaaaccagtcatgttgcttccatgaagcttctctttgatagaattttcgaggccatgccacctcccttccagtccactatggaattccagaatcagtcacagcctctgattttttccaagaagagattgccttcaggcattgttacaatgtcaagccgtgtactgtgcagagacgatgcgtggtcatgcacagagcctgagacgaagttcttaccactatgtgactggctggagcaaccacctgtgaatgctacatcccttggacaggactttcttggctttggcttatgaaaagctgtgcttgagacttaggtacttttctcacgtggacacactgatcccatcccatattgcatctttgaagagatggatatcaagtacactttggtagctgaactaatcatatctttctgatgtctatcgtatctcctttgaggaaaagaagacacatggtaatggatgattgggttgttcaggtatg

SEQ ID NO: 588245 - DNA, 847 bp, Homo sapiens
caaaattttttttagggtagcacccaatatttttacaaaaaaaaacaatgtcaggggcacagtgccctcgatttcatgctggaatccccgccgcagcctactcagaagacatcgagcggttctgagagcctactgggcacgttagtatgagtgctgtaacctgaagtcaaaccttaagattatggataatcttcggccaattaatgcagagtcagccattcctgttctctttgcacttgatgttgtggtgatatcattaaagatttttttttcggtcaattactttgagtggcaaaataaaaaatagcacataactgtatataataagataacgatcctacaagttcgttttgtcatcaccacataatttaaatactgaccaataacaaaatataatgccgcaaagaatgaataagtatgataagcattccccgaccacttatcattgcaacaacatgcgattatctgaaaacctaaacaataatcgatttacaaatatcacttataccaaattacgacgactccattcaaatatgtgaaatagggaatagtggaggcggggtgacgagacattcaccgtgctttacaccgctcccgtgaagtatattatacataaacctaatatctaatagaagatccatttataaaaatagaataaaaaattctgaaaagatcgattataccaacctacacgggtcaagtgtaatttctattgtgccagcgatgtttcaaatgttattattatgccgaaattaactgtaagtagtcacgacgacatcacacctcgttgcttattactaactcctatatcactcgctgttataaaagtcactaatatataagatat

SEQ ID NO: 588246 - DNA, 136 bp, Homo sapiens
  misc_feature (73)..(74): n is a, c, g, or t
ggcggcgcggaacggtagatgctgtggtgtccgctctgagctcgcagcttaaggagcttgaagatccgcgganngagggcgttgccgcgtcccgagtcccggccataaagttgcttcaagatcccggaggccaagg

SEQ ID NO: 588247 - DNA, 674 bp, Homo sapiens
tatgatcacagtgactttacgaggaggttgtggatgctccatggcagcctccagcttgctcttctttctgagagtcggctcaggcagacaagagctgctgtccttttaggaatatgttcaatgcaaagtaaaaaaatatgaattgtccccaatcccggtcatgctttggccacttgggcttctcctgtgaccccgaccgttgatcggtggggcgtagacttgacaacatcctcacagtggcacggagagaaggcccataccttctggttgcttcgatgacctgacaccgtgccctcagtgatacgtacgagtcaaaaaggaccaactggcttctgtgcactagcctgtgattaacttgcttagtgatggttctcagatctatgaccagtatatttgaagactgtaaatatgtctgtgccttaaagaggagagaagcaagtgtagatggttaaaagactgcagggtgctgaagttctgagccggggcaaagtcgcacagggctgtcggccagctgttgtgggccccggagtcaatcaggcagccttccataggcggtcatgtgtgcctgtgagcacaatgcgtatatgtgcgtctctctttctcccttcaccccaggtgttcgccacttctctgcttagcctttcaccttgggtgcccaggttcctcgatttctg

SEQ ID NO: 588248 - DNA, 726 bp, Homo sapiens
atcatactagacattgaccatctcacttctaggacatactagtaatatctgactcacactcggttcatgatcctccctactatgtcctagaaggaactgagtactatcggcttgtgccattagtagtcgtatctgctcataatcgcctcaacaccctcgactccctcttagccacaactattcgtgcctattgccatactagtctttgccgcctgcgaagcagcggatgggcctagccctactaggtctcgaatctccgacacatgaactggcgctagatcttacgtacatagcctaaatcctactccaatgctaaaatgtaatcgtcccaatcagattatagttagctaccagctgacatgactttccactaaaacacataatttcgaatcaacacaatcacccacagcctaattattagacactcatccctctactatatattatgataccaatatcaacaacaatcctattggagggctgttgccccaaatccgtttttacctccgaggccccctcaataagacccactcttccatgaatatctgagtcttagcctggaggtaccgttgcccctgcatcaatacatggcaaggcatggcccacttatccagtgaagcactgatgcgggggaaagagaagtgctaaggctctctataactaatgctccctataattctccttaatttattatccttcgacagtcatcagaatcttactccagtg

SEQ ID NO: 588249 - DNA, 1022 bp, Homo sapiens
ggtcgcgggacaccgggtgtagagggcggtcgtcgtgcgggcagtggcggcgagaatgttggctaccagggttattatagcctagttggcaagtgagcaattaccacctctgtgtgtgtacgagctcatgagacatgtgtcgtgacagagctgagagacttttctgctcccatgcttatatggatcggcagtgaccaccccttgccaggaggtggcccatgtcaagcacgctgtctgccagccagaaggcacatgaaggagaaggagaaggcctccatggagcagcctctccatggatgaggaaagtcgagttgtgatctgcaattaagttcaaggagagctattgctgtagatgaacagggggctctgagacgagtaggaagacggtctcgtcgaggcggtcgccagtgttcttcatcggtttcaccgcagctactgtgatcatgtgtgcatgaaggcactcatgtgtacggtccccctcccggcaaaggcgttcgactagaagtagtcgcggtggccaagacagtatccacagaggattgctggaactatgaccggtgaacccccgtccagggcttagcctccaaagtgggaactacgaaaggaaccgagtggacactaaacgtgagagatgctgggccttgcaggccgagtaccatgggacgtgggcatctgtacaccggccatgacaactccagtggcctatttaccgggaaaagcttggtggatgcccaaacgagttgtacgaactgctaagtaaagtgaccaagtttaccctggaagacggcatccaagcacagaggaggacccgtacaacatcgtgagacattcctcttgcttcagctgcatcctactaggcctcggcgacaataaggctggactaaaagagcccacggccggtttatgccgcgtgtggacccccagattgtgctacatcgtcacgtgctcccaaatggcggtgttcccgccagcaactaccccgggatccaacaacataggccagtgataatccgccgcatatg

SEQ ID NO: 588250 - DNA, 361 bp, Homo sapiens
attcgcggccgcgtcgacaaaggtgaaaaacagtgaaataaaaatgaagaatgttttaaatgagttcattggtagacttgacacagctgaggaaagaatctaaaaccttgagtatatgtcagtagaaacttccaagatagaaaagtaaagggaaaaaagactgaaataaactgaacagaatatccaagaactgtggaacaacaataggtgtatcatatgcatgatgagaataccaaacgaagtaaaaaaggaaaggaacagattaaatatttgaagcaggaacaacagaaattttcctgcaaattaatgtcccacactaaaccacagattcaggaagctcagaaagcattaggataaatgc

SEQ ID NO: 588251 - DNA, 506 bp, Homo sapiens
  misc_feature (1)..(1): n is a, c, g, or t
  misc_feature (345)..(345): n is a, c, g, or t
  misc_feature (357)..(357): n is a, c, g, or t
  misc_feature (389)..(389): n is a, c, g, or t
  misc_feature (428)..(429): n is a, c, g, or t
  misc_feature (470)..(470): n is a, c, g, or t
  misc_feature (475)..(475): n is a, c, g, or t
ngatctgcattcatcggcggcggcaatatggcacgcagcatgatcgcaggcatgattcgccaaggcgcccccagcacgtcaatatgcgtcatcgaaccaatcgccgcactgcgcgacgcacttatcgccgacttcaacatcaaggccgtcaccacagccacagaagcggccaccgacaccagcacctgggtgctggccgtgaaaccccaagtgatgcctgacgtgtgtgccaccctgccacttccagtgcaacccaacacaccactggttatctcaatcgctgcaggcatcaccacctgcaaactcaaacactggcttggcgacacctgtgcgattgtgcgcgcnatgccgaatacnccagccctgctaggtgccggcgtgaccggacnattcgccacctcagcacaccacggccacacaacgcaccnntcgctgaagaactctttaaccggcgtaaggcaagaccctantggancaccgaaggaagcgttaatggacgccgtgac

SEQ ID NO: 588252 - DNA, 309 bp, Homo sapiens
ccgatgactgatagcctccggagtagctaggggtatatgcgccgggacacgcccagctaattttgtatattagtagagacgggggtatcacctatgttgggcaggctggtctcttaactcctgacctcaggtgatccgtccgcctcgacccccccaagtgctgggattacaggcgttagccactgggcccgatctaagagctctaaagtgttaatgtaatgtgggcagccggttgtagaagtaaagtccctttctgtgtggtcctctggatgttactctttattacccctaggagggcaacagcgcgtt

SEQ ID NO: 588253 - DNA, 1416 bp, Homo sapiens
  misc_feature (1131)..(1131): n is a, c, g, or t
  misc_feature (1273)..(1273): n is a, c, g, or t
ttgcatgttcgtctgtctgtcgttgtaatacgactgactgtggtctctagtggtcgatcactcccctttgtgggtgtttttgcaccagaatttttccatttggggggaacaaaacccattgggtcctacacaacaccggtgtgctcatagattttcccacatgtcccccttcctggggaaacctttgggttttctattgggtgcacagagaacccccccctgattggtctccacgagctcattttcaggggggccacctgtggggaaacacaagctcccagccttttgggagataacctggtctgcccgtcaattattccccggggggaaattttgggccctttttggtggttctccccccaaggggaggcgcccctctccgttggaggatcaaggggaaacaagaatgtttcgtggcccaacaataaagagtgccccaagcatgctattccccccaggtgctgtgggggcccacagtgggcccgcccaaaggggaaagggtcaaccttggtgcacaacgccccccagaggaccacctggggttcatcaggggccccccggaaggaaaggacccctctcccgtggtggtccacaggcttttattgggtatttcaccccccgcgtttaaaagttcttcccacagggggcacacccaggttgaagaaatccctgagagtgaattgtggcaaaacgtgagtcacaagagccttgtgaagaccccaaaagtgggggaagcctcaaacgccgatatagcccacaccgctttccttgaaacaatttgcgtccacaacagctttcgtcgcccccttttcgtgcctctttggcgcttggtgcacagcacacagcacagggttgtttccgaccacaaatgggcacgagcaatttatgcacacccccctctaagagtggctttgaatatttcccacagagaggaaactcctcgcactttcttcgctttctcttggagggggttgtccccacaatgttgcccacagtggttctgttctcgcacagagttgggctaacccacacactcgtgtgcaatccacgtaacccccacttgctatcacttccaacgggtatccaaacgagtcctggcctctgtctgtggaagaccggattacacccttncccacacttgctgagaaaaggttcaaggcctcttcttggctaaatccactctcgcctcttgtggctgctgcccccgtggctgctgccacaccaccacgctgctcctgctgctgctgcacgccccacgctaaaggttgaaagnccaaggaaagaagtcgcgagaggaagtcggaacgaagaataatgggagatttggtctctttgactaatcacccaaaagccacccacttagcccgttttatttgccaaaacacagggaataaaggcttacttctttaaaaagtc

SEQ ID NO: 588254 - DNA, 437 bp, Homo sapiens
  misc_feature (1)..(1): n is a, c, g, or t
  misc_feature (345)..(345): n is a, c, g, or t
  misc_feature (357)..(357): n is a, c, g, or t
  misc_feature (386)..(386): n is a, c, g, or t
  misc_feature (403)..(403): n is a, c, g, or t
  misc_feature (411)..(412): n is a, c, g, or t
ngatctgcattcatcggcggcggcaatatggcacgcagcatgatcgcaggcatgattcgccaaggcgcccccagcacgtcaatatgcgtcatcgaaccaatcgccgcactgcgcgacgcacttatcgccgacttcaacatcaaggccgtcaccacagccacagaagcggccaccgacaccagcacctgggtgctggccgtgaaaccccaagtgatgcctgacgtgtgtgccaccctgccacttccagtgcaacccaacacaccactggttatctcaatcgctgcaggcatcaccacctgcaaactcaaacactggcttggcgacacctgtgcgattgtgcgcgcnatgccgaatacnccagccccttgcttaggttgcctcgggcnttgtacttgtgtacttntccgcctnnactttctaactatctagtcaggctc

SEQ ID NO: 588255 - DNA, 264 bp, Homo sapiens
gtaaaaaataaaaagtctaagaggatacacagaaattttaagtggttacctccacggaatgggattaggggatcagaggtgaggaactcatggtttggctatttctcgttctttctgcactgtttcaaattttacagtgtattattgtacttttaaaagatagctgcacagctagcctcaatggctctatttgactagtcttagtaaaagtagatttaatgagcaccctaactcagcagtccatttttttacactggatatcta

SEQ ID NO: 588256 - DNA, 919 bp, Homo sapiens
  misc_feature (15)..(15): n is a, c, g, or t
  misc_feature (36)..(36): n is a, c, g, or t
  misc_feature (46)..(46): n is a, c, g, or t
  misc_feature (59)..(59): n is a, c, g, or t
  misc_feature (120)..(120): n is a, c, g, or t
  misc_feature (127)..(127): n is a, c, g, or t
  misc_feature (131)..(131): n is a, c, g, or t
  misc_feature (133)..(134): n is a, c, g, or t
  misc_feature (140)..(140): n is a, c, g, or t
  misc_feature (143)..(143): n is a, c, g, or t
  misc_feature (151)..(151): n is a, c, g, or t
  misc_feature (162)..(164): n is a, c, g, or t
  misc_feature (166)..(166): n is a, c, g, or t
  misc_feature (181)..(181): n is a, c, g, or t
  misc_feature (188)..(188): n is a, c, g, or t
  misc_feature (191)..(191): n is a, c, g, or t
  misc_feature (197)..(197): n is a, c, g, or t
  misc_feature (204)..(204): n is a, c, g, or t
  misc_feature (206)..(206): n is a, c, g, or t
  misc_feature (215)..(215): n is a, c, g, or t
  misc_feature (230)..(230): n is a, c, g, or t
  misc_feature (234)..(234): n is a, c, g, or t
  misc_feature (326)..(326): n is a, c, g, or t
  misc_feature (336)..(336): n is a, c, g, or t
  misc_feature (357)..(357): n is a, c, g, or t
  misc_feature (383)..(383): n is a, c, g, or t
  misc_feature (386)..(387): n is a, c, g, or t
  misc_feature (399)..(399): n is a, c, g, or t
  misc_feature (401)..(401): n is a, c, g, or t
  misc_feature (404)..(404): n is a, c, g, or t
  misc_feature (414)..(414): n is a, c, g, or t
  misc_feature (442)..(442): n is a, c, g, or t
  misc_feature (448)..(448): n is a, c, g, or t
  misc_feature (451)..(451): n is a, c, g, or t
  misc_feature (469)..(469): n is a, c, g, or t
  misc_feature (485)..(485): n is a, c, g, or t
  misc_feature (489)..(489): n is a, c, g, or t
  misc_feature (493)..(493): n is a, c, g, or t
  misc_feature (498)..(498): n is a, c, g, or t
  misc_feature (513)..(514): n is a, c, g, or t
  misc_feature (525)..(525): n is a, c, g, or t
  misc_feature (539)..(539): n is a, c, g, or t
  misc_feature (544)..(544): n is a, c, g, or t
  misc_feature (555)..(555): n is a, c, g, or t
  misc_feature (566)..(567): n is a, c, g, or t
  misc_feature (575)..(575): n is a, c, g, or t
  misc_feature (585)..(585): n is a, c, g, or t
  misc_feature (886)..(886): n is a, c, g, or t
acataactgggacangccctggccgggagtattcanaagccaagtnggttgctggtgancacaccaccccgctccaccaaggccttggagatgcttttgaagttgcggtagagctcttantgccagnagtnannttgcanggnggccatgncctctcggatnnnanctgcagcctcgatanaccaggngtnacagancattttntnatgctgggncgtggggtggccctnattnagggattttgaggccctcgagagaaccaccaccatggcatagaggtcgatggccccgtctgctagctgctgcagcagaaactgttcattganaatccccttnttgtgttttattagcttggcntccaccacagtggcaaactgctccanatnncgtattgctagntngcnacttcgattnaactccgggtggacaagttcgctgaganttaggntgntgctcagccctgcccgcngcctcatctgtttgcntgcntctnctagnaggaggccagcattnncaaagggattntttagagcactgcnaagcncagagagctcntttcctttgtnnatacagcnctgcagagcnacaaacagccgaagaatgtcatttgtcccctcaaagatccggaagatgcgaagatctcggagcacacgctctactccaggttccttcatgaagcccataccccccatgatttggatgcattcatctgtcaccttccaggctgcctccgagccaaagattttgctgatggcggcctctatctggaagtccgtggctccctggtccatgttagcactcaccatgtaagccatggactcagttacatactgcagcataaccatccgtgccagcttctcctggatcagccaaagttgtgaatttntcccaaactgggtacgattagtggcatgatcta

SEQ ID NO: 588257 - DNA, 779 bp, Homo sapiens
gagccggggtgacgagggcccggccctaggggctggtgggcaccgaggagctccgcgcggctgcagcgcgggcgggagcggggacgcgatgtcgcctgccgccgcgtccttgcggtgcctggggcatgcgcctccggggctgagcctgccgctcagagccaggacagcctgagcatgcgctgggctgctccctgcgggcgcaaggaggatggtgctgctgggctgggagcctggtgctggatgccatcagagcacccgctactacgagaagctggaccctgggagacagaatccagctggctcagctacacgcgacatctggacgctgccgacccagtcgcctgacggccccggagcagcggacccgaaagcgggccggcctgcacactcgggctaaaagagatgctaagaagaatgcctgcaaggcgaagtcaccattaatgtgaccagctagcatccaacgcagatggcacacgaagtcgaagaatcagcaagggaactgttgtccacactagcacgagagtgcgaagcaggcagggcagatggacttcttcagtgtccttcacggcactggatcccatcaaagcacaccttgaagcaacgtggcctgccccttggctgggacctgaactatctacctcgacgtccctgggcacaagaacgtggccttaccctggccatgcaagactggctgccctgaatatggaggagacccttactgcagccatactacattatccattgtacaactgacttcggcacaactcgctcacattatg

SEQ ID NO: 588258 - DNA, 109 bp, Homo sapiens
gttgtgcttcccacaggagaatgcagacgtgtcctcgatgccagcccttccccagatcaggacccatcctcttggtcacttggccctctggctgcatccctaccgagcc

SEQ ID NO: 588259 - DNA, 257 bp, Homo sapiens
acaatccaatattacactgcaaatgaagcatgtagaaaatagctgaccgggtgcggtggctcacgcctgtaatcccagcactttgagaggctgaggcgggcagattatgaggtcaggagatcgagaccatcctggctaacatggtgaaaccccatctctactaaaaatacaaaaattagctgagcgtggtggcttgtgcctgtaatctcagctacttgggaggctgaggcaggagaatcgcttgaacccgggagtcg

SEQ ID NO: 588260 - DNA, 100 bp, Homo sapiens
cgctcatctagtgagatcatgtgtgattgtggcacaacaagaaaacggatgtgacaagctacagagcgaatgtcatccacctaccaaaggcattctcgtt

SEQ ID NO: 588261 - DNA, 411 bp, Homo sapiens
actcactagagaacacttatatccatatctgagggagaactcactgtggctcaatgatctggacatacacaggaaccaacacagatactggaacagaccaggagaattgaaatggaattcactagaagagttaaacagcagattcgacgcaggcagcaggcagaatcagataacttgataataggacaatggaacaatatctagtatgaggagcagcaaggagagcatactgacgaaaagtgaacagagcatacgggacctgtaggacaacatcaagcggattaatatatgtattatggaagtcacagaaggaggagagagaaaggagacaaaacatctgaaacaataatggctaaaaatgtctcacatttgacaaaacatgtaaatctacacatccgagaagctcagctg

SEQ ID NO: 588262 - DNA, 249 bp, Homo sapiens
gcccttaaggggcgggttttttaaaattggggaggggggagcccccccccccctttcccccaaatttggggggggggggggggaatttttttttttaaaccccccccccccccggttccccggggggttttttttgggggggggcccccggggtttttttttttggggtttttttcgggccccctttttttttttcccccgggggggggtttttgttttttttaaaaaaggggcctttttttttgggga

SEQ ID NO: 588263 - DNA, 479 bp, Homo sapiens
gctgtactgaaaatacaaaaaattagctgggtgtggtggcaggtgcctgtagtcccagctacttgggaggctgaggcaggagaatggtgtgaacccaggaggcggagcttgcagtgagccaagatcgcgccactgcactccagcctgggtgacagagcgagactccatctcaaaaaaaaaaaaaaaaaaaaaaaaaaaaaaaaaaaaaacacccggggggcttatatatgtgggggggcgcgggaaaaaggggtaaacgaaaggggccaaggggccaaatacggggttcccggtgcacccagttttttgttggcccaaggggggaaaaactgggcgggggctccccaaaagaggggaggggaaataaaattccggaaatacgcgcgggggttacacgcggggatatttgaggattccgcggaacaatgccccacgagaaaaccccacccggccaaccgcgcggctagtcgaaaagggta

SEQ ID NO: 588264 - DNA, 567 bp, Homo sapiens
  misc_feature (36)..(36): n is a, c, g, or t
  misc_feature (54)..(54): n is a, c, g, or t
  misc_feature (73)..(73): n is a, c, g, or t
  misc_feature (111)..(111): n is a, c, g, or t
  misc_feature (130)..(130): n is a, c, g, or t
  misc_feature (149)..(150): n is a, c, g, or t
  misc_feature (206)..(206): n is a, c, g, or t
  misc_feature (364)..(364): n is a, c, g, or t
  misc_feature (388)..(388): n is a, c, g, or t
  misc_feature (393)..(393): n is a, c, g, or t
  misc_feature (402)..(402): n is a, c, g, or t
  misc_feature (483)..(483): n is a, c, g, or t
  misc_feature (520)..(520): n is a, c, g, or t
  misc_feature (532)..(532): n is a, c, g, or t
  misc_feature (560)..(560): n is a, c, g, or t
tcagctcctccgatgcccttaccagttacatcaccnctgctgccatccccaccngccgccgtcggaggagccngcgcgactgccgttccctcagctgcttcgatgacttcnaccagggctgcttccgcancttctgttcacgttcctgnntctgctcttggtgcaggatctgcagctactgctgatccagaagaaatgtatgtgcntagagttgtattttctgttataacagattttaggttttaactattacagcccggatcacaggaagatgtgattttgcttcaaaaaatagaattagcagcagtttagctataatgggagtttctcctcccatggagctcagttgttgtgggaaaaaccntcatgccagttcacagtggcaaancattncttcaaggnaactgcagtcaaaatatccccgggaccattcatcctggaaagtagtaccttcagctttccagatcactgggaaccaggatnagctcacacccagtcttttaaaagtgttcattccctnaaaagtggttgnctaaagtgaatatggtccatagtggggncttttaa

SEQ ID NO: 588265 - DNA, 106 bp, Homo sapiens
gtgctatgagagcgaggggaggcggagacggaggaaggtctgaggagcagcttcagtccccgcacgagccgccagccgcgaggtcgcaggacggtctggactcccg

SEQ ID NO: 588266 - DNA, 110 bp, Homo sapiens
ctcggacactgaccacatgaaaaaccccgtctctactaaaatacaaaattacgtcaggtgttgtggcacatgcctggtatttcgagctacttgggaggaattcgcttgat

SEQ ID NO: 588267 - DNA, 350 bp, Homo sapiens
agtggggtgggttatcaaagcagtggacagaaggtgtggagctgcaaggtcacaagtctgccagaaagctcagaaggctaaatgaatattatccctaatactggcacccaatcttaatcagtgggtgaagaccggtctcagaacggttggtttcaatttggccatttaagtttagtagtaaaggactggttaatgataacaaggcatcgtaaaaccttcagaaggaacggagaaggttgcgtgcaccacttgggtttcctttttggcgtgtggcagttttaagttatcagtttttaaaatcagtactttgtaatggaaacaacttgaccaaaaatttgtcacagaatttg

SEQ ID NO: 588268 - DNA, 125 bp, Homo sapiens
tgcagctgacagcctatgtaatgtactgtaaagactgtaactagactctcagttatgaacacatcagactgctgctctgagtgttctactataggtattatcttgctctctgagtacgctgtagc

SEQ ID NO: 588269 - DNA, 403 bp, Homo sapiens
  misc_feature (403)..(403): n is a, c, g, or t
ccgcactgcatgcgaaggcctgtgcgcagtgctatgcgctcagtaacctgaggcaacatgtatagcagaacttggctagactcgattcacaagtactgtatatttctaatgagtgagagcagcagtcttacacattgcactactctgatttgagagactaccatgaccagtacactctgcccgtcagaggaactataatgaccacatccttacactctatggccttgactaacgcacttatagaatatgcacaccaagaagcgacatcatagagcggagacaccgggagatgtgtattgaacaaaccgcagctgtcagattgcaacgtcagcagtgcacgaacctatgctagaggactgtgacacgaagccacagaccaagtgactggtactctggtctgcgn

SEQ ID NO: 588270 - DNA, 108 bp, Homo sapiens
ctagaggatccctttctccagtgtgggaggggtgtcggatgagtctgagaagcagaaggaggtcggggagtcatgcaagaagggacgtctatgcaagaagggacgtct

SEQ ID NO: 588271 - DNA, 150 bp, Homo sapiens
tacttcagtaacactgaagcaatactggtccaggatgtaaggcatgatagctagctgacattgaagaattatgtggccatcagaaggcactttcttcaataaaagatgaatattaatcagacacaactttatatgtaatcttcaactaaa

SEQ ID NO: 588272 - DNA, 239 bp, Homo sapiens
tggttgcggctcccactggtgttgtggcctcccactgggtggcttcatttaatccttactataagccttatgagatacatataattatccccaggatgtagtcaagtaactggctttttttttttttttaaattaaggggtagggtttggcccggtaaccagggccagggtacgggggcgggattcacaattcatggcagccttgaatgtctggggctacagttgatcttccaaccttc

SEQ ID NO: 588273 - DNA, 123 bp, Homo sapiens
  misc_feature (36)..(36): n is a, c, g, or t
  misc_feature (76)..(77): n is a, c, g, or t
tccttatacttctttcttttctctgttcatttttgntttccttattgtgaattttttaagttgatgtgtttcattnnttattttcttataactgacaaaaccacacacacacacacacgttgt

SEQ ID NO: 588274 - DNA, 360 bp, Homo sapiens
tgctgggcgtgtatctctgaggttgtttcatgagtctggttctaagagtttggcagggtgaatgattttgctaaggtgatgctcacaggaatgggaaccaaaccttgaagaagcaagtacctttgcccttcatggcctgtctggtttcctttagtttctaatatttgcaaacacataccaaagattcccctagcaaaccaatgtgtgtttacagagttccagcggtagtaccccagagtttgaaagtgtgggtttgaatctgagggacaccttaatgactagttcacttggcgcctggttgaatatcgatcacagttcgcatataagagagatatctcagtccacacaggagacccgtgc

SEQ ID NO: 588275 - DNA, 166 bp, Homo sapiens
gccccttgggggggggggtttttttttcccccctggcctttcccgggccccgagtgggcctttttttcccctttaacccttttcccccccttttttttttgatttccccgtttcccttttttcttccccctttccaaattttttttaaggtttttttgcctggtta

SEQ ID NO: 588276 - DNA, 460 bp, Homo sapiens
ctctaaggtcctctagaggatctgctatgctggacaaggggagcagaataaacaaacaattagccattagctgtctcttttgagacgtcctggcctttggaggagagcataccagattctctagcacaggtggcatggccgttggtataaggaaaaacaaaggcagcaaatcctcgtctttaaaccagaacagacacaaacttggtcaggaaattttaccattctgaaagtccgtatcacctaacaaggaaaaccttcttatcctggccatgaatctagcagtgatctttcatatcagcaaaagcagcctaaccagtcccccagaaacgtcagaaaagccctcgattggggtcacaggcctgggtgtcctcaggtggcagaactcgaacagactgctgcctccatgccaggtgtgacactgggatgtgaacctaaatgtgataataaatatcaggctcca

SEQ ID NO: 588277 - DNA, 319 bp, Homo sapiens
taggaagtcagggattgtgtgatactatcccacacgtcgggcaggcctggacttacctatccataatcccagcactttgggaagccaaggtggaaggattgcttgagcccaggaattcaaaacgagcccaagcaacatggtgagactccgcctctacaaaaaatttctaaaaattagctgggtgcagcagcacgtacctgtggtcccagctactcaggaagctgaggtggaggatcacttgagcccaggtcgaggctgcagtgagccatcattgcaccactgcactccagcctgggtgacagaatgagaccctgcctca

SEQ ID NO: 588278 - DNA, 603 bp, Homo sapiens
  misc_feature (37)..(37): n is a, c, g, or t
  misc_feature (233)..(233): n is a, c, g, or t
  misc_feature (248)..(248): n is a, c, g, or t
gtcggtacctgatacatcttgtagtcaatattttctncaatagcaacctgttttgcctttttctttctttcttttttttactgagatggagtctcgctctgtcacccaggctggagtgcagtggcacgatctcagctcactgcaacctccacctcctgggttcaagcgattctcatgcctcagcttcccaagtagctgggattacaagcatacgccaccatgcccagctaatntttgtatttttagtngagagggtttcaccacttggccaggctggtctcgaactcccgacctcaggtgatccgcctgcctccgcctcccaaagtgctggaattataggcatgagccaccgcgcctggccatcatcctaaattcctttctatacctcactccctacatgtattccatcaaacagtctcattggctttccctccaaaatactaatatatcatgaatctgaaaacttaagttgctttcttgccaccagccacaccagacttctcatctggattactgcattcgtgtcctgaccattcttacttcctccactcttgcccaatatagtctttctcctagatgttcgggggatctctgagtgactgc

SEQ ID NO: 588279 - DNA, 270 bp, Homo sapiens
gtcgactaaaaacattagtgttttaggccggcgacgtaggctcatgctgtaatacgctgctgaggtcaggagttcaagaccagcctggccaatatggtgaaacccatctcaactaaaaatacaaaaaattagctgggcacactggcgtgcacctgtaatcccagctactcaggaggctgaggcaggagaatcacttgaaccagggaggcggatgttgcagtgagccaagatcgcgccactgcactccaccctggacaataagagggaaac

SEQ ID NO: 588280 - DNA, 1226 bp, Homo sapiens
  misc_feature (1226)..(1226): n is a, c, g, or t
tgggtaaaggagggggtttttgcggggtcaccggtggactcaggagcagtaaaatcacccacaaattcgacaggggctgaggaacctccagtgcgtgaaggggcagaaatagcagcaaagggcgcgtagggagacggaggggactcggggcgggtgcctcgtgcaggtcctccccagagagtgtggctcatacggcgagggatgccgcctcgataggacacccgtgacagccagaagcgcgctccgccgctcgggggaggcgtggcgcctccgtgcgcattctatcagcggggaagaagcagggtggcgatatcagtgtcgtgcgtgcccggggggccagaaggtccgatcagtggccgtggggactggccgccaaaaggcagcgggaaagcgagggccaacaaatgggaaacccaaattcccccaaaacactcgggcaaccggggctaaggtatcccaggccgaacgagctgaggaactcgggctcgagcgataaacagaggtctggccggcgaggaatcacactaagccgggcactcacaacgggggcccacgggtctccaacagctgggggtccccggggcagccacagggcccacggctcccttgctcccagacaaggacacatagctcgtccgactcgctgcagcagtgcccctaatcgcgagcatgccgggggcgaacacggccggggcacaacctctccaccaccatagtcagggcgacagcacccccatcacacgccgcccctagtgccctaaacccgccaacccgtaaacaccccccccacgggacccaaccaggcaaacctggaccccagggagtggcacccgcacaccaacggggggcacccccacaacgacaacccccgaaataggcacaccaccactccacagacagcaaccacaggagacccacaagcgcggagacaacaaattccttccacaaccaccagaactacagcaaaacgacgacgccggggcgcgccaacatcacagcgcagcccggggagaaccacacaccatggaacaaccccaacgggcgtaagacaagacaaccgagcggacggagagccacgaacacaccgatcgctgcaacagaacacgcgcgccgagaagacgcacaccagcaacgccgaccacacaccacgcggaagcaagcgaacccgcccaacccgcacaacaaggagcgagcagcacagcaaaaaaccgctcagagtcgtcaan

SEQ ID NO: 588281 - DNA, 408 bp, Homo sapiens
  misc_feature (63)..(63): n is a, c, g, or t
tattgtccccgctaaaacaaaacaaaaaactctttaatccttccccattaattagatttctcngccgtttttttatggcatttttttaaagatgccctaagtgttgaagaagagtttgccaatcccaccaaatatttaattcccggttgttaaaactgggttagccccatttatattttccctctcttgccttttttatttgcaataaaagggattgagcccttttttaaatgccctttttgataaattatgtttgggctagttgatgaaggagttttttttaacccgtttatataattttgcagccgaagcccaattttttgtttatttaagccccaaattcatggacagcatgcatcccggatcaatagactggacttattttccaataaaattttccaactttta

SEQ ID NO: 588282 - DNA, 571 bp, Homo sapiens
tgcatcttgcacaccctctttcataaaacataatctaccattgctactttgagtttcttttgggtggggtcagaacttaaaggcgtatgaactgatatgcttcaggagttttaatttgttttcaattttatacagtagtttaggacacccctcatctgccaagaacttttttctgtgacattcctttattggatttttcaaactgttcagcttagtttgtggatactctttttgtcagtttatatgataattaaattactcaacacgacgataacaagtacaactgacatcaaacagatgtgtgaacaaacaattgattcttgacaagcactgaattcagtggtgtgccagtgtgctagggagtggcctaaaatctagatgtgggccttggtcagtttacgtttggaatggagaatcttgattgacccagcagtccatttaagtggaggttggcaaggaaacttggcctgaacttcattttctggtttgaaggcaatgacatgctttcattctttaatcaggaacatgtgaaccgactggcattctgtattctgaattcctcctgttttta

SEQ ID NO: 588283 - DNA, 188 bp, Homo sapiens
  misc_feature (75)..(75): n is a, c, g, or t
ctagtgcaatgaatctgagagaggctactcagtagacaggtcccagcgcctcacacgattctttacctttcactncatcttgcccttcattattgcagccctagcagcactcctactcctattattgcactactcgggatcatacaacccattaggattctcattccatccctatccatggacgttcc

SEQ ID NO: 588284 - DNA, 439 bp, Homo sapiens
  misc_feature (389)..(389): n is a, c, g, or t
gttgtcacaatggtacttgggattgaattctgaagtacagtgaaggtaaagcgtgactgtggctttcccacgtccatttggctacaaagcttaattaagaaccaactgaacacataaagaggaagcctaacgaaagcagaagaggcatttgcgggaacagctcgtggggaggaccctcaaccagtcgtgctagaggaattaaagacacacacacaggaatatagaggtgtggagtgggaagtcaggggtctcgcaaccttcagagctgagagcttccaacaaagatttacctatgtctttattaacagcaagccagttaataagcattgtttctatagattatagattaactagaagtattccttattggaaataaagggatgggtctngctagttatctccagcaggagcatttccttaaaggcacaaatcactcatg

SEQ ID NO: 588285 - DNA, 424 bp, Homo sapiens
  misc_feature (37)..(37): n is a, c, g, or t
  misc_feature (137)..(137): n is a, c, g, or t
ccctgcaaatagaatagatgttgccagattgctcttncaaaaaggactttttaagatccagggagacaagactggaaagtcctttgttttttgaaaagatattttaatgggtatagaattctaggtttattttattntatttttttgagacagacagggtctccactctatcacctgggctggagtgcagtgacatgtgaacatggttcattgtagccttgacctcctgggttcaagcaatcctcctgcctcagactcccaagtagctggggtccataggtgtggccaccatacccaggtaatttttaaattttttgtagagatggagtttcgctatgttgcctaggctgatctcaaactcctgggctctagtgatcctctgcctcagcctcctaaagtgctgggattacaggtgtgaatgact

SEQ ID NO: 588286 - DNA, 353 bp, Homo sapiens
  misc_feature (353)..(353): n is a, c, g, or t
acgtgattgggtcctcgctccctcgatgggcaggcttggacttaacctttttgatcttgaaggagaacacaatatgtaagctgcaaatgtgtttccatgacaacagatacgacatgtctcagaagaggtatgaatatgaggaccagaatgttctatttccaagtgcattggagattcctgttcacaactaaggtttgaactgacgctcattggaatctcttgctgttccaattgcaaagatttatctggggctgaagctaccacttcttcaggtctattttcatgtagaaaggtacatcatgttgggtcgatatggagtcattatactttatttgcagccattccaccccccn

SEQ ID NO: 588287 - DNA, 1088 bp, Homo sapiens
  misc_feature (254)..(254): n is a, c, g, or t
  misc_feature (796)..(796): n is a, c, g, or t
ccgcgacccgcccccgcacaaaactcacaaaaagagaaaaagcttggccgcaacggagacttattatttatggcgcattaaactgacttttactttgaggtaaactctcaatttcttgactctccttaaaggaacacggtggtggggggagaggcggtgctaagagagcctcctataatattgggtccattttagttaaataaccattccattagtgttatcacgcgcagaggtagaacattcatccttacatngaatggcataaatatagcttgtcatgaatgcatggcatgcatatctcgatgctctcattctagagttggcccgtgcaagacccgctattaatccctctgggttgtgggtggctcgttatgtccttaccatcgacttgtggtctcagaacataatagcacatggttacatgatgtaaaacaagtgtcgcgaatgtccattcttgattccaccgagtctgtttatacatcgtaggcttgtatacatcaacatgcggggaactaactcttaggggaatttgcatgaccccctcacagaactgtttggccttgtgtataacgccctcttataaatgcttatgttaatggcgcggattaggaattatataatttgattaggcgtgccctgtcaaaacttatcttttcacgagccttgtatgtgccatattttttactgaagtagcgtgacgatatcttactcccgctcgttatcgccctgtataagccatcacatgatcgcctgtgaacatccacagcaatatttattattccgtccgtgtatctgnatagatgcccttcctacgtggagttctatatacccttgtcgccgagcgaatctcatgtcccaaatgggatatacacctggttattattatatcatcctttgtgtggtacctttaggacatgtacactaattttatgttctgaataccacacctgtttatgcaccagtcgctaataatcggaagatagatcgcctcgccgccgactatcttagcgttttatcataaataatcggcgccgtaccatgcttcattagacactccacgtgcttcattattgttaatatcaccgttt

SEQ ID NO: 588288 - DNA, 854 bp, Homo sapiens
ccgatttttcaaatgcgtttttgtcaaaccctcaccaaattttttcccccccggctaatcaccattgcggcccctccttgtccaagtgccccttggacgccaaaattcataaccaacgccgcatgatcgtccttggcccaatctgaagccttcatcctcgctccctggcaaaaatgttctccaatcctccccacacagcccctcgcttgtaccaccacccaatgctcgtccccccgacccccctgcaaagttctaccccggcgccataaccatttttcttatatcatctgcccccccggacattgacacatctccccactcaatatattctcccctaccccaactctcgctcaatttacgggacacccacttctcccaggtcgcctattctcacacctcctcttcttcaaggactcgtctcaacaggtctatctgtctccgcccaaggtaaagacaggttttgatcgagacttcactagccaaaccttcttggcttaacactccgcctcatatcccccccccctaggtcacaacatacctgggaggaaccctcctctgtgcttatgatacccccgttttcccttgaccaaaaactactgctcactagagtacacgggcttcacacactaactatggtcgcacccgctcataactcgcctgtgacaacaagatgttagccgccgcacaccatgtggggtcacattcagcccagcaaaccacgtaaggcaacacatgaaccccctacatttaccaccgacgacaacacccctcatagagttgaacaacaccctatgccccccttttcctccgtaatcccgatcaccccggacaaccattcccgggtttcccatggc

SEQ ID NO: 588289 - DNA, 124 bp, Homo sapiens
aataactgggttctccatactgtccattggtctgtctgtctgctttagtatcagtaccacactgtcttgatgactgtggctttataatattgcctgaagtctgggagagtagaccgctcttacc

SEQ ID NO: 588290 - DNA, 231 bp, Homo sapiens
tggaatgcctgggagttcagcagctctaaatggcaggagcttcttggttgaggaataactcatgtgaagcgtggcttggggccttgagacccctgcatccacgcgagagtgcaccccaccctccccgccgtggaccccagaagaccatgtcctccacgctctattgggaaggcgggaaggtgggacctgggggtgtctgaaaaagcccctttgaacttgaggccagtttgg

SEQ ID NO: 588291 - DNA, 354 bp, Homo sapiens
aaaaacacttaaacagggggggggtcttttttttatttttttaattaacaaataataattgcccatattcatggggtacacaatgatatttccatacatataatggggagtgatcaaatcacggtaattagcatatccatcatctcaaacacttaacatttctttatgttggaaacattcaacaacttccttccagctattatctatttgaaactacacattattgttaactacagtcatcctacactggtacaggatattttaaacaatgagtatttttcttaaaacatgaacaatggcttggaaaacaccacacgttcaaaaattgtgtgcctagtatggcgccaaaggaaa

SEQ ID NO: 588292 - DNA, 713 bp, Homo sapiens
gagaaaagagagaaaaaaggagagggagaagaaaggaggaaaggaagaggagaaaagaaaaaggaagggggaaaggaggaaggggaaagaagaagaaggggaaagaagaggaaagagagaaggaaagagaaaagggagggaagagaaagggagaaaagaaggaagaaaagaggaggaggtagagaaaagaggaggaaagagggacagaaaaggagaaaggaaaagagggggaaaaaggaggggaagagagaagggagaggagaacgaaaaaaggagagaggaaaaaaggaaaggagaggaaagggagagaaagaaaggaagaagaggaaagataggaagaggaaagagagaataaagaagaggaggaaagaggaagtgaagaaggagaagaaaagtggagatacaagagcagagagagaggaggaggagaaggaaagaggaggaatagaaaagggtgtagagggagtgaagagaagttgagaaaaagagggaggaaaaaggagagaggaagagaggagaaaaaggaaagggaggagaaagggaatagaggaagaaccagggaggacagagaagttagcaagaaggggagagagtaaaaaaaactcacagtataagggacacagtcacacacactatataacactactacactactactactactactactactacactactactatatatatatatatatatatataatagtg

SEQ ID NO: 588293 - DNA, 1396 bp, Homo sapiens
  misc_feature (515)..(515): n is a, c, g, or t
  misc_feature (776)..(776): n is a, c, g, or t
  misc_feature (779)..(779): n is a, c, g, or t
ttttgttcttgttttgtgttgttggtgtgtgtggtgtcgttgtgtgtgtcttatttttgctttttgttgtctgcgtttggttgttgtttttgtggtctgtagttttcttgtgttgtcttcgttctgttcgtgttgttgtgtgtgttttgtttttgttctttgtttttgtgggtttggtggggttcgcgcgcgtcagctgaagtcccgtcatttaactaccctttggtgtcaaacacccacgatttggggcacactatgtgaactcctgagggtcccccccaggtgggcgccacacaacccacggcgtttgtttaccgtctgcccccgtgacttattaccggtctttaaggtacctaagctcttgtggtgcgcaattttggcaccgaagggggaaacaccgcgggtgactagttagccactgggtccaacacccccccgcgcgtttttcacaccattggcccgtcggaacggcgagaccccttggcccgcggttgtccctttgaacctgtttgccnagaaccaaggtccccacagagcacccgccaggaagatttttccgtgctcttggacgccactgggagaagataagagatattggttatttaaagaaggttctcctgcgtttctaccacgaattttatatttcccacgcggtttttatatagtgttcccacagcggttgggtggaactcttgcacacacccgccacatatattgcggcacctcgtgtggcgcacacagtgcacacatctttatatggggggagagaacacatnttngagaaagagtttgagagagacacttctacttccctttaaaggacacatattccggggtctcttggacacatctttgtgtccaccatggcacacaaatgcgctggagcgccacacacacacacacaatggagtttctccacacggtgtgttgtcacatctgtgacacacgtgtcccaagagactgagaggtgggttgtgagatgtgcacagccatgttggtgttttgcgccaaaagatgtgaaagaaagagccatgtgaattattgttgggagagcccatgggagcccctttgggtcccagaggaatggccagaacccacacccagaaagaatctcacccattgcgtggaccggtggaccaacatctggataaagtttgacattgtgtttttatctttaacccacccagatccattcctgtctgtgagctccaggagagccaccccctcccacccccatattgcgtccgccagtgatccttagaatcttttgggcgtcttccgcgcccagattccccttgggtgtcccaagttttcccttggtcccctccccagccttagctgggttgccagagttaagatttatgattatgaaattaaaactataatacacccattt

SEQ ID NO: 588294 - DNA, 342 bp, Homo sapiens
  misc_feature (10)..(10): n is a, c, g, or t
cctagaatgncaaatcctgatcattttaccttgaaggcctaagttttgccagtgacatacctttagagcagcactgtcctgataggaatagaatgttagcttccatgtatacagatgtctcccttgagcttaggatgggtttatgtccccaataaatccaccataagttgaaaatattgtaagtaaaaaatgcatgaaatacacataccctactgaatatcatagcttagccaagcctaccttaaatgtgctcagaacactgatgttaacctacagttgggaaaaatcatcttacacaaaccctattttataataaagtgtgaatatctcgtgtaaaaaaaa

SEQ ID NO: 588295 - DNA, 204 bp, Homo sapiens
  misc_feature (4)..(4): n is a, c, g, or t
  misc_feature (73)..(73): n is a, c, g, or t
  misc_feature (91)..(91): n is a, c, g, or t
  misc_feature (112)..(112): n is a, c, g, or t
  misc_feature (127)..(127): n is a, c, g, or t
  misc_feature (142)..(142): n is a, c, g, or t
  misc_feature (156)..(156): n is a, c, g, or t
  misc_feature (159)..(160): n is a, c, g, or t
  misc_feature (164)..(164): n is a, c, g, or t
  misc_feature (169)..(169): n is a, c, g, or t
  misc_feature (174)..(176): n is a, c, g, or t
  misc_feature (190)..(190): n is a, c, g, or t
  misc_feature (198)..(198): n is a, c, g, or t
tgtnacctaagttgtaggttacttaagacttagcactttcactaaatggcatacatcgaagggcatcaattcnagagcaaaaatggttganctcaccatacctacctatgtngtcattccagccttngagccgtccaggttnctgagctccctgtnggnnacgncaggnctgtnnnccaaggcgttttgncttttctnctgtgg

SEQ ID NO: 588296 - DNA, 126 bp, Homo sapiens
caaattgtgggaagatttataggtagaggcgacaaccagctatcaccatggctcggtatgtttgtcgcctctagtcctataatcttcccactatttctgctacagtagactgggtgtgctctcttt

SEQ ID NO: 588297 - DNA, 303 bp, Homo sapiens
gttaattgttaaaatttgaagagaggagtgagtactctctctagtatctttactatttaggggggctggtggtgggactgcattgatttaaccattgtgaaatctagtgttccattcttgaaaacagaagagcatatatatgaccttcatgtactcttgcatatacactagtgtacttcgtttggtgcctcagatctttaaggcattaactacggaagaattttctttctagcatagacatctttataaaagtaacgcacattagttcataattcagggcataatattactattatacgtgtg

SEQ ID NO: 588298 - DNA, 628 bp, Homo sapiens
tcggacgacggaggcagggaagtctggctctggtcccgcccagtgttgggatgtggcagtgggcgcgatctcggctcattggaaacctccacctcccggggtccaaggcgattctcctggcctaagcctcccgagtacgctgggaaactacgggcgcgcgcggacagccgggtaaatctaatatttcagtaagagcagcgggtttcccccatgctgggccagggttgggtctggaacccggacctcgtgatcacggccctctttagcttcccaatcctctcttaaaaaggtgatgcgttcagaacacttttggtaaaacgcagggttgaatcacattggggctctgtcaatttcagagcgcaaagaatgtgggctgtaaaatagagtgtagagcttaagcccttcccttttttcccaatttcttatttcctagccttttttataagttccaaaaatgtttaaggagaaaccttttagatgcgatgaagggtgcccaaggggggaattctgacaagggtaaggttgggccaggtaaattgcctacaaggaactgtgctgcgaaaacttcgaaagagtattatcccatgtgttatggaaaatcttcgggaaataggctagtgtattgtga

SEQ ID NO: 588299 - DNA, 1065 bp, Homo sapiens
  misc_feature (114)..(114): n is a, c, g, or t
agcggagatacccaatcagcggccttcaggcgcagatcgtgggcggagcggtagccaggccgcgggccggccaatcagcgggcgagcggctgcctcagcgcgcgcggcgggcgnggcggggcctgtccgcgcctaggagcagtggacgctgagagcagcaaggccagagttgaaaacttacagagtcctgaggctttcagactgaaaaaggctttcttctgtcactgacaatcgccaccatgatccatagtcttttcttgatcaactcctctggagacattttcctggagaaacattggaaaagtgtggtcagccgttctgtttgtgattacttttttgaggcgcaagagagagctactgaggcagaaaatgtgcctccggttatccctacccctcaccactatctcttaagtgtttaccgccacaagatcttttttgtggccgtgatccagacggaggtcccccctctgtttgtcattgagtttcttcaccgagtggtggacacatttcaggattattttggagtctgttcagagccagtgatcaaagacaatgtagttgtggtttatgaggtattggaagagatgcttgacaatggttttccattggctaccgagtcgaacattcttaaagaactcataaagcctcctaccatccttcgaacggttgtcaacaccatcacaggaagcacgaatgtgggtgaccagcttcccactgggcagctgtcagtggtgccttggcgacggactggggtgaaatataccaacaatgaggcctattttgatgtgattgaagagattgatgcaattattgataaatcaggctccacaattactgctgagatccagggggtgattgatgcctgtgtcaagctgacttggcatgcccagaccttacactttcctttcatgaaccctaaggttgttggatgatgtcagcttccatccttgtgtccgtttcaaacgctggggatctgagcgcatcctctccttcatccctccgattgcaaattcgcctgtggttctacacgttatggcgcacacatcagaggcttttagtgagatg

SEQ ID NO: 588300 - DNA, 474 bp, Homo sapiens
ttactaccagatctcttggactgttccagatacatggtggtaacatggtgtgtacggaggaacagatatcactggtcaggtgagatcatacaagtatgaaggtgacacgaggaaaaaaaattgcggaatttggcttgtcaaagcatccaggccactatggtctattgactaacattgaatatacatgaatgccacttcttacagccattttcatatttacaaaatgagcttactactagttgagttattaggtaaggcattcaagttccttagcttaacataaaaaggcaacagacatcttagcacaccacaggacagattttagagggatgatttcagagcactttgagatttaccctcctttagaatcccttacatggtcgatataaaagggaagcaattctgaatcctattactagcctgcactcttttgtagattacttttgggggatatattttgagaatgatgaaacg

SEQ ID NO: 588301 - DNA, 1124 bp, Homo sapiens
  misc_feature (114)..(114): n is a, c, g, or t
agcggagatacccaatcagcggccttcaggcgcagatcgtgggcggagcggtagccaggccgcgggccggccaatcagcgggcgagcggctgcctcagcgcgcgcggcgggcgnggcggggcctgtccgcgcctaggagcagtggacgctgagagcagcaaggccacggagggctatcttcaggctcatgcaggaggggaagattgggcctggtcttgaaagatggagttgaaaacttacagagtcctgaggctttcagactgaaaaaggctttcttctgtcactgacaatcgccaccatgatccatagtcttttcttgatcaactcctctggagacattttcctggagaaacattggaaaagtgtggtcagccgttctgtttgtgattacttttttgaggcgcaagagagagctactgaggcagaaaatgtgcctccggttatccctacccctcaccactatctcttaagtgtttaccgccacaagatcttttttgtggccgtgatccagacggaggtcccccctctgtttgtcattgagtttcttcaccgagtggtggacacatttcaggattattttggagtctgttcagagccagtgatcaaagacaatgtagttgtggtttatgaggtattggaagagatgcttgacaatggttttccattggctaccgagtcgaacattcttaaagaactcataaagcctcctaccatccttcgaacggttgtcaacaccatcacaggaagcacgaatgtgggtgaccagcttcccactgggcagctgtcagtggtgccttggcgacggactggggtgaaatataccaacaatgaggcctattttgatgtgattgaagagattgatgcaattattgataaatcaggctccacaattactgctgagatccagggggtgattgatgcctgtgtcaagctgacttggcatgcccagaccttacactttcctttcatgaaccctaaggttgttggatgatgtcagcttccatccttgtgtccgtttcaaacgctggggatctgagcgcatcctctccttcatccctccgattgcaaattcgcctgtggttctacacgttatggcgcacacatcagaggcttttagtgagatg

SEQ ID NO: 588302 - DNA, 185 bp, Homo sapiens
ccacttcggactgcggcgcaacgctgccgagaaagcgcgaacgaacggagcgaggtcgtgattgaggatcgcctcggccatttgcgatcggcacgagttaccggtgcagagtaccaaaacccgtttcatgcggtgtatagaaccgctgagctgggtgcccggcgcgattgtattgaagacggtac

SEQ ID NO: 588303 - DNA, 243 bp, Homo sapiens
cggtccacatctgcaagcaacacaacaccttagctgtgtccttgtaagtggcatgttgtcatcctgagttacactcgctcggggttggctggtgagaagtggggtctcaggctcagctgttcagtgatgaggcctggtaatgtgcgctggtgcacagcgcccgtacacagactgcggtaaccgttccttgtttgcctatccttctgagcaacagccctgtggttcagaggagggcctgcaacc

SEQ ID NO: 588304 - DNA, 1123 bp, Homo sapiens
  misc_feature (114)..(114): n is a, c, g, or t
agcggagatacccaatcagcggccttcaggcgcagatcgtgggcggagcggtagccaggccgcgggccggccaatcagcgggcgagcggctgcctcagcgcgcgcggcgggcgnggcggggcctgtccgcgcctaggagcagtggacgctgagagcagcaaggccagagttgaaaacttacagagtcctgaggctttcagactgaaaaaggctttcttctgtcactgacaatcgccaccatgatccatagtcttttcttgatcaactcctctggagacattttcctggagaaacattggaaaagtgtggtcagccgttctgtttgtgattacttttttgaggcgcaagagagagctactgaggcagaaaatgtgcctccggttatccctacccctcaccactatctcttaagtgtttaccgccacaagatcttttttgtggccgtgatccagacggaggtcccccctctgtttgtcattgagtttcttcaccgagtggtggacacatttcaggttcgtgaatgtgggaaagttcatatatgtaaaccgtaaagtgtctttgtagtcctgtttccattgtgtaaagcctccattaagaaacttaaaaaaaaaaatcaaaactctggtattactcacttcctctcccatctgataagattctggtttctatttattgaattggctgcatgcaaaatgacaaatggaatacttttgaacctcttgcgtgggaaagtcatcctatttgcgatgactatattataggcctttctagctctgattctacttgttggtcccaaattagaattccagatcggtttttgcccggtggttcttgaattcctaaaccatgttattctggcattgctttggagttgcctccaaaagtggatggtcttaagtttcgaaaacgcaccagttgcaacaagctaacgatgcttaatctaactctcccaggtcaagggtaagccttgaaccgggatagtctcccgctgacggggcccaaaaggacagaagggggcggatacacgctgcaaagtagatgggacctgaggtccgtagaataaggagccgctgagagagaacagactgtcggagattcaaacacgagcgtcaggcgtcacacg

SEQ ID NO: 588305 - DNA, 1126 bp, Homo sapiens
  misc_feature (114)..(114): n is a, c, g, or t
agcggagatacccaatcagcggccttcaggcgcagatcgtgggcggagcggtagccaggccgcgggccggccaatcagcgggcgagcggctgcctcagcgcgcgcggcgggcgnggcggggcctgtccgcgcctaggagcagtggacgctgagagcagcaaggccagagttgaaaacttacagagtcctgaggctttcagactgaaaaaggctttcttctgtcactgacaatcgccaccatgatccatagtcttttcttgatcaactcctctggagacattttcctggagaaacattggaaaagtgtggtcagccgttctgtttgtgattacttttttgaggcgcaagagagagctactgaggcagaaaatgtgcctccggttatccctacccctcaccactatctcttaagtgtttaccgccacaagatcttttttgtggccgtgatccagacggaggtcccccctctgtttgtcattgagtttcttcaccgagtggtggacacatttcaggactactgttctggaatttcagttctcatgcaacataccggcccctttgcacagtgaaaacgattattttggagtctgttcagagccagtgatcaaagacaatgtagttgtggtttatgaggtattggaagagatgcttgacaatggttttccattggctaccgagtcgaacattcttaaagaactcataaagcctcctaccatccttcgaacggttgtcaacaccatcacaggaagcacgaatgtgggtgaccagcttcccactgggcagctgtcagtggtgccttggcgacggactggggtgaaatataccaacaatgaggcctattttgatgtgattgaagagattgatgcaattattgataaatcaggctccacaattactgctgagatccagggggtgattgatgcctgtgtcaagctgacttggcatgcccagaccttacactttcctttcatgaaccctaaggttgttggatgatgtcagcttccatccttgtgtccgtttcaaacgctggggatctgagcgcatcctctccttcatccctccgattgcaaattcgcctgtggttctacacgttatggcgcacacatcagaggcttttagtgagatg

SEQ ID NO: 588306 - DNA, 916 bp, Homo sapiens
  misc_feature (489)..(489): n is a, c, g, or t
  misc_feature (539)..(539): n is a, c, g, or t
agcggttctacgcgcgtggatttgatggcgtgagtgtctcacatgaaagttctccgctcccagacatgggtcccttcggccttcctgcctcggaagccgcagaagtcaggcatcgtgggaaggttaagagcttccctcatggattcacccgtccaagcctggtccagcctcccgagcacttctcctggagactacatggtctaggcatgattcacatcgtgcgcgcgcaacagtcgagcaggcctgggatccttcggtgaccaacgtaagcgagggtggtggacgctgtgaccattgtcataggaccaccacgccatggttgagtttgatgggcatcgatggttgctacgtggaaagcacccatcgttcatgtcctccgtgcaacttcaagactgatcttttgcatgtgagcgacatcgagatgatggaatgcacagaggtcctttcgtatgacagcaacttgcgcatatagagttctcaagcacacgnaatggtccttttagcgaaggtgactgcaatgaagatgtggctaggtatgnagagcactggctaagaagctgacctggtagtagaggcacttactgacagactatgagataacttactgccaaagtcatccgtgtcattggccagacccagaatgcgcctgctttccctctgcgcctagcaggaaggtcgctctctgagtggtatcatccagcgtgacgcgtgagggccctgatgggcccgagaagcttggacttgtcggcctggcgacgagggcctgtgaagcatgcagtgtaccttgtgaaaccagagtggttcaggggcccggactcagatgatcgaaggtcccctccgggttgaccaagggccgagtgctactacatggtcccccaggtcgtttggactgcaataatcttgccagcgtaaccaa

SEQ ID NO: 588307 - DNA, 374 bp, Homo sapiens
ggtcgccattagacaacggtgacaggttcggctagctgcgcctcttgtcgctggttacgcgctcattcccgtgcagcctcaggggctacctggctattcgtatacgcacggtgtgcctatagaagatgctcatgatggttggtatagatgaatggacaacttagcctcggggcatgcacactgccacccgtgggcaagcttcacactaaggccacctttgactgaccatttggtaagacctactagctagcttgacccacagacctctggaaggagacgtgtattcaccaagtctccatagtcaggaggtcactgaccaatcctagtcaagacgcacacaccagagtctcacaaatttgatctcagctccagct

SEQ ID NO: 588308 - DNA, 1011 bp, Homo sapiens
  misc_feature (114)..(114): n is a, c, g, or t
agcggagatacccaatcagcggccttcaggcgcagatcgtgggcggagcggtagccaggccgcgggccggccaatcagcgggcgagcggctgcctcagcgcgcgcggcgggcgnggcggggcctgtccgcgcctaggagcagtggacgctgagagcagcaaggccagagttgaaaacttacagagtcctgaggctttcagactgaaaaaggctttcttctgtcactgacaatcgccaccatgatccatagtcttttcttgatcaactcctctggagacattttcctggagaaacattggaaaagtgtggtcagccgttctgtttgtgattacttttttgaggcgcaagagagagctactgaggcaggccacaagatcttttttgtggccgtgatccagacggaggtcccccctctgtttgtcattgagtttcttcaccgagtggtggacacatttcaggattattttggagtctgttcagagccagtgatcaaagacaatgtagttgtggtttatgaggtattggaagagatgcttgacaatggttttccattggctaccgagtcgaacattcttaaagaactcataaagcctcctaccatccttcgaacggttgtcaacaccatcacaggaagcacgaatgtgggtgaccagcttcccactgggcagctgtcagtggtgccttggcgacggactggggtgaaatataccaacaatgaggcctattttgatgtgattgaagagattgatgcaattattgataaatcaggctccacaattactgctgagatccagggggtgattgatgcctgtgtcaagctgacttggcatgcccagaccttacactttcctttcatgaaccctaaggttgttggatgatgtcagcttccatccttgtgtccgtttcaaacgctggggatctgagcgcatcctctccttcatccctccgattgcaaattcgcctgtggttctacacgttatggcgcacacatcagaggcttttagtgagatg

SEQ ID NO: 588309 - DNA, 401 bp, Homo sapiens
  misc_feature (358)..(358): n is a, c, g, or t
  misc_feature (392)..(392): n is a, c, g, or t
gacacttaacaggtagatacttggaaggggtagtctttctgttttatgaggggattacatttaaaattaattttaaaatacatgttgtggcattaccaataatgtcacccagtattgatattagaggccaacagacagttaaagtcaacaataaattttccaaagaaatgtgtacaagtttcacagttttttaaagttttacagcagaacttgctccaggttatgcttcaagaaaggatgacaaaaaacagaaaacaaactgaagtagccaaattaggaattgggaatgaaaatgatatatttgtattgtggggaaaaagacaacttttggattaaataggaaggaacattttacatncaggttacctccccagtttttggcttaggacttnggatttagg

SEQ ID NO: 588310 - DNA, 1084 bp, Homo sapiens
gcatcggccgctgtcatgtcctccggggctagcagcgaccgccctggagcgcgttggcagagcacgctcaagttggagcgctggccgtggagacggatccatggtctctcacggcagactagaaaagcgtatcagacagtacctgtatgcagaatgcctgcgaaggatgccctgactggctgagtgtccagcgtggcacaggtaaccccttccgggagacctagatcctgtgctttactctgaagactctaggagagaatgttggctgaggaatgcctttcaagcacacaagtctgcttgacatgacttggctgcaagtctcaagaaaaacaacttttccctacgctttcagagaatatttccagccctttcctggtgagcctggatcctatagccaaaattcacagatacttcctggacgtacctaccttgaggtgagcaagacactgggcgtcaacggactaggaattgtcaaactaggtaaataactgggcattgatcaaacatactggtgcaagatactctcaactaccattaatgatacaacaaaaaacctttaccacacacaacatacccacaatatgcccacttccttttcaatacacgctgagtttcacctaacgaaattaccgtaagtaccccttgaggaagttaataccaatggttatatgttcaccatatttaacactgcgcaatggttatacccattcgatacgggcgaaccgcgacaaaacaaggttacagggacgacactatgacaacacgcagcgttgaaatagactttagttaacctggataggcacaccttgggaaagatacaatatcatttgcgccagttaaaaaacagacattgtcgggtaccttgtactggtgacgatttggaaacttcagtaatcaattatcgcctttacagagttcgaagggaccaaagcaagaagtaccccaacacattgagcattgagccaagtgcgacaacgacaataagcggcttacagccattacaatccaaggatcaatcgccactagacagctctaacaaaacattggggaaaggattgtgacgtgtcatattcctaaacgcacg

SEQ ID NO: 588311 - DNA, 225 bp, Homo sapiens
ggcccccgttatagaatgtcaattggtcatgagcctgtcaggtctatgatataggcattcaaaaagagcaacgaatagatacatcttcctgtccttgatataggtaataaggagcattattatgttcctagtgtacgggagagaatgtcagaaaatcaatatgaataaattcaagtacacagaggattcacacctatttgaaaatgtaatgcgtggccagaagga

SEQ ID NO: 588312 - DNA, 385 bp, Homo sapiens
  misc_feature (20)..(20): n is a, c, g, or t
  misc_feature (206)..(209): n is a, c, g, or t
  misc_feature (211)..(212): n is a, c, g, or t
  misc_feature (218)..(218): n is a, c, g, or t
  misc_feature (223)..(223): n is a, c, g, or t
  misc_feature (228)..(228): n is a, c, g, or t
  misc_feature (233)..(233): n is a, c, g, or t
  misc_feature (235)..(235): n is a, c, g, or t
  misc_feature (249)..(249): n is a, c, g, or t
  misc_feature (254)..(254): n is a, c, g, or t
  misc_feature (258)..(258): n is a, c, g, or t
  misc_feature (269)..(269): n is a, c, g, or t
  misc_feature (271)..(271): n is a, c, g, or t
  misc_feature (284)..(284): n is a, c, g, or t
  misc_feature (288)..(288): n is a, c, g, or t
  misc_feature (290)..(290): n is a, c, g, or t
  misc_feature (295)..(296): n is a, c, g, or t
  misc_feature (302)..(302): n is a, c, g, or t
  misc_feature (310)..(310): n is a, c, g, or t
  misc_feature (314)..(314): n is a, c, g, or t
  misc_feature (323)..(323): n is a, c, g, or t
  misc_feature (327)..(327): n is a, c, g, or t
  misc_feature (336)..(336): n is a, c, g, or t
  misc_feature (351)..(351): n is a, c, g, or t
  misc_feature (366)..(366): n is a, c, g, or t
  misc_feature (368)..(368): n is a, c, g, or t
ccaaattaaaaaagaagcanaatttttcaaaaaagacaatgatttgctttcttatagtggtataaaagatttagacctagatgatttaacttgggatgaagacgaagaggaataattttgaaaatttacaaaagaagatgtatcatcgctagagaacaatttccagttaatgaattaattcgttttgtaatgactcaaaacaaggnnnncnnaatagnttttntaaanactanancaaagatacctggncgagnagcntatgtagaaancnaagaagaaaaaantcgncnagttnnagaaanaaaacttntaancagagcttntaanactaatatnaataaagaagtttancaaaaactaagtgcncnaatggagttagaatggc

SEQ ID NO: 588313 - DNA, 109 bp, Homo sapiens
gtacccgccagcgctgcaagcgcctggcaagctgggcgcgcgagggcaagaccctgctgctgcgcgtcgccgtcgatggcgggggctgctccggcttccagtatcggtt

SEQ ID NO: 588314 - DNA, 813 bp, Homo sapiens
agcgggggggcggcggcggctggagagggtcctcggcagcctctgaggagcgcggggcgcggccatgagcgagtccagcggcagtgcgctccagcccggcaggcccagccggcagcaggcggtccatccagagaacctctctctagactccagttgcttctcttctccacctgtgaacttcctccaagaattgccaagctaccggtccattgcacgtaggagaacgactgtccattcccgggacaagcaaagcggaactttgctaaagccaaccgactcttacagctcccagctggaggacagaatcgctgaaaacctcagcagccattctcttcgaaattatgcactgaacatctctgagaagcggagactaagggacattcaagagacacaaatgaagtatctctccgaatgggaccagttggaagcggtatagcagcaagtcttggaagaggttcctagagaaggctcgagagatgacgacccacctggagctgtggcgggaggaccatccgcagcatagaagggaaatttggcactgggattcagtcctatttctccttcttgagattcctggtgttgctgaatttggtgatattctgatcatctttatgctggttttcctcccagtcttactcacgaaatacaagatcaccaacagcagcttcgtgctcattcctttccaaagacatggattaaccaatgtccagtctatccagtaagcaagttctggactcattacttttaccgtatatcatagacttgcttctggcactggttcctgggggaactagccctttacggactttcacg

SEQ ID NO: 588315 - DNA, 564 bp, Homo sapiens
agcgggggggcggcggcggctggagagggtcctcggcagcctctgaggagcgcggggcgcggccatgagcgagtccagcggcagtgcgctccagcccggcaggcccagccggcagcaggcggtccatccagagaacctctctctagactccagttgcttctcttctccacctgtgaacttcctccaagaattgccaagctaccggtccattgcacgtaggagaacgactgtccattcccgggacaagcaaagcggaactttgctaaagccaaccgactcttacagctcccagctggaggacagaatcgctgaaaacctcagcagccattctcttcgaaattatgcactgaacatctctgagaagcggagactaaggtttgttcactagccacctggaacctgcattgtgtatgttatggcccagaggtatgttttgtgcgtgaaatgcatttcctgaagagctcatataattaaaattttattccttagggtaagctaagcctctttgacaaacatacctgaattttcttctccactcctactgcttcacttgactagccttaa

SEQ ID NO: 588316 - DNA, 647 bp, Homo sapiens
cagacattcagaggaagacgctgtggcactcagtactactgactccaaggctgggtagcgagtgtgtcgctggccttagccagactctacatgccaccctggctgctattggatccgaggactcacgctgaggccagatgctaccactcgacaagatcggcgcctctcctgcactcacgtgctgctctgacagtggtgactaacggatgaaccctttggacaagagtgacataaatgtgacactgctcactgtacgtaaacaatgtaatgcatgtacaggctatgaccatctgccttcttaagtggctgcatgcataaaagtagacgttgtaagtgaccttaattctttaaaggagctagataaacgcatagaacagatgacagtaaatgagatgcagttagaagaacaggtacttacagtgtcatcagactgttctaaaagaattcccactgccttagaatatgcataatacctcatgcaatcacttaatcagcttctggagcaagacactcatctattgaccgccattatcagccatatgctgactgctcaccttggatggactatcgtggaaccatgattgccagaatgatgacatcgaacgtcatcatgccgaccttggatttcactgtgactgctgtttttt

SEQ ID NO: 588317 - DNA, 396 bp, Homo sapiens
ggggatgagtgtgtgtgtgtgtgtgtgtgtgtgtgtgtgtgtgtgtggagctttttctgggacaaactagaaaccttagaaaatgaaaactcctaggaatttatgcaggtgaccctagataagactcctagcaatgttggatatgaagcctaaagtggctatctcctgaaatcaggcaatacttccaataaagggatttgcaaaacaacccactcataaaatcttagacctacaatttgtcttccttatcagatgtgcatgtgtaaaaaatggatttgatgaaagggccaactgatgactggcccattgtgagacccatgcaatgaaagggagcccacaattgataaatgatactctgctatatttgctgtcgacgcggccgcgaatttagtagta

SEQ ID NO: 588318 - DNA, 235 bp, Homo sapiens
ggtgacatcgtagtgctgttccatacaaacttgaacacgtagatttcctctacttgtgcaagatgttatttataaagtcggaaacttgatttttaaagctttagctttgaccgctgcttttccatttttacatttgctattttaatcacaaattttgcccctgtttgatttggctgtctacttttggctgccattgttttaaaaccccatcttgttccttttctatatctaattt

SEQ ID NO: 588319 - DNA, 325 bp, Homo sapiens
caaggattttgggttttgttttgttttcatttttccaaaaaaaaaagaaaaaaaaatagaaaaaaaaggggtaaaaggggcgggtttgttttttgaaaaactgtcttggaaaccaatttaaaggggggttctgttttgtttttaaacgatttttaaaaaaggtttgggcctccccgggttaaggggggaacctccaggcaggaaccggcttgcccccctttgcccggtaaggggtgcccaaaaaagcattacccgccctcggggggtcgggctgtgggggtcccggcccctggggtgagtttcatgtatgaaaacataaaattga

SEQ ID NO: 588320 - DNA, 116 bp, Homo sapiens
gcacagccacagaactaatcatattttatatcttcttcgaaaccacacttatcccaaaaaaaaaaaaaaaaaaaaaaaaaaaaaaaaaaaaaaaaaaaaaaaaaaaaaaaaaaaga

SEQ ID NO: 588321 - DNA, 151 bp, Homo sapiens
tggaaaatataaataattactattttgaactggggggaacctctggtctttggttccactcacctgccttgtctctggggtcggagccccttgcttaagggatttggaagccctagttttcagcttggaagactcaagtctttagggctaa

SEQ ID NO: 588322 - DNA, 1424 bp, Homo sapiens
  misc_feature (340)..(340): n is a, c, g, or t
  misc_feature (1324)..(1324): n is a, c, g, or t
gctctgttccattgtcctatcgccgaccttggctcggtggtccctggaaggatctgaatgcgtgggttgagcacggcgtccaaaggcattggactgctgggatgaattgtacccgcgatgtggtccttgcttccttcgatctcatgactacacggctacctcgcacgaatgtttgaggtggagatggttgtctcgctcgcacatgcgattcgatgtctctcctgggagtgcatacaggaactgtacatgctcaatggtcctccttggattcaaggcatggatggtatatggtgagacatcaaggatccttgacatcgtcgtgctggatttccattaaaanattcggagtagggcgaatgagtcccggagctgcatcatgagacgcttatccccatggctggtgcatgtgcttggggatgtcgaatcaatggcagtgtggcatcaagggtagcaggggcaagcacgaaaaatttttggtcggtcatcgaatacttcattggtagcgaagcgcgaaaaggggattcacggcctttgtggtctcgttagcgagtactggaataagttataatccattccgctggtaggaggaaggggcgccacattgattagcaaaattgttgtcgtttggtccgacacccttgggcgatgggagataagcactcgtgtaaggtttgcgtggcagccgaagagagggtaaattccgcattccattgctcgagtcgtagcgtccatgggaatggccccccgacatccaactgccctggttgaggccccccgaattgcgcacccctgcaattcaaggagctggcatatgggagttaccccactttcgaataatttgactgtttcagacggagcctgaggcacacacgtaatttacggggaatgttacacttgctaaaggttgcagcatcgacttcggggtgaccaacacgttgttggtgattgtgtggacctgggttcgggtagccctcaaccggttaagggaaaggatgattgccggttgagtgatgtcaccccaagctagtgagtagtgaggggccaacacctggtgcattgcttctctcggaaacgctgcggttttctcccggtgaacatacgtattgcgaagatgggcaaatctggtcttatgggcatagttcgggacatattcccgagacgaatcattgtggtcaatccggcaatcaggtcaatggaaacgccatggagcttttctccttacgcacgactggaaaatggtgtatacacggcgcattcagcaccagtctgccctgagatagagtgagagagaagaccgcgaaacactctgagtggatcaccaacngacaaattcagcgtcgctggtgtaacaatagagggtcccacagcgggggacatttgtcagatctccttggtgtcacgtatacacaaccaactatgggttg

SEQ ID NO: 588323 - DNA, 1587 bp, Homo sapiens
gcactgaggctgtggcggcactgcgcccggcgctcgcgctcgtccgatccgtgccgcccgctccagccatgactgcgccgggtccccgtcgccgcggatcctgttgccgttgctgttgctgctgctgctaatcgtccgcctccgggtgcacgttggtgacggttgtgtatggcgttccgcggtggcactcacgcgctctttcacaccagaggtccgtgtccaggattctactgactgttgggtaccgtgtgagtgaccacatacgtgctgcgtctgacgatgactgtacagaaactttgtgctggagcgcaggaaacggtgtgcatcgctgccctatcgagagcccacaacgatgcccctagccaagcgtcgctccactacgcccacgcataggaggcacagactcgcgagcatcgccgccgcatgacaacgctctcacagcaacagatgagccgtaccaacacggacaccccccactcaggtgaccaagagggctacctagagaagccacgacacactatagaagaccacaggtacatagagcaccctaggatcctccacttacctacttaacgctccgcctcacgactccttccgatcccaggtgcacaccactcacaatacaactaccactaccatagagccactctgcaacaccatgaagacctcacccattcgccatatggcacttcgcccccatactatcaacccaaaacacgcagacccagactaagacccatagcacgacaggaaccaacgaacacatgttaccacacggcggactcatccgctccctacccctacacgccaaacccacatcacacctttcacataccaccagaccatcagcgtagccgcctagccaacttaggcccaccaccctatataaggtcaccccattacaaacgcgacccaccatcctccaaaaaaagatcggattgggccccgaccacccacaacgaccgttacaccaccccgtagcgggaaaacagccaaccaccggacacataaaccctccaacacggggacccttcaaccaccaacccagacaaccaaacgtgcacccaccataggaacatacacaagcgaccccgaactacggggccaacttcgcccaccaaccgcccaaaacgaccaacacccagccattaaaacacaaccatcaaaacattaacgcaaacagggtctaccacacccataagctaagccactgtgtttaaagccctccaaatgagacgccatacaaggaaccaccaactttggacaaagaccacacccaacaacacacgacggaaacaccaataaaacagccaaagccgccaaatgaaaagcaccaccaagtacgagcacaccagagcgaacagcggcaaacagcccatagcgaagccggatccagcacgcacaccacatataacacacaccacagaaaaccaaaagggaagcgaaaacgaacaccatataccccagctattacaccaaacaagaacacccgaggagaacgcatataacacacaatgcgcgagcagcagtaacaacactccgaaaaaaaaacggaaacagaacaaacaacaaccacagcacaagatg

SEQ ID NO: 588324 - DNA, 415 bp, Homo sapiens
gtggcggcacatgcctgcactcccagccactcaggaggctgaggcaagagaatcacctgaacccagaaggtatagatcacaccactgcactccagcctggatggcagagcaagactctgtcaaaaaaaaaaaatgtattgatatggaaagatgataaccataataaaaactttgaaaaaagactataaataaatatatacactattatcccgcttaaatacgtaaacatatgtcatatttatagcatagataaaagtctagattggaatagggtgtatgctagcagtggttatctctgggtgataaagttatttctgttgttggttttttctttgtgcttttatttgttaacttagtcttttgcattaagtatccacttttgttgttgtttttgagacagagtcttgcttctgtt

SEQ ID NO: 588325 - DNA, 184 bp, Homo sapiens
agttactcaggctagaaacttcatcagccatgaaacaggttcaagacagagagtactacaattagacttatgctttagaaaagtcagtcttttacctgagcagtattatcatagtacaatgcttgttatgaaaaaaaaaaaagggcccattgaattaaattagtttggccaggcaaaaccaaac

SEQ ID NO: 588326 - DNA, 469 bp, Homo sapiens
ctttcaagccttccccttgctcctgcttcagtccaaatatcacaaccttctgtaccatccccttccattcataatatcctcgtgcatcccttgtatgcctattacaacacttaccatatatgtgatagttatttgtataaatatggatctgcctggccaggcgaggtggctcatgcctgtaatcccagcactttgggaggccaaggtgggcagatcacgaggtcaggagatcaagaccatcctggctaacaaggtaaaaccccgtctctactaaaaactaatatatatatatatatatatctgccctaacagattgcatctcaaagtacaggttcattctatttccccacttgcagtggaaaagaacattccctccagttccagggtgcccaggatgaaaagcatagaaccacctattctgggcatactgcctatgggattgccctgctccacaagcagcagtaaaaaa

SEQ ID NO: 588327 - DNA, 670 bp, Homo sapiens
aatgtgctcctccgtgccacgccaaccccagtcctggcggcggccccagcctcagttccatgctgccaacgccagcacctggctgctgtgctcctgtgttccctgctgcgtgctccagcctcatcctcagaccctgctgtgcagcagctgtgctgcaactgctggctcctggccatgacccctgtgccttcatgctgcaatgctccatgctgcagaccccatgctgccctgctctgcctggtcctgctcttccatgtggcccttcccctggctggcctgctgtggtcatgtgcttgcacccatgtcattttgtgcctccattgttggacagctactgagatgacgcaactgaggtgtgcttgccctgatgttatctgggaccctgattggtgaacttgtctgacacaacactcatgtggagtgtcaccaatatgcttttcatgtgcctgcacaattgagtcagaacgatgaagtggcttgttgacattggaatttgctaagaactatgtattgaacttgcataagaaaagtttctccaaattgatgctcatcctggtgctggtactctactgtccatgacatcacagagcactctgtgcttgatccatgagtactacagcctagatgcccccaaaccccattcacctcactgtggacacaatctccagaa

SEQ ID NO: 588328 - DNA, 309 bp, Homo sapiens
agaaggagcctggggggaaggcaccccagtgacaaccgcagagggagggcaccaacccccaacacaaactcagggccaccaactctgggccacctccgtgtgaggaaggcaaagaaggcagtctgcccggtcactgaggctgaaacctcagagctgagctgtggcctccactcacccaccactggcccatcctccctccacggcaggggcgcctttcccagaaggctctggcgttgcttagaccacagcggaggccggtgctcaacttttagaattgctgttggaaataaataattcatatacgtaaaa

SEQ ID NO: 588329 - DNA, 222 bp, Homo sapiens
tacagccaaatgcatagtaaccagaatgagtaatttatacaagtcaatactgtgtaggacagtatgaatgaacgaattgccacatgtaatcaagtacagattagttgtatagacatactgttgagtcacagaagcctgacaccagagtgcatattatttcatttatttgaagttgaaaaacaggcaaaataaatctatgctattgaagcgtctaaaactagg

SEQ ID NO: 588330 - DNA, 173 bp, Homo sapiens
ggtcgacagaatatctcagggtgggagtcaggcagtagtcgttttggttttgttttttcttttaaagaacccaggtgatgtaatcccagcactttgggaggctgaggcaggcggatcacaaggtcagcagttcgagaccagcctggccaatatggcgaaaccccgtctctact

SEQ ID NO: 588331 - DNA, 159 bp, Homo sapiens
aagtgctctttccagatgaaaactactcttttggtttcgtttgaaagtcacacaggcaggggaaacttcgctctttcaatcattatgttcagcctatgatgaattatttgatcataagacagcaatgtcactaataagtatcacgtcgtccggggttgt

SEQ ID NO: 588332 - DNA, 714 bp, Homo sapiens
ccgagcacaccacttgggtgtattggctcacgagacgctcacactattaggcgtgcctcacatctctggggggaagcactggtagttgtataataaagtcccactacaggagcggggggagccccccccccgcatcaggattgtatacagatgcggccggcgagttgccataagttgccctcacatgatcacccacgcggctatatcatcgcgccctctaatcgttgacgtatcatcttggactaaacttcgtcgtttgccaatatacagcggttgtctttttgtccctggtagtcccatacagaaccaacgtcattctcaacctttctgcgtctcttctccaccgcatctctgttcacagcagcagaggacacatatgatgggcaggaccactccctgtatttaacgactactccgcccgcaatacacagagagagcgtgagcgagatgacacacacagctgtgatcgaccacacatagcccactcagtatatatctcacatagatgttgtctgtagacatatcacccgcggtctcccactaacttatctcagccgatactattctccactataaccgatgttccactctatcttccccttttaccgctcctttgagaccaacaaagagggcttgccccaccaccacccccgtcatcaccgccggtctccctcgttcaaaccccccttattctccccaacaatatcaaacaaa

SEQ ID NO: 588333 - DNA, 121 bp, Homo sapiens
gtaaaaaatcccaaacatataactgaactcctcacacccaatttgggccaatctttcaccctcataggagggcctaatgttaggataaggcaccatggaaaccatttttcctccccataag

SEQ ID NO: 588334 - DNA, 246 bp, Homo sapiens
cggccggagggggattctggactttggagggacactgtgggggacccaggcttttgcagattttggtttcggagggcgctcctggaaccaagcttccacggatactgaggggtgacatttcatgaagtgtggatcattgtattcagaggttgtaattgaaaaaaatatagaaactatttggtcttggtagattttttttctgacaatgtggcccgactgaatttcctcctaaagaaaaaatggcga

SEQ ID NO: 588335 - DNA, 785 bp, Homo sapiens
aagcatgaatttattatagaaaataaaaatgaccctagaagaaaacctaggcaataccatttaggacataggcatgggcaaagacttcatgactaaaacaccaaaagcaatgccaacaaaagccaaaattgacaaatgggatctaattaaactaaagagcttctacacagcaaaagaaactatcatcagagtgaacaggcagcctacagaatgggagaaaatttttgcaatctgtccatctgagaaagggctaatatccagaatctacaaagaacttaaacaaatgtacaagaaaaaaacaaacaactccatcaaaaagtgggcaaaggatatgaacaggcacttctcagaagaagacatttatgtggccaaccaacatatggaaaaaaaacctcactatcactggtcattagagcaatgcaaatcaaaaccacaatgagataccatctcacgccagttaaagtggtgatcattaaaatgtcaggaaacaacagatgctggagaggatgtggagaaataaagaatgcttttacactgttggtgggagtgtaaaatttagttccaacattgtagaagacagtctggtcattcctcaagggatctacaaccagaaatacatttgaccaaacaatccattatgggatgttatacccaaacaattttaaatctttccacttttaaggacacatgcgcccccttgttttttgtgggcctgttcaccataggccagaattgggcccacccaaatggcctcatgggtggccgggttaggaaaaggggctttg

SEQ ID NO: 588336 - DNA, 234 bp, Homo sapiens
gccaaacccacttccaccttactaccagacaacccttagccaaccattaccgaataaagtataggcggatagaaattgaaaccccggcgccaatagatatatgtaccccaagggaaagatgagaaaattatatacccagcatatatatatgcaagggctaacccctatatcttctgcataaatgagattaactagagatatctctgcacaggagagccacaagctatgagcccc

SEQ ID NO: 588337 - DNA, 298 bp, Homo sapiens
cgaagggtgtggtccttaatctgtcacgaacgcctatcgtattgctagagtgggtccgatgaagcacaggaggagtatgaccggcaagtgagggctggtggggacggggcacctggagcgcccatggcacgacagcgagatgcgcgccgggcttacgctcgcccctggcacgtgcaaggaatgggcgagcggagcgagacgggtcggtggcagctgggttgcctggtacatggtggatgatgtcctagaaaactgaagtaatacagggtggccgtgtataggtagagccatgaggatg

SEQ ID NO: 588338 - DNA, 445 bp, Homo sapiens
ttctcgaatcgacggttctccccatgtgatagtctgaaatatggcctcttgggaagggaaagacctgaccgtcccccagcccgacacctgtaaagggtctgtgctgaggaggattagtataagaggaaggcatgcctcttgcagttgagacaagagcaaggcaactgtctcctgtccgtccctgggcaatggaatgtctcggtataaaacccgattgtacgttccatctactgagatggggaaaaaccgcctatctcacctatcaccgcctatcaccactccccaatctcaagtacccagggacacaaacgctgcggaaggccgcagggtcctctgcctaggaaaaccagagacctttgttcacttgtttatctgctgaccttccctccactattgtcctatgaccctgccaaatccccctctgtgagaaaccgtcgaatccgag

SEQ ID NO: 588339 - DNA, 160 bp, Homo sapiens
tttgttctttcttcccttgctttttgtctacactccttaaggcaaactacttgggaggctgaggcaggagaatcacttaaacccgggaggcggaggttgcagtgagctgagatcgcgccactgcactccagcctgggcgacagagcaagaatccatctca

SEQ ID NO: 588340 - DNA, 219 bp, Homo sapiens
gagaccagcagccaatcagcagtgcgccctgagccagaggcagcccagacactattggccctatggggagcatagggctaggggagaaataggcaagcgctgattttgtgaggaaagacccattggggttgaagtttgttccccgagcacagtttccctttgcagaatgcagctcctagaagcgagatttctgccatttcggagataggacctcggagg

SEQ ID NO: 588341 - DNA, 322 bp, Homo sapiens
ccggagcataacaagagtgtctaactcatccctgatggtctgtgagaggtagactatacacaagattcaagtatactcgtaagcaacttttagatagagtaggtcctgtaaggaggagactcttgatgtcaccttcagtatcttgaaagcgggtcccctccccgcaggctcttaattctttgcaaaacttgatgctgtttcagcgtgaaacacattcagcaagactgttaaaaacaaaacgttgaggggagctgtataagaaactcgcacagtacatggccaactacattggataattgtgacttacagtggtggtcctgta

SEQ ID NO: 588342 - DNA, 559 bp, Homo sapiens
  misc_feature (216)..(216): n is a, c, g, or t
  misc_feature (264)..(264): n is a, c, g, or t
  misc_feature (315)..(315): n is a, c, g, or t
  misc_feature (329)..(329): n is a, c, g, or t
  misc_feature (377)..(377): n is a, c, g, or t
  misc_feature (476)..(476): n is a, c, g, or t
tattatactagcatttaccatctcacttctaggaatactagtagtatcgctcacacctcagtatcctccctactagtggccgtagaagggaagtgaagtactatcgcgtgtttcattataggctactctcagtaaccctcaacacccactcccgtcgttagccaaatattggtgcctattgccatactagtctttgccgcctgccgaagcagcggntgggcctagacccttactagtgctcaatcgtccgaagcgacatatggncctagagcgtacgttacataaccgtagaagccttagctccagagtggctanagaacttagagtcngtccgcaaccaagttatagttagcttaacccagcttggaacaagtganctttttcccagagaaaaagatcgagcaagtaaagtttttgaaaatcgaagcgagcgaagccaacgcgcgacgaggcccctagagtttaattaagcccantcattccgctcgtaactatttttttgtaacccaaaatcgaagcaaactaaacccttaatttttagggcttggttttcgcccta

SEQ ID NO: 588343 - DNA, 329 bp, Homo sapiens
cattattttttggattgacttttataaaaattttcaaacattcaaaagtagagtgaaaagtataacacaccatcctatacccagtttataattgtttagtttcttccttataattcagcgtattacttctagtactggaaattgagttcctcagttaggttttgcgattttagtgacgttatctcgttcatttgaatacctctatgataagtactagacaagttctagtttttttgtaattgcaaaaaagactgagaaaatctcctaacaattacatggaaatactttgtatacaagtgtttggtttagttagttatttgtagatgacc

SEQ ID NO: 588344 - DNA, 394 bp, Homo sapiens
  misc_feature (5)..(5): n is a, c, g, or t
  misc_feature (89)..(89): n is a, c, g, or t
  misc_feature (290)..(290): n is a, c, g, or t
tgaanaaaatacggtgaaattagacaatatttcaaacatgtacaaacacaatattttattgtatttttgagacagggtctcactctgtnaccccaggcttggaggcagtggcacaatcacagtcaccgcaacctcggctgcctgagctcaagtgattctcccacctcagcctcccaagtagctgggaccaacagatgcgcctccacatccagctaattttttttagctattatttgtagagacagggttttgccatgttgctcaggctggtctggaactcctgggctcanaggaatgccctgcctgggcctcccaaagtgctgagattacaagtgtgagcactgcacctggccccaatattttattatagctatagacctttctagttattgct

SEQ ID NO: 588345 - DNA, 144 bp, Homo sapiens
  misc_feature (38)..(38): n is a, c, g, or t
  misc_feature (56)..(56): n is a, c, g, or t
  misc_feature (65)..(65): n is a, c, g, or t
attcgaacagcaatacccccattccgctacgacccaantcatcacctcctataaanaacctttcncccactcaccctagcattacttatatgatatgtctccatacccattacaatctccagcattccccctcaaacctaaaaa

SEQ ID NO: 588346 - DNA, 215 bp, Homo sapiens
ccagcccaatgacattgcttcacgccactgctttggctgcagtctcgaccaatggcgctctctgattggagctactggttaataatggggctgacgtcaactaccagagcaaagaagggaaaagtcctctgcacattgctgcaatccatggccgtattcgacacgctcccagatcctacatccagaactggcagcgagacttgattgtgccgaca

SEQ ID NO: 588347 - DNA, 380 bp, Homo sapiens
gggttcaatccttggattcagcctctcaagtagcttggactaacaggcatatacgcactacacattggctaaatattttgtgtatttttgttgaagatggggtttcaccatgttggtccaggctggtcttaaaattcctgggctcaagcgatatgcctgcctctgcctcccaaaagtgctgggattacaggcgtgagccattgcacccagcctaatgtcttcttttggttataagatccaacagaagattccacatctgaagatctttgggttttttaaaatctgtcaccaacatattacccaccctttaaaaattttgccaaaggtataaatttgaaaaatatatccacatcgatctcattcaagtcattgatacaact

SEQ ID NO: 588348 - DNA, 115 bp, Homo sapiens
ccctgggggcttattgctggtttttaaaggggtttttaacttacatgtaacatgtttaggacatgttttttttttttaatttgggggtctttcccactgattaaccagtagttta

SEQ ID NO: 588349 - DNA, 1024 bp, Homo sapiens
cggcttagcttccagagcaaggccttccgtcgagttggttgttgggttgtttgatcgctggtggccggcgcggtctgcggtgcgggctgagtacacgcggcagcaatggcgagctttgtgagcgagctgcggtagtgcggctcgagaggacagaactttaggcgaggcccgtgggcggacaacgtgagacaatactgggctaaccgtaaacgctgtggttcacgcacgaagatcagcaaagaggagtttgaccttgtaagctcatagacttcgtcacacaggataatgtccattctcacaatgatttcctcctggccagttctcacgcgttgtcaggattgttggtttcgtacaccaggatggtgctggactctttgccttggccagggggttccgcagcaaaagctggaaaacccaatgggaaatgaaaaacgctttcttcgtggttcgtcagaagatttgatcatagattccagcctcatagaatcctctctcaggagcccagcaattctgtggcaataggatccccaagatgatgacgagttgaaacttagttcccacacaatgatgccttcccactcgaggccagcttgaagggagaatgatagtgactgcttatgagcatgggctggacaatgtcaccgaggaggcctgttccagcgtgtcgtctagtgctgtggagaaatcaccttaaagatataacctgacgtcagtgtgtcacgaaggaaagcttatcgggcacgagatggccattttaaagtatgccttggcaggtaacgtgacccgcagcatacctgaggaatagcgtagggagcttagaacaaactttacttgaagaggcttccaggttttaactaggtccctgttggctgggcagaatccaggttttaaccaccacgtggatgattgctgaagcaggcaaggtgcactcctgctgggttgtccggagaacccttacctgagtctttggcgccggtgacaatgtgcatactgagaaggcttgcggtgccagggattaggcttg

SEQ ID NO: 588350 - DNA, 297 bp, Homo sapiens
ccagagccgataggtgtgcagcaggtgccccactatgtggtgcctatggccacagcagatcttcccctgaaggtgccatcagacatgggcagctctgtaccctccgtgctctccatcttatatgtatactaatctcaggaaaaatgtgatagcatatggttagcctaggcagtgagtaaatacctcagatgtcctcctgcagcatgtgtctatattttgtggttattttctatcttcaccatgttctcgaatgtttatatctcaataaacctcttagctcttcaccggccatggtac

SEQ ID NO: 588351 - DNA, 926 bp, Homo sapiens
ggttgtctcctggctggtcctggctgagtggtgctcactcggatgcggggtcccagtgcacggacagcacacagacctgcccccgcctcttgagctggacagtgccggcatcggggactcccggccccctccttccacccggaatgtggccagcagcctgtgactgggatggacaactgagacatgggcactggagtccatggtcagtcacctggctgggagcgtgccctgacgcctggaacctgctgaaggagtgcctgccctggaccaatgggcacccaaggggagacccgacgggcgggatgtggggcttgcccccagacagctggcgtcaccggcgcctcagcagctgatgcttgagtccagcagctttgtggactcggacgaggatggcagcacgagcaggctcagacagctccacggagcagagcacctcatccagactcatccggaagcacaaactgccggggaggaagcagcgccttcggcaggctggaccgggcctcctccttcagcagcaataaccgatccagcatgtccctcaacatcagtcactgtcacgctcaacatggaaagacaatcactttctggccatcagcatcgtggggcagagccaacgaccgtggacgatggcgggcatctacagtaggggctcccatcaatgaaggggcggggggctgtggcgctgcgtgacaggcagcattcaagcccgggtcgacatggttgctgcaggtgacatgacgtgaacttttgagaacattaagcgatggaagatgccgtgcgggtgcttgcaggagatcgatccacgacggcgcatcacatcatgttgcacgtgctgggacaaaggcccgagatctcacactgccactggtgaccggtgcggcataccgcgctgttttcaccgcgctgaaggcctccgaagacga

SEQ ID NO: 588352 - DNA, 228 bp, Homo sapiens
  misc_feature (40)..(40): n is a, c, g, or t
aggatcatcacggcaccctgctgatcctatctaaagcagnattttctcagttgctccagagtggtttttttttccctcccagtccttggttgtcttgctgcagggtactctgacacttttcctcaactgtggcaataagtgaaaggagagagaacaaaagcatctgaatcacaatttaggcaaaaagctgacagccacacaggctgttaatgtagggactctcttctg

SEQ ID NO: 588353 - DNA, 372 bp, Homo sapiens
ctgtattctctaatccacattctaatcccagatccactgaagcatatatactccacacctcagtgtcaacctgtcaacattctcccccagactgtcagtccttttttttcttttatgagactgagtctgactctgtggcccaggctggagtgcagtggcgtgatctcggctcactgtaacctctgcctagggggtacacgcgattagcctgctcagcctcctgagtagctgggattacaggcatgggccacctatttcagctatattaatatttctttggtactattcagaaaacccgggttttggccatgtggcccaagagaggactcaaacacggggcctcaagcgcacggggctaaggggtacccgcac

SEQ ID NO: 588354 - DNA, 823 bp, Homo sapiens
taggcccattggagtatttggtttcaattagggaaatagtgggtataaggattaggatggtggtgaagtttagtacggatgcaatggtccaatgatggtaaaagggtagcttagggttgtcctccgattcaggttaaaatgaggaggtctggggctaggagtcaataaagtgatgggcttagtgggcgaaatattatgcttggtggttgggatatatggaggagtggggataatggcgtaggatgaggatggatagtaaatagggcaaggaggcctcctaattgtagggacggactcggagaattgtgtagcgaataggaaatatcatcggctagaaatgctgggagaagggggtgtcccacaggcggctggggaccagggcgctaatcagtggcccggggaatccgccaacagggaggttcgggccgcacaacaatcggggctaaacggggtcctcaacagaacaccatgttgacacaaagaactatccccccaaagggccgccacatagaatgagaacaaaacgagcttgcacaagggtaacctcccaccgccaaagtcgagcgcgatatccacaacagtccgatacggttcccccaatctgaggtacaaaatcagaaagagaaaagacagataacggggagcgaacatatcgaccggacaacacaaaatagaaaggaacgaaagaggcgaggagtgaaacaaaacaacgcaagccacacacagaaacgaaaaaagtgagcgaaccaacaaccagtcgaaacacacccgaccattgggcccctagagcacacacacaggcacaaaacctaacgacgttagc

SEQ ID NO: 588355 - DNA, 101 bp, Homo sapiens
tggggcccccctcccccccctttttttttaggggcccgggggggggggggtaaaattttttcccccgtccctttaaaaaaggtcctttggtccccctttga

SEQ ID NO: 588356 - DNA, 608 bp, Homo sapiens
  misc_feature (9)..(9): n is a, c, g, or t
  misc_feature (21)..(21): n is a, c, g, or t
  misc_feature (368)..(368): n is a, c, g, or t
  misc_feature (405)..(405): n is a, c, g, or t
  misc_feature (490)..(490): n is a, c, g, or t
  misc_feature (505)..(505): n is a, c, g, or t
  misc_feature (535)..(535): n is a, c, g, or t
  misc_feature (552)..(552): n is a, c, g, or t
  misc_feature (564)..(564): n is a, c, g, or t
  misc_feature (601)..(601): n is a, c, g, or t
ctaacgccngtaagttattgnacatcacacagattaagcaggcttcaggctggaaagcagtttgctctgctgggaacttcctcgggatgtctgggtctccttctgtggtgtctctcccctgggactgccgccagcccgcagcctctcgacgaccccaggtatcaaagctcagccatttgttctccccaggggctgagggctcgggctttggtgaagcagagggtccccgtgttgatgccaacggaccccaccccctccaaagtgaagttggaagcaggtgaagctcatggaaggctgaaggcaggcgggctggagtgaaggggggtgaccacccccacgtgtgggacaacagggggcagtcaagatgncgcaccaccacccctcccttccaagctccaggcatgnttccttctccatcaaccttgggacctctctgagtgggctctcaagggaaaatttattttctcttgttgaaactaccagatctganatccacccccccagnaccatggccaaggggggctggggaagccangggggtccaggacaagnaagaagaaaccncttggaaaatggtaagttctccagatggccaatcttngttttcc

SEQ ID NO: 588357 - DNA, 441 bp, Homo sapiens
cacaagaaatggtgtgttgtcgcgtagaggaagagcagacgacacttcaacatgattttttacaatatttctatgctcagcttgatgtgggacccgcttaacttcccaagtctgcttcaaatgccaaatgatcatagaatggtccacattgagttttccagcaacttctttatatggttgtaagaggatcagcttctgtgattgatctcccaactggtcgttgtcaacttctgatggccggtcatagcactcctcatcttcaaggctctcgtctcctttgtaaaacttctatgaaccaccactgcactgtacgtttcattagcagctccttggccaaatgcgttgttgatgttgcgagttgtctccagtgctttacaatccattttgaccttgaataagaaaattgctcgaatatgctttttgtctaacatcattttcact

SEQ ID NO: 588358 - DNA, 1598 bp, Homo sapiens
  misc_feature (88)..(88): n is a, c, g, or t
  misc_feature (140)..(140): n is a, c, g, or t
gagcatgtgcggtgtgtcccgtgagtctgtctctatgctgtccacagtgttctgcgtacggatagccagtatccaggaggacatcctntatcactaggccatcacgatccgcacgcatctcgaatgtcgctcgtccgctnagcccccaatccgggacctatcgtatctcgcgaccacttctcccttggtatctggagaccattgctcagacgatcgtatgagtaggataagttaccttgcgttgcacaacgtcaattgactgaagctctccaggaatatcagttcaagaagttgatttccacacgattgtcgagaggggcggcacggttgatcaggcccttggatacaatatgttgtacactgacgagtgtcctcccttactagactaaggcatgctctcgaggtgacttgtgctactttttccggatcgccggcgtaactgcacctgtagggactttcctggtgtaaagcggcgattggagagcgaatttttcctatatccgtggaaattactagggccaagagtggaagctaaataccgccgcaaggagggggcatcaccttaatatccgattctgggtctagctaccaatattgctcatatgggccacggcacctttgaagcccaggagcccagtttcgaacacactaactataaccccagtcgagaacttttcgcacaaagcacattggccccaagagacgttcgccttaacatgtgcacgtattggggtggcgatacgagatatacgtctggccacaaattgcacgcgttacccacaatgggagaaaagtgcattagaacgaggatgtgtagctggggatgggggaattgaaatatattaaaaagcgctttggataacccagatttagacctccgcgtatcataaccgcgggcacttccttttaccactttggcacccaatgggtgtgctttccctttagaccccccacgagacgttgtcatggcccgcccggactcggggaccattgcgtcgcgatccctattcgccacgagacgagtaaggtttacggaactccctaccctataccaagttgcattctgcgcacagcgtgggaccgtccatgccacggcacgacaccgcaaacatcactcggggacggaaagccctaacacatgagaggaggcccaacacacacgtactccaacaaacgcggtcttcgggaggacgcgcgccccacgagttagcggccaagtgctcgcactgggtggcaggacacgagcaaccactaactatctgtcgggcacagaggtagcagtccaccgtttcctccaacgggaccatcgcacgctatactacgcacgtccacgtttcagtagaagaccacccaggcagaagcatcatcctgagcaacaggcacgggcccccttatgtgcccacctctaattcaccgtatcggtcagctactacttggacgcataaagccgctctttaacaccgttacacgcgcgcacacactatagcgaacgactcattttcctgaaacgatatgtttctctaagcgacagcgcgcttttgtaggccaacagtggggacaactacacggggtttataggagagtgacacgagaaagca

SEQ ID NO: 588359 - DNA, 373 bp, Homo sapiens
cgccgagccgatagctggaacttatgaggaaatgaggaaacgagcttcagataatttaaataacttcccaagactaagttttatagttgagggggggtgctagaatggaatccctgaagagtggctcaaaggcctttctctttaccatggcctgtgctgccttgctatactgatgccatgaagttagtccatcctgaggtctaaccccttttgatggtgtggaactcacatggggaaggcggacatttgcccacctgggccttcaactccttcacttggagctggcctctccccatcatgccagcttccctgtgtgtgaatgggtgtgtgtgtgtgtgaatggggtgtgtgaagtgtgtatggtcggtctttg

SEQ ID NO: 588360 - DNA, 94 bp, Homo sapiens
tcttctcccctgacattaatagtgaatgtattcttatttttcagtggcttaatctattttcatgtcttggaaagtgaagatacatttctctctt

SEQ ID NO: 588361 - DNA, 1307 bp, Homo sapiens
  misc_feature (372)..(372): n is a, c, g, or t
  misc_feature (933)..(933): n is a, c, g, or t
tcttggtacaaaattttattaaagggtctttagaagagcaacatccagaactccagaaatacagctgccaaggagacccggttagtgcgtggtggggacgtggctgtggggcatgtggcaggcggctctctgtggctttcccaccctttcgtgttcgtgagagtggggggtgggtgggcagatatcctcattcttggggtttccacaatgtgcctcacgtgtggctcgaggcagggcgcttcttatgagggccaatctctttcaccagtgtgtgggtctcccgagggccacgcatgtgattctttcacctttgaagtgccacagacaacaccctgtgtgtctgtggagacaacagcgtgtgggcgccacagncgaggtgttcacacggtagtataagttataaacgagggtgtcctcgcggcgtgagtgaactcactcgaggccattcacaacaaacttctcagtgggatttatagccccttctgtgtgtccctgcggagtttctccacagaaaaaccaaaaaccttcgagagccttgtgtggccccacttctctccagtggatgtgaaacgcggagacaaacacaaatagcgagggccctctcgcggcaacagcaagagcccctccttagggagtttgggtacagcgcaggagaacttcgtggccgtggggccaagtggcgacaacagaaacctctataggtggcgcacctgttttacagctataaaagctcttaacagtggcgctctctgtggaagagcccaaaccttcttctggaatctacgagcagtcgagttcccggaaatccgacgggccctttctccaccaaggaacatccgtgggtccgtgggggggtaacagataatggatctcgtaggccggggtgtgggggtaactccgccaccctcaaattcacaagagtaagcattcttncagccaggtccccgagttaagaactccattccagtcacgtttgaaaatccctacggggaaaatctctcttctgggatatggccgcaattcaaagaaattcgcaaatgtgtgacccccacgggacaacgtggagggccccgaaaatgtttacaagcgcgtgaaaaacagggggccttctgggccaaattgtagcgcaacaaaggggggtgtagccacacgagggaggactaaaagagccaccaggcatgtaacagtaacgaatatccacacgacggggtgttgaaaaaggaggacgagaaggtatactgacacacgggacgtgtgtaatagcaacctgcggaccgacaacatcttttctctcgattcaagcgggc

SEQ ID NO: 588362 - DNA, 657 bp, Homo sapiens
gaccagttaagagaacacctatcacagcatattcttgttgtgcatggccaaaagcgaacaacaatgcaagcaatgtctgacactttcttgacatcgtgagacgatggggaccgtacgaaccacgcaaaacgaaccatataagtacgtgggccaacaagtcagtcctagtaattttcccatacagttggataagcctaggctataacctactacacggtgcacaacaaatgcaaaaatggggaaaggttacgaaattacgttggacaggcatagacaaaacagggaataaccctagaacacttggtgccatccacacgagaagacaaacaccaataccccaaattatcacgaaacacaacacaatatgggcacaggccagttttaataatccttaggcaattggtttataacacgtgggcaccagttgcgcaagccaagccaaaacaagccccaacagctttgtcaattgagaaaaaaaacaccataccattggtggaacaacttccagttcgccaaaagtgggttatcccaatcttggcaaatcgtgccaaattgtggcgggcgcttatataaattagagtgtccttgggcaccaaatgtttccaaaaccatcttggacaacacttccaaaatggtcccccaatgggcttatacttg

SEQ ID NO: 588363 - DNA, 888 bp, Homo sapiens
gtgttgcagagggaatagcaaagaacaaagcccatgactcctgagcaaagcaaaaactatttttcatttattttaaacctacaataataactcatttctcaaaagggtcataggcagcaagcaataattgcaaaatcatggcagcaaagtggaacatcaacaaggtttgactaattggactatacccttgccctattcttaacttattcactggtttgcatatttaattgctctctaagaggatattgactgtctctatgccagtgaattctgcaactaggtagtatgagcatctacttgaagaactgtggaattttcagtaggaacatagaaaaatttttgaaggcaaagaaattctgagaatcaaaataacaattctattcacttgaattctatttcattgtgagcttaaggaccacaataacagcttttcaaaaaatgctataattttctctaatttttctaaattgggccctttatttctacattgtcctattctccatatatatcagttgatttctaaaagttgtggtcctgggaaccaggcaaccatcagcattcacaagagaaggcctggttagaaattggcaaattcttaaagctccatccccagggctacttgaaatcagaaaattctggggcatcggaccaaaaatctatgctttgtaccatcccttccggggacaattgtggactggcggctttccacagtctttcagaaatcacctgggtccctaacctagtgtcctgttatttggtaacaacacacggtgtacaataatgctctgctatttcactgtaacattgacattcgggtacatcattttctcgtctcgaagtctagtcttaaactaccctatgtgagcaaaatttacaacctgagggaac

SEQ ID NO: 588364 - DNA, 876 bp, Homo sapiens
acctccgcctcccaggttcaagcgattctcctgcctcagcctcctgcgtagctgggattacaggtgcccaccaccacaccctgctaattttgtacttttagtagagatggggtttcgccatgtggccaggctggtcttgaactgctgacctcaggtgatccacccgcctcggctcccaaagtgctggtattacagtcatgagccacctcacccagcctgtttttgagacggagtttcacttttgtcgcccaggctggagtgcaatggcgctatctcagctcactgcaaccccaactcccaggttcaagcgattctcctgcctcagcctcccgagtagctgggattacaggcatgtgccaacacccctggctaatttgtatttttagtggagacggggtttctccatgtggtcaggctggtcttaaactcccgactcaagtgatctgccgctcggctcccaaagtgctgggattacaggcgtgagccattgacctgtcctgcagtgtgtctttaaaatagttagggggtgcagaaaacgatgcagggagccattattctcctttagcaaggtagtctctttacaattgtgtggtttaaaatattccattgggaacccgtatcttctcaactgacctggaacagagctgatggggtggggggcccgcttgggctttggagatatctggagccatatctatctcgtacggggtatagacctgatttctcttgatctagcaattcgaacaggtgtcggtgctcgcggaggcgtgctggccagggggggggggtcccgaacggccgttgattacgacggtttggccctggacctatatggggcccgtggagcgccagccacgcggggtccggcccacgcgc

SEQ ID NO: 588365 - DNA, 120 bp, Homo sapiens
  misc_feature (70)..(70): n is a, c, g, or t
gtcaagcagacaagagaggttggtgagaggctcccagcttgtgtgcgtaagcggacacctggcccactcncgcccactgggaattagggagcagcagcaggtaattccttctggactcag

SEQ ID NO: 588366 - DNA, 385 bp, Homo sapiens
gtgcaagttgtcaaatctctctaaacttcagtttctgaggattcaatgatataatacatgtaaaactactggtacactgtttggtatgtaacaggtgctgaagatcctcatggctcagttctcttggtgactcagttctctttcttctttctccgcttcctcttcctcttccttctcctccttctcctccttctttcctcttatttttaaccactatgggaggtgtgaaatggggaataacaaaagtaacatctactgcaaagtttaaaattatcataaattttagcaggctcttatcataattattgctgtgtatagaactggctgtttagctaaaacagtgtagtacttttagctctttttttctgttgttttataactacca

SEQ ID NO: 588367 - DNA, 142 bp, Homo sapiens
aggctcccttgggagagaaggccagagaattccctcttactttacatttcttatgcttagcaaattaacaactattttgtaagcaatctgtgaaatccagtgtggctcttttcttttttttagatggagtcttgctctgtca

SEQ ID NO: 588368 - DNA, 321 bp, Homo sapiens
cggactcccccacatccactgagtcgactcttgattttagtaatttgagtcttttatttttgatcagtctagttaaaagtttgggaattttttcatgaaagtaaaatttttcctgcaatcccagcactttgggaggccgaggcaggcggatcacaaggtcaggagttcgagaccagcccgaccaacatggtgaatccccgtctccaccaaaaatacaaaaattagccaggcgcggtgatgcgtgcctgtaatcccagccactcaggacgctgaggcaggagaatcgcttgaaccggggagatggaggttgtggtgagccga

SEQ ID NO: 588369 - DNA, 503 bp, Homo sapiens
  misc_feature (50)..(51): n is a, c, g, or t
agccattcccggcatgaacaatatcacggtgattttgcgtaatcctgagnntctggcgctggatgccatagagcgtttgcaacgctggtgggaagagaaccaagcctttgaaaccgaattctcgctttattgaaattccggtggtttacggtggtgcaggcggaccggatttggcggtggtcgcggcgcattgcgggttgagcgaaaaacaggttgttgaattgcactcctccgtggaatacgtggtctggtttttaggttttcaaccgggcttcccgtatctcgggagtttgccggaacaactacatcacccatctgtgctgaaccgcgcttactcgttccggcaggttctgtcgggatcggcgggccgcagactggtgtttatccgctggcaacgccgggtggctggcagttgattggtcatacctcactcagcctgtttgatccggcgcgtgacgaacccatcttattacgtccgggagacagcgtgcgctttgtaccgc

SEQ ID NO: 588370 - DNA, 295 bp, Homo sapiens
  misc_feature (29)..(29): n is a, c, g, or t
  misc_feature (32)..(32): n is a, c, g, or t
  misc_feature (34)..(35): n is a, c, g, or t
  misc_feature (293)..(293): n is a, c, g, or t
gaattgggcacgagcggcacgagctcctngtntnntatgcaaattttgatttcttttttgatttcttctgtgatttgttggttattcagcagcgtgttgttcagcctccatatgttggaatttttaatagtttttctcctgtaattgagatctaatcttactgcattgtggtcagaaaaaatgcttggaatgatttctatttttttgaatttaccaaggctagctttatggcccaggatgtgatctatcctggagaaggttccatgtgcgcttgagaaaaaggtgaaattcantg

SEQ ID NO: 588371 - DNA, 110 bp, Homo sapiens
gcttgtgctgagagatcaggacgggcactggagctgtcttgtccttggtgtgattatctggatggttcccagaggtgtgtccatggggtaggaggatgggctcgcccacg

SEQ ID NO: 588372 - DNA, 617 bp, Homo sapiens
  misc_feature (427)..(427): n is a, c, g, or t
  misc_feature (579)..(580): n is a, c, g, or t
gggaaagggttggttaggcaatcattctagggcagaaagaagtacaggataggaagagcataatacactgtttttctcaacaaggagcagtatgtacacagtcataatgatgtgactgcttagcccctaaatatggtaactactctgggacaatatgggaggaaaagtgaagattgtgatggtgtaagagctaaatcctcatctgtcatatccagaaatcactatataatatataataatgaaatgactaagttatgtgatttctggatatgacaggtgaagattgtgatggtgtaagagctaaatcctcatctgtcatatccagaaatcactatataatatataataatgaaatgactaagttatgtgaggaaaaaaacagaagacattgctaaaagagttaaaagtcattgctctggagaattangagggatggggcaggggactgttaggatgcattataaactgaaaagcctttttaaaattttatgtattaatatatgcattcacttgaaaaactaaaaaaaaacaataatttggaaaaacccatgaaggtaactaacggaaaggaaaaactannaaaatgaaaagtatttgcctctggaaagaacaactgg

SEQ ID NO: 588373 - DNA, 119 bp, Homo sapiens
tctaaggatccgagctgggaggagctgagattatatggtaacactataaatgtaatgtagtgtaatgacttgtctggagagggagaaggaactgagtcagacgtccagagaaaaggagg

SEQ ID NO: 588374 - DNA, 1469 bp, Homo sapiens
  misc_feature (711)..(711): n is a, c, g, or t
atgcttgttcactctataagatatagcgaaggggtgtattaatgtatatgaccctgtgctgtttggacattatgctaaatagcgcaatttttctgttgtagaggcttctatattgtgcctgcacactaggtgcatctatacccaagatctcatacacccttgtacaaagacttggtcaggcggtaaacacttgttacgataaatgtcgggttcatggctgtcatgagttaatccacgaattttctgctcctttaagttatttcattaacctggggattcgctatgacaccaaatatccatgaaaggttcccagagatttgcatacacgggatatggcaatgaagcgtgcccgggtaccctcgggatcacaccacaatagatctctttaaagaggcctttgtgtatgccacgaagaaattgatgcccaagattcatttgtgggttccgttaacagccacaacatttggttgacctcatgttgggcaagtatcgacttggagagtgtatgctggatcattgagggaagttcttctgtaaaaccctagcgtctagacattgcccgtgaatacactggagatgaacgaagtttcaagcggtgggaatgaatgcccgtttttccgcgctattactagagcatccgtggcgctcgggaacccgcttagtgcgccatgagccatggctaaggacagtaaacagtgcgttcagcatganacgcgtatgcacttagggatgggtctacctcaaatgtcgtcagtccccctaagttatatatacgcatgtgcttcatgtatgttgctcgcttgcgcgaacgtttcatcactctctcgctgtgcactgtcaatgaactgctctttggctactatggtgatcgcagatgtcatcaacgtaatatgttcagcaaggaccggtatgcattacccattgtcaacaatgtaatgacaactctggattcttaatttatacgttttcgtaaatgcttgcctaccctatggtgtctttgacgtcgactagatcgttgaccgtgtaagtattgcaaaaactactagttcgtgagaacattaccgtataccgattgctgcaccttcggggttaatgataatctgaaaaccgtgtcttatgggtcacttatactatatatgccatctgactcaaaagtgtaactatataggccaggcgtcggtgactcacaccctgtaatcccagcactttagggacggctagagaactgggcagaatcacctcgaggtcaggagttcgagaccagccttggccaacatggtgaaactccgttctctacataaaatattcttaaaaaattagccaggcatgattatgggtgcctgtagtcccaactactcaggaggctgaggggggagaattgcttgaacctgggaggcggaggtttaagtgagccgagatcgtgccatgcactactaaagctggggacagagtaacgccataacaccact

SEQ ID NO: 588375 - DNA, 120 bp, Homo sapiens
tcccgtgaacaaggcctacccctcacagtgaagtgggatcaacaagaacagaaacccgcgtgctcaggactccactactcttcttggacagcgggtggtggcaccaagctgatgacttca

SEQ ID NO: 588376 - DNA, 558 bp, Homo sapiens
  misc_feature (442)..(442): n is a, c, g, or t
  misc_feature (520)..(520): n is a, c, g, or t
tggtggtgtatttcttggtgcttttcgtgaagatgagtggatggtaaattttgggatttatatctggggttctcggtcgtccatgggtctggggtgtctgctttaatgccagtatggatactggaaaggttccctggtccccctcacagggtgtgtgaggggggtgtggctcccttcttcagggcccggcggttcaaacctttagggaaacatacagatgggcaggttaggggtctctgacaccaggggcagcatctaggggtgacggtttacagctcctgaagccccagggcgttggtgtcaaggtgtgctctttaagtttggcttggacgttctcgagggtgtcacggggctcgacctcaggggtgagggtctggccagggagtgtcttcacgaagattggcatcccacctctgagacggagcaccaggtgcagggtggnactctttcgggatgtggtagtcagacggggtgcgcccatcttccagcggttttccagcaaagatcagactgtgctggncaggagggatgcttccttatcttggatctgtgtcttga

SEQ ID NO: 588377 - DNA, 236 bp, Homo sapiens
taaccctgatgaatatctacaatatatatgttacagaaaaaaaacatgtacagtatgctctacataggggtggagggagactccctttacatgattatactgtctggtcccatttgatttctccaccttatttatgctttccctcttcaaaaaaaattaggccaggcacaggggctcatgttggtaatcccagcacttgtggaggggatctctctaaagttcgaccgtgcaggctt

SEQ ID NO: 588378 - DNA, 145 bp, Homo sapiens
accaacagaaaagtactgacccttcttacaaggtcaaagctcccccagacatagaacaaaatgagaaggcaacttcagccatattttttttcagggtacttgcagcaaagtctgtaattaaccacgttttcccggctggcgttga

SEQ ID NO: 588379 - DNA, 808 bp, Homo sapiens
  misc_feature (573)..(573): n is a, c, g, or t
  misc_feature (689)..(689): n is a, c, g, or t
agcggtgtttgagatgaaggtcaaagaataagttcacacacacactgaaggactctgaagctgagctccagcggcgccatgagcaaatgacacaagaatttggaagcacagctacacaagaattggcaggaaaaactgtcgtcagttcgatggatgaggaaagcaatctgggaagctcaacaacgtatttgagaacaacagaactcttcaagaaccttggggaaagaacaagaagaaagggaagatcttttagatcgtctctattgatccaccgagttaacagtattgagttgccaatatgccagcttggacatcagatgttgggttggatccgttctgaccaattttgcgaccaggtttgtatcccataatgataggattataactagctagtgactagagagaattattgtgtttatttctaggttcattgagtggggccaattatagatgcctttgaatttggtcctaaggagtagtccgtggtacctatatgaaacgtaaggaggctcgtataggtagccttcccttagcatattttcctattatgaatattctaaaccatggatatcntctcagagatgtgaactgctaagtagaaactagtttccacgtgtcggtcacgagagtcagtgctcctggggtggtgcggactgagtttacaggaattattccgaaattaaagaggnagctctcggcaagaatttccgatggcaggtttgcacattggccagtaatgatgtatgcagaactgtgccttctctatgcataattcacaatacaaaggttccatgcagcgcagcatatc

SEQ ID NO: 588380 - DNA, 309 bp, Homo sapiens
  misc_feature (287)..(287): n is a, c, g, or t
ggagagtcttgaagactcaggttagaggtgaactagttattaaagtaaaggcaatttctaccaaggtcagtttcttcacaggaaaaatccaacacatttagaaaaccaaaacctttcaaatgattttcctaaattaattagcatgtaggtcatactagcattcccataaaagggggcaaggcagtagaaaaggcggcatatcattttattgctttataccacaatagctaatgcaataaaaatgtttatttaataaaacaaaaatccttgatcctcctgggcattgncaaaccattaggtactatattt

SEQ ID NO: 588381 - DNA, 117 bp, Homo sapiens
atttggctgtacgagcaccctaacactttcgacacagtagattacaccgagggaagagtttcgggatgaacacgggaaaagtacataaatctaagcaaacagacaaagccctcctcc

SEQ ID NO: 588382 - DNA, 534 bp, Homo sapiens
cagtttatctaaagacctaatttcacaatagtttcctctgcatttatatactctgtagtgtttaggcaaccctgttataagtttattaatattatgtaagtgttgttcttgtatttatgtatagtgtatgtattgtaaatatactcagagcttttttccttttactgtaaaatggtgatttttttgccctatgataatgtaaaggggacaccctcctaatgatgattctctcagaggaatgattatctccacgtctattctcagagcatttaaactgaacaagatgttacttgtttattaatggctgtctccacgacactattcctgatcggtgacaacagctttctctgctattcaactctcctctattgaattggatgctgttgaacgtgaacatagagtattaatacctttcacgctgtaccgccttctgtatcaatctatcctgaactcgaacggcatcgaacggtctaatataaatgcatatttgctatggcgcaaaaacacacacacaaaagaaaaagaagtgcgggc

SEQ ID NO: 588383 - DNA, 163 bp, Homo sapiens
cctagaatgttcctccatcccagattagagaagtaatctcatggctggccaaactcaagtaccaattcaactttttacccagaaacatttgctctggctagcagtcttttggataggtttttaactaccgtacaggctcatccaaaatactcgagttgtattg

SEQ ID NO: 588384 - DNA, 122 bp, Homo sapiens
agcgatcccattctttggtcaggcagatcacctgagatcaggacgtatgagacgcctgggcgacatggaacaaacccggtctctactaaaaatacaaaaattagccgggcgtggtggtgggc

SEQ ID NO: 588385 - DNA, 226 bp, Homo sapiens
ccccgggttcaggcgattctcctacctcagcctcctgagtaactaggactacaggcgtgagcaacacaccctgctaatttttgtactttttagtagagatgggtgccgagaccagctccgtgtgcggagccagctcggttgtggagatcctaacccagcgttgctagaggaattaaagacacacacacagaaatataatgtgtggagtgggaaatcaggggactag

SEQ ID NO: 588386 - DNA, 149 bp, Homo sapiens
tcggtctacttgttctggtctacttgtctctcggctctaccttgtctctcggctctaccgtgtctatttggaacgaccaccttttattagggtttggatgagtcgtcggcatcggacgcctctaaaccgagtgattgttacatctcgca

SEQ ID NO: 588387 - DNA, 1301 bp, Homo sapiens
tgtggttcggcgcgttctgcggcctggttgttgagatcgctctcctgcgagttggtttgtccgtgaagtgtgttttctcctccccccgagtgtgtgtttctctgggggccccgccacagtggtgggagaatgtggtgtgcttgcgcgcgaaacatgtgcgggaaagttcttgcccacttccttggggcccctttttggggggtggacccccgagcgtcgggcccaggagtgggttccccgcggctccttacgtcgtaaaaatcgtggaaggccgttgttgaccaacttgctacgaggacggtgttaaaaggagggaggaattgtaaatttctttgccaactggataagttattttttacccggagttctctagaacccccgccctccgtagagtcctgagagttcttcaatcccgtgccggaagaccatccccagagtgcccgccctgggtgcacccagagatttggtgaaatgaggcgcactgcaaggggcgcctgccaagaaaggggaattttttgggccacccccccgtcacaagggagaccctttcggaggccctctctttggggctctgggctttccccccccttgtttctgtgggacgggccctcttcccgccttttgttggaattctttttattgtggcccccccccgcaagaatatggtgtgagacccgcggctccacacgaagaattattgaagccttggccctatatggggaaaaaacccctgttcacacccccacatgggcccagcgttgtttaggcgtggagccactgtcttaaccacgccccccttgagccacgaaaggttttctaacccacgtgaggacacggcctccatggcccttcgcttcacgtccacgtggcacctaatcccccacgtctttcccggccacgcttgctcggtttttcccccacccgagagtggtggttctaagaattctattccacgaggtataccgcaggagaagacccaaactccggcacctcgggtttgctcccctcgagttataagtggcctctcacgcccatgagccacttctctcccctccctcggtgagaagtgtgaactttcgacattagtttcgcacctcttcctcgttggagaaggtaagaggccccctcgctccttgtattaagccccgaggccttagagtggccaacccagagcccttctgaagccccctctctgcctcgttcctcccccagcagtacccgggtggcccggggtggtgagggccagttttgcaccccagcccaacacattaccattaaaacccaactctcgtgtcccgcca

SEQ ID NO: 588388 - DNA, 833 bp, Homo sapiens
  misc_feature (388)..(388): n is a, c, g, or t
gtcgcgtacaaaggggcgttctctcctctccgtggtcgcgccatgtatatccggccccgcgttttatttaatcttgaggcgtgtcccatttccgcccccccgcggtgtttgttgcgcccccgccgttgtatcaaggtgcacgttcgttgcctgtcgaccacgcctgggttatcggtggcactgtgcctccgcgcgtttgatacaattctgcgacacgctcggggcgtttatctctctgggcaactaaattatgtagcccctgtggccacacccgctatgtcgaaacctatcacgggggagatgctgctccccataaagtgggcgggagaacttctcgtgggtcagacggctcctcttttcaagagaaagtacgatggttttctacttncatatgggggcaaggtgtacgcaccacgggggtatatggttccgtatgttaatgtgcgcgggtgagcctaggtacaagcacaagtgcgtgcgcgtgtgcaatatagagtgcacccgcttgccacccacaaaacatgcgggtgctttcataaaggtgaccctgcacttggtttgcccacagagaggcgcgtgcatgttatcatagcacccgcgcgagtctcgctcgtcagcacagattatattttcccattcgcgagtcctcgtgatccacagtagctcgtctttttcttcattcttgcaccttctgctatcatgacatctgtcagtcaccccctcaaaacactgcttctggccgccaaccggctctctccgaagaccccgcccaccacgtgccaactctatgctcgtccctcattacaaatcgaaccccctctgcccccattgca

SEQ ID NO: 588389 - DNA, 171 bp, Homo sapiens
ttacaggaataagagtacagaatccaaggcttcaactttctgttcagctgttgttcactagttccctactatcttgtgcgagataggtacaacctctcctagacaaacaggatatgtgataattgtaatctcttactaactgaatatagtgttgggtactacgctttggca

SEQ ID NO: 588390 - DNA, 199 bp, Homo sapiens
ggtgttcttatgacttggagaatttctagtgctttccatgcactagactaatttagttctttatgacagtgctattttattctgattttaaagatgaaaaaacaaacacacacagagttaactagtacagcatgaactgagtggcacatatcagacggggcagagccaggaatcaagacctcagtcagctacggttgga

SEQ ID NO: 588391 - DNA, 803 bp, Homo sapiens
gttgcagcggcttcggttaggccgccaacattggcgggacttcgagcaacagagggccaccttttggaaatgagccaagggtgatgagttgaaattgtcacccgagccatttcacggattccagttcgccttgacttagccacccagaaggcggggcaaggtcactgctgtccaccagccgacatcatgaaactttgggatgggttgttcctccgtcgctgtgaggaagttgcttgactgtaccccaatccgatttgagccatgatcatagaccaactgctcatgcaactggtgccagaatccttacccagtttgatgtgcttgtgatgccccatctctatgggaaccattattgaccatctggctgctggcctggttgggggagctggtgtggtcctggtgagagctatagtgccagaatacgccgtctgttgagacgggtgccccggcacccctttgccccggcagtgggcagggatatagcccatccccggccatgctgctgtcggcttcccacatgctgcggcatcttaatcttgagtatcactcccgcatgatcgcagatgcggtgaagaaggtgatccaagttggccaggtgcggactcgagacatgggcggctacagcaccaccaccgactttatcacagtctgtcatcggtcacctgcagactaaaggttcgaacctctgacatgggtggctatgctacttgccctgacttcactgaggctgtcattgctgccttgccccccccataggccctgtccatacccctgtaaggtgttccataaaggacatgaaccca

SEQ ID NO: 588392 - DNA, 297 bp, Homo sapiens
ggtccccctggggatttttacccccccctgggggggtttttccacccccccctggttttttttccccccgtatttttggggggaattttgtggcccccggggggggggggtgggggggtgggtgttttttgaccccccggcccccagggggaggcccccccctgcccccgattccccttttccccccccaaaaacaaaaaccccccccggggttttggggggggggtggggccaaaacccccctgtcccccccagggccctttttttttcccaaaaaattgggggtcccctttttta

SEQ ID NO: 588393 - DNA, 289 bp, Homo sapiens
cgctgggtatcgtcaggaatgtaagaagcccttctgaccggctgcccagtctggtaagtgaggagcggcttttcccggccgccatcctgtctaggaagggaggagtgtctttgcccggccgcccatcgtctgagatggggggagcgcctttgccccgccgccccgtctgggatgtgaggaacgcctttgccaggccgagacctcgtctgggaactgaggagcgtttttgcccgactgccaccccatctgggaggtgaggagcgtctctgcccggccgccccgtctgaga

SEQ ID NO: 588394 - DNA, 156 bp, Homo sapiens
gtggacctgacactcatgtaggagaccggccatgccttacaagtgcatgcagctcactgatctcatcctcaaagtttccgcacagtgcccaccagaagtatgtccgacaagcctggcagaaggcagtacatcaagtactcatttactgtccagggc

SEQ ID NO: 588395 - DNA, 101 bp, Homo sapiens
taaaggtaattctgaaatgacgtcagttaccatactgattccaagaatagattttattgtatttattcattcaacaaatatttattgagtatctactatgt

SEQ ID NO: 588396 - DNA, 231 bp, Homo sapiens
  misc_feature (2)..(2): n is a, c, g, or t
  misc_feature (8)..(8): n is a, c, g, or t
anacatgncgaacgactgatcagcctagtgatacgtaactgtatcctctgacatgttggtgtagtaagtggtttccaagccaccagcttccttgggtgggctcactttggtcccatctgtatacctaccactcgcagtgggccttcaggatatagcagttgttgcagaaccatgtatgtgacgtgtcccagctgcagctataactgacatggatcagtccgttcgcatgtt

SEQ ID NO: 588397 - DNA, 839 bp, Homo sapiens
ggccctgtccacagtgggctctgccatcagcggaggaagctggagacatgaggaactctgcgaccttcaagtcgttggaggagcgagtgggaccataaagtctaaggtgtgggtgacagagagaacggagtgacaacctcccttcctcagcggggagtggtgacaagccgcctgtcggatcccggacctttctaagcctgtggttgcttcacccgctgcatgagtccatcacgctaggaaccagacctctagacatcgacagccgcagctctgttcagacggtagtccgagccagctcgaggtcggatgagcgagagccggtcctgtaggacagtcctgcccatccacgcggagatgtggctgccgcgtttgatgaatttgaagaacacaggcttgtgcacagatgttttacactcacgttgtagatgaaacagatcactgtgctgtccttcctaggggtgcaggaagtggacagggcggagggttgaaagaatattgagccaagcccaggctccctttgggaatcatgtagcccatcagaatgtgaaggatgaagagttctaagcatagaaattaaggtgggcattttctgacttcttcctcctcctccttccctgtactcacagaaggaatgcaatcacccagacaagttcctacctgttacgcaattttttatctcaaaaatgcgaacgagaaaactgtgcattttctgagaccccagaaggaaactgaccctcaaggtggctgatgttaggcggatctagttttacggagccaaattcttattttgtaatgcaggggcttttcaaaaagttaaattaggcaagcagttagcctat

SEQ ID NO: 588398 - DNA, 149 bp, Homo sapiens
  misc_feature (66)..(66): n is a, c, g, or t
  misc_feature (112)..(112): n is a, c, g, or t
  misc_feature (119)..(119): n is a, c, g, or t
cagaagtttgaatgaagcaagggaaggcatgtagggacaggaaaggaaacaatggaaggaaagctnattttttgaaaaggacagttgaagccagcctcttttcccccaggcntgatttntttttttttttttttttttttttttttttt

SEQ ID NO: 588399 - DNA, 391 bp, Homo sapiens
acatatgtggcacggacaccaaaagggtcagactagctgggcatggtggcttacacctgtaatcccagcactttaggaggctgaggcagggggatcacttgatgccaggagtttgagaccagcataggcacatagcaagaccccatctctacaaaaaataaattagccggatgtggtagtgcacacctgtagtcccagctgctttggaggcagaggcaggaggactgcttgagcccaggagtttaaggctgcagcgagctatagtcacgccactgcatttccagcctggataaacagagcaagcatcagccagaagaaacaccttcctcaggactcccagggactggtcctcggtggggatgtgcccatcaggtccatccagggcaccatt

SEQ ID NO: 588400 - DNA, 831 bp, Homo sapiens
cattccatttcataaaagcttaatctagcaagaatggtgagccctagtagaagttagaaagaaatgttgaagtgtgtatgtgtgtgtgtgtgtgtgtgtgtgtgtgggcatcagaatcaccttggacactttaaaaaacaatgcccttgggtgggcgcggtggctcacgcctgtaatcccagcactttgggaggccgaggcgggcggatcacgaggtcaggagatcgagaccatcctggactaatgcgaagaaaccccgtctctaataaaaatacaaaaaaatgagccaggcgagggagtgggctcctgtagtcccagctacaggggaggctgaggtagaagcgcatgaacccgggatgcggagcgtgcagagagctgagatcgtgacagtgcactgcagactgagcgacagagcaagatccagcgcaaaaaacaaaaaaaaaaaaacacaaacaaaacaaaccaacacacaggcacaaagagaataaaaaacaaaagaacgcaaaggcgacaccaaacagcaagaaaaagagaataaaggacaaaagaaaacggagcagaaaaaagaaagaacacacagacaagaaacacacgggaaaaaagaagagagaaaacaagagagacaggacaaaaggcacaaagagaaacaagaaagaaaaaaaccaacaggtaacaaaagaaacaaaaaaaaaaaaaaaaacgaaaaaaagaaaaacaaaaccaaaacaaggcaggaagcgagagaaagagagaaacaaagaaaacaaagaaacaaaaaaaaaacgagagagacaagaaagaagacagaagaaaaaagagaagcggagcaga

SEQ ID NO: 588401 - DNA, 201 bp, Homo sapiens
  misc_feature (4)..(4): n is a, c, g, or t
  misc_feature (178)..(178): n is a, c, g, or t
catntgatattgtttgggatttgtgcccccaccaaatctcgtgttgaattgtaatcgccagtgttggagggaggggctggtgggaggtgcttggatcacgggggtggacttcccccttgctgttgttgtgatagtgagtgagtctcaggagatctgtttgtttaaacaatgtgtagcnaccttccccttctgtcgtcttct

SEQ ID NO: 588402 - DNA, 390 bp, Homo sapiens
  misc_feature (47)..(47): n is a, c, g, or t
  misc_feature (66)..(66): n is a, c, g, or t
gccaggaaacggagaagggtaaaattgaatgaggaattaagcaactnggtgacatccaaataaaantgaggagccaggaactggtatgttaacatactaggtcagaaatcacggctgggagcggtggctcatgcttgtatcccaacagcgaggccaaagcgggcggatcactgaggttaggagttcaagaacagcctggccaacatggcgaaaccccatctgtactaaaaatacaaaaagttagccgggcatggttgcgggtgcctgtaatcccagctactcaggaggctgagacatgagaatcacttgaacccgggtggcagaggttggcagtgagccgggatcacgccactgtacttcagcttgggcgacacagcgagactctgtcgc

SEQ ID NO: 588403 - DNA, 233 bp, Homo sapiens
  misc_feature (196)..(197): n is a, c, g, or t
ctctatgagggctgtgtgtactcccaacaaaaagatgccttcagggagagaactgaaggtattttctgtaagcaacctgcagcctgtggagttgaatgcagaggagacataatatactaacattaggcttcatcataatcacattccttattctaaaagagttcagaagaaatcatggtggacggtgtattgcccnnccctagacacattttccctctcaaatcttttataaa

SEQ ID NO: 588404 - DNA, 1037 bp, Homo sapiens
agcgaggctgaggcaggagaatcgcttgacctgggaggtgcaggttgtggtgagccgaggttggcgccactgcactccagcctgaggaacagagagagactccgtctcacacaaaaaaaaaaaaaacgcttagttggggttgcagaggcattgtactgggtgtctcctcagctactggggaaagctgaggggggaggactctctttccacccagaaagtttggaaaccagcctggggcaacgttagttgagacctccattttaaaaacataatttaaagattacaatgaagagaatacctccatggttcaaccgtttatgtccttctgggatgtactgataatgcggggaactttcaagggcggtagtagtaactcattgtgaacgcttgtgtgtgcccatttacggttttaacccttgtgctggggcggacactggtaccctctttagaaagcattgccccatttattttggaaacggggaccgtattaacacctacgctgacattattcacaggcggcggaacacacttttgctgtgtaacccattttactatttactgacgctgtgaagggttactctgtgtcgaacattaccggaaaaagatcgtaggttggtgctggatatagtggaattctagatcaagaacgatcttttttccatgtcctgggcagtaattttcaccaaagttacgtgggcaacgggcaacatttgtagaagggtgtgggacaatctaaaaccttacgccaggttttcttgtaagggatctgtgatttcgacttttaaatgtgcaagactgggtttgaccccccggtgaatccccgggtgatggttcctttccaaaaagaatacgtccttaacggggagtgatggtaataacattgaactttgggattccacggacaggggtccagttagggtagggtctcaaaatatattggggtaaatgggggggaaccattagaataggatacggtaaagaaattacgggagagaatttgtcaaataatgtcaagggaattaaaaaattgtttaata

SEQ ID NO: 588405 - DNA, 364 bp, Homo sapiens
ctattacgtaagacacaacagctctataaactttgattttcctaaagatcttgatgagtcgtctttaactttttattatgaaaaccttcatatattggccaggtgcagtggctcatgcctgtaatcccagcgctttgggaggccaaggcaggcggatcacctgatatcaggagttggagaccagtctggtcaacatggcaaaaccccatctctactaaaaatacaaaaattagctgggcatggtggcgcacacctgtaatcccggctactcgggagtgtgaggcaggagaatcgcttgaacccaggaggcagaggttgcagtgagtcaagatcatgccacagcactccagcctgggtgacagag

SEQ ID NO: 588406 - DNA, 773 bp, Homo sapiens
gaatctggcgttttgtgtgtgtcagttcagtctaccgtattatatggatatatgtcttatcttgaaaaatattttaaattcacttgtttttttttcccccccagtatggctgacaaaattacacactggtacctagtatgaatctgaagtagaacagaattttatgtgtgagaatgtggatgaattatcatgcttttttttcctccccctccccctttctccttccatgcatgcagtaggtatggagcatccacttggttgccagttattttctggatgctggggaaaaatttcctgctattctggagcttatattctggtgagcgtaggcagttaataaatagaaagtaaataaataaaataaatagtacgtcaacatgatgataagtattcatggagaaaaagcaagagagttaaagacgggagtgtgggggagagaggttgcagttgcaaatggtatagccaggaacaggaaatgtataaccttggtagttcctgtcatggagtcacacacaaagagtcctttctagggacttacctacgggagcagcatgtaaatgcctgttttacgtcacgtggactaataactccaggaagaatgtcctgttcactggtcttggaatccttttcaatattttgatgtacctctttaagaagtgagggtccgtatcacctgttaacttgtctcctttcaagtaatcattcctttatcctaaggtcttatggtggttaaaacattaattttcaggggtccaaacatttttctgggttcc

SEQ ID NO: 588407 - DNA, 330 bp, Homo sapiens
gagacagagtcttgcgctgttggccaggctggagtgcagtggtgtgatcttggctcactgcaagctctgcctcctgggttcacacgattctcctgtctcagcctcccgagtagttgggactacaggcacccgccaccacgcccggctaattttttgtgtttttagtagagacgggatttcactgtgttagccaggatggtctgaatttcctgacctcatgatccacccgccttggcctcccaaaatgctgggattacaggcgtgagccgtggcgcccagcctagcacatttttcttttttgaaatggagtctcccttctgtcgtcttctc

SEQ ID NO: 588408 - DNA, 308 bp, Homo sapiens
ccgctgtacagttgcggacgtgagctggttggacgaggggagctggtgggcaggtttgatcccagggctgggaacggaggtgtagctggcagagtgggcaggtgaggacccatctgccgggcaggtgagtccttccctccccaggcctcgttatcccagccttctgaaaaagggaggttacggggatcgagggctggcggggagaagcagacaccctcccagcagaggggcaggatgggggcaggaggaagtagcaaagttgacatcttctcggggggagccgagacttgcccaactggtacggcggg

SEQ ID NO: 588409 - DNA, 461 bp, Homo sapiens
aactgtggtttatccatactaggaaatactacttagcaataaaaacgaacaaactgggtacaggcaccacgacctggatgaatcaccagggaattaggctgagtgaaaaaaaaaattgcaaaatgttgtctactaaatgattccacttatataacactcctggaatgccaaaactatagagatgaaaattaataattgctgtgttaatgaagaagtggaaatgggagggaagtggctgtggctacaaaagggcaaaatgagggatattatagtgatgaaagtgttctttattttaattatatcaatgtcaatatccagactgtgataatttactgtagtttacaagatgttatccttgggggaaactgggtaaaatgtacatgagatatctctgtaacatttcttaaaagtgtctgtgaatcaacaatgatatcaaaataaaaagtataatttaatacagc

SEQ ID NO: 588410 - DNA, 146 bp, Homo sapiens
attttccaacttttccttttatgataaattgatattattattattcttattattttgagacagagtctcactctgttgcccaggctggagtgacaatggtgtggtctcggtcaccgcaacttccgcctcccgggttgcagtgagcc

SEQ ID NO: 588411 - DNA, 1165 bp, Homo sapiens
  misc_feature (527)..(527): n is a, c, g, or t
taaaaggtgcttcttttataatgaaacaaatccaaaaaattgtacagtcaggctcaatttgtgcagtttcacaagcttggaggaaacagacagaacgacagcgtttcaggacagctcagagcttaacccaaaacgaggcttggactttgccgccagggggattactctctggatggcactggggccggggccaccgggctgggcacaggcgcagaaggccacgggctttctctttcacctcgtgccccaggctgtgccgtggcaagttcgtggtgctccacattttctcagtgaattatcacctttcttccctttcagaattctaagaaagtctccggaagccttgctttcaaaaggagttccctctcttcgtgcagccacaaagtgactcccaaaggtcttctcccctgtgccaccactatacaactgtgtgtgcacctgtgctgtgcacttgtggccccaagaaagcttgtagatttacctatctcaggtttgtctcccccaaagagaatttatttacagaggcncaatttgtgttactttcctctcaacgaggtgtgtccctagatgggcgatctcatatccaaaacacctatatagtgacaaaactttggtgatctccaccacacaccctgtggaagggcccggaaaaaaatctcggggagcgcatattctcccatgcagatgatgaggaggttcaaaatctcccttttgaaacggcgtggtgagaatcgatgggaccttttggcgcgcccagaaagagacgccgaaggaaaagagacgatgagcccgccacggaaacccagaacaaccggcctacacaagcgggggtacggagacccccagaggagagggccatgatagtgagaaaaacctcacaacacacgcaaaaaaaaagccgcggatccttcacgcgagagtgccacctgcatcctaccccgtgggtcaccagaacttccccccagatatatgtaagtgatcatttagccacgcggtatgcctcaaggccccattgcaaagtttacacacgtgcgccctattggtagctcaagttataactagcgcgcctcacttggagacattcccccaatatatatatatgcgcccgaaatatatacgggaaagagtttataccaaaatatgggacacatatttttgcaaaaac

SEQ ID NO: 588412 - DNA, 315 bp, Homo sapiens
ctcattgcgtgacgctggtgtggctgcatagcgggggtcttcgagaggctcttcgtgtggctcatcgactggctcgtggatgtggactcctggcgtggcacgtcgagaggcccatggtgtggcacgtcgcggggctcctagtgggcgcatggggtggcacgttgggcggctcttcgtgtggctcctcgggtggctcatggtggggctcttcgggtggcgcatggtggggcccattgtgtggctcttggggtgctccttggtctcctgtgagtctgccgtctttggagtgtgtacttgaggcatttcctccacgcg

SEQ ID NO: 588413 - DNA, 174 bp, Homo sapiens
gaggatctgtgctttggagtgaggaggaggacgtatgagcccaggagctgagacagctgggaacatagagaatcgtctcaacaaaaaaaaaattttagccaggtgtgctgtgagctgtagtcccagctacaaggtgggaggatggcttaggcctgggtgattgaggatgcaatg

SEQ ID NO: 588414 - DNA, 781 bp, Homo sapiens
  misc_feature (480)..(480): n is a, c, g, or t
cctaggcgtggactgcaatggcgcgtacttggctcactcgcaacctctgcctcccaggttcaaggaattctcctgcctcagcctcccgagtagctgggattacaggcgcctgccaccacgcctggctaatttttgtattttaagtagagatggggttcaccatgttggccaggctggtctcgaactcctgacctcaggtgatccactcacctcggtctcccaaagtgctgtttattacaggtgtgagccaccgtgtgcggcctcagggaattgaacaggttggatttggagacagtgagttaaaacagaaataagaaggtggcagacaaagactatcagactgaaatgtgttggatattgatatccccccaggacctcccactgtggccatggaggctcgagactcatatctgttttattcctcttccccccccccccccccccccctccccgatcttacccccccccccactacgcaanattgtacccttcgctccccccctctcctcctactgtcccgtgctctgttcttcctctctcctgctcgtttactccctcttatctcctctccttcgttcttttcctcttgccctctcccccaccctccttgacgcccttctcctctcacccccgccccgacatctactccccacaccttcctcacccccacgcccatcctcctcctccccccccccccctcccccgcctccctccttcccccccccccgtttggcttcccccccctcacaccactctcttatttctcatctcactctaacaa

SEQ ID NO: 588415 - DNA, 138 bp, Homo sapiens
cagtgttctacaatgaagcagtaagaagaaaagagactcctgatagttcaggatgcttcatgcagagggcggcattatatacctagtggtctattctgatggtcagttttattcccctcctgagatccgaagcaggat

SEQ ID NO: 588416 - DNA, 391 bp, Homo sapiens
cggaatcttcggagacaaaatcaatatacaaaatatggtagcatttttatacaccaacgacatccaagctgagagcaaatcaagaatgcaatcctattcacaattgccacaaaaagaataaaatacctaggaatacagctaaccagggagatgaaagatctctacaacaaaaattacaaaacactgctgaaagaaatcagagatgacacaaatggaaaaacattccatacttatggataggaagaatcaatattgttaaaatggccatactacccaaagcaatttatagattcaatgctatgcctatcaaactaccaataacattcttcacagaatcagaaaaaaaagcatgaaaatttatttgaaaccaaaaaagttccgttgaagccgt

SEQ ID NO: 588417 - DNA, 397 bp, Homo sapiens
gtaagagatgggcaaccaattcggtgatgagatcggtgtcctgcagtattgttagctggttaggcgtacggcagtactattggttgaatgagtaggcgtgatggttttgataataactagtatggtggataaggggtgtaggtgtgccttgtggtacgaagtgggctagggcatttttaatcttagagcgaaagcctataatcactgcgcccgcttccatcaaggggcatggccatggctaggtttcatcagcatagtagggtggttggtgtacatgcagtgcaggcaggcagtccgcaggcggttcagttgtggccaataaaaatgcattaggctcctagtatacgagctccggttcgtcctttagtgtcgtgtatggttatcatttgttaagagg

SEQ ID NO: 588418 - DNA, 283 bp, Homo sapiens
gctgtcggatagcgggtgaacctcaagcccaacctgtcctggtcccatgacgtcagcggctacggccccacggcattttcaacgaaggcgccaagcgatcagcgtcggcgtggacgcggactaccgcaacacctacaccgcgagcctgagctacaccgactttttttggcggtgactacaacaccctcaccgaccgcgactttatcgccctcagcttcggcgtgaacttctgacttggtttaaggaaggacaacaacctatgcgtaagctatttgcagtgatg

SEQ ID NO: 588419 - DNA, 264 bp, Homo sapiens
tcacgctttatacttctcaacgctttatactctcaacgctttatacttccgtatggaattcaagtataatattaagtatgcatggagaagtataaagcgtggggaagtataaagcgttgagggggatgcagcgtagagggggtggcgggctagtagagtggcagggatggatggagaggaatggagggtggagcacaacgacgtgtaggggatattgatgaggtcacaatcatgcaagtataggagcagtataagggtgttaca

SEQ ID NO: 588420 - DNA, 559 bp, Homo sapiens
gtggttcaatgccagaattctttcatacttatgacaagaaagtttaccaagcaagagaatgggacaacaatcagagagctttaacggatgagtggactcagctggatatgtcctactaggaacttgggcacttaacggaaagcttcataaaagccatctggagtcggactaggatctgaattgcacgcggcttgaatttcgatctatctccatgtacaactctggaacagtctttaacatttaaccgccgcgacaccccccacaacacggggcgcatatctcaccaccctcaaacccctttttacacacaacgcaagaccacaagcagcattgtacctttccccactggggcaacctcggcggcaccgccaacggcggccaccacggccaatcaccgcacaccggcaaccacctatcaccacgtggcgcggccacaccattccacccatccccccgaggacaacggtcgcacaacggcctaatagaccacctaaacgaacattgtggggcaacaacactagtgctccccaatacccgccacacctttactctcgggcct

SEQ ID NO: 588421 - DNA, 215 bp, Homo sapiens
gcaattctcctacttcagcctcccaagtagctggggattacaggcatgtgctaatttggtggtttttaatagagatggagggttttcccatgttggtcagggctggtctcaaactcctgtaccttgagtggatcggctcggccttctaaagtgctggaattacaggcatgagcaccatgcctggccaggacatgtgttcttagggcatgctatgc

SEQ ID NO: 588422 - DNA, 762 bp, Homo sapiens
catggtggctcaagcttgtaatcctatcattttgggaggccaaggcaggtggatcacctgaggtcaggagtttgagaccagcctggccaacacggtgaaacccctctttactaaaaatacaaaaattagctaggcatggtggtgggcacctgaaattccagctactcaggaagatgaggcaggagaattgcttgaacccaggaggtggaggttatagtgagccaagatcacacgccactgcactccagcactccagcctgggcgacagagcaagaccctgtctcaaaaaacaaaaagaaacagaataaatattttaggctttgccagccatacagtctctgttacaaccagtcaactctaccaatgcaacacttaagctgccatagacaatatgcaaatgaaataaatgtggctgtattccaacaaatatttataaaaacaaaggaggtccagattttgacccgtagactgtggtttgctgacccttaatttaggtctaatttccaacgtacagacaacacgagggacagaaaaccatgttaaatactatagagatgtacattagaaaattcacatgtgaaaaaccattcagacaaatgaactacctcctacaaaaaataactcgtcatggtacactaaagaaatcatgcagtaaaaaattcagacatgtcagccaattgcaatgtgtggaccttaacagcaaactgaaggtgacagacgaacagtcagtgaatctgacagacggatccacttgcactataa

SEQ ID NO: 588423 - DNA, 1037 bp, Homo sapiens
cgcctgaacgcaggcacatatcttcctattctacgaccctagataggcttcccttccccttacgtcatcgcagcgtaagtttacacatcactaacatccctaggctcatctaagactattctatcgtactcaccgctcatctgcccagagaagctatcaaatctcgctgatgccagacaacgttaagtatgagctagctttacagcaatagcattttataggtaaacgataccgtctttcacggtactccgaattatggactcccttaagagcccagtgtcgaagacccccatcagctggcgtcagatagtacttgccgtcagtactctctgaagagctaggcggctataggtagtagataccgccgtcacaactgcattactcaatgcccctgacataaaagcacatagcctaccccttccttgtactatccctatgaggcatagattgatagacgaagctccatcatgccttacgacaaacgagagctagaaatcgcctcattgcatacatcttcaatcagccacattagccctcgtagtaacagccatttctcatccaaatcccctgaagcttcatcggcgcagtcattctcataatcgcgaacggacttacatcctcattactattctgcctagcaaactcaaactacgaacgcaatcacagtcgcatcataatcctctctcaaggacttcaaactctactcccactaatagctttttgatgactttctagcaaagcctcgattaaccttcgccttacaccccatattaacttatggggagaactctctgtgctagataacacgttcttcctgattcaaatatcactctcctatttacggatcagatagtagttacagcactataatcctctacatttttaccaaaacgacaagtggctcatcacccaccaatttacacgtaaaacctattcacagagaaaacgccctatgttatatacacattcccatatactttaatctaaccggatataacggttcccccaaaaacaacaatcaaaaagtttcacatgca

SEQ ID NO: 588424 - DNA, 919 bp, Homo sapiens
gtactgggcggggtctggggagcgcagcaggccatggaagccgtctctgctcaacaagggccaagatgcccatcctgggtgggtacctggaagtcccctccaggcaggtgactgaggcccgtgaagtgtggccatgtgacgtcggtataccgccacatcgagtgtgcccactgtgtcccagaatgagaatgagcgtgggggtgccccattcagggagaacgctcagtgggagcaggttgggtgaaagcgtgaaggagcttcttcatcgtcaggcaagctgtggtgcatcgttacccatgagaaggccctggtgacagggagcctgccaagaaagaacactcagctgaccttgaaggctggacactacctggaccttctactcttatacagtggccgagtggtttaaaagcctggagaagggaattttccccatttggatttgcgttcgggcgcaatgtgtggtctccccagtgacacccaaacatttctggaacactgttggcgggccatggaagcacgctgtgtgaatgaagcgcttgctgaaagctatgtgaatcttccaatttcaaccatctccagcgtggggatgctctaagacaaacctgcttgaatgtatacaggtctgcggttaccccatgttgtgttgcacccatatttcactcagggggacgttatccagtcttggcgtccaagagctcggggtgaccgctaagccgcttggttcctgagaggcctgggcaagcccgggcctttctccgggagtccgggccagggttcggccagcataattcagccgttgtcggcccgcggctgtgggccccttgcccgacgttggacctggttgtgctggcgggtcccctcacacgggggggtgggccccgccccagggggcgccatttcctttgggggcgcgcggtga

SEQ ID NO: 588425 - DNA, 858 bp, Homo sapiens
cccgtcgccggcagcgcaggacactggcgccgagtggtggggcgcgggcgtgtggcgtccgggtgtcgcgggtgcgcgcaggccgtgatgtgtgcgcttttgagagtcgcgggcggaacggagcccggccgtccgccctggcggcagtgagcctatcgatccgtcgccatcaccgtcttctctgcccgacggcctaccttcttccaacgtggatgtacgcgcaggaggccgtcaaggaagggctctgaccgcggttggtgttcgacggaacgagacgattgttgttcttggttgtcgagaacgacagtcagtgcgctcaaactgcaggatgaaagaacagatgcggaagatctgtgctttggcatgacaacgtctgcatggccttttgcatggcctcacctgacgatgcaaggatagtcatcaagctagtggccctgggttggacgtgccatagccacctggctgactgtcggagtgaccccggtccactgttgcgagtacattcacccgctacatctgccaagtcttgaatgcaacgttatacgcagagcaatgggcgcagcgccagttttggcatctctgccctcatcgtgggtatctgactttgatggcactcctaggctctatcagactgacccctcggtgcacataccatgcctggaaggccaatgccatagagccggggtgccaagtcacgtgcgttgagttccttggatgaagaactatacgtgacgaagccattgaacacagatgattctgacccattaaacgctggtgatcaaggcactcctgcgaaattggttcagtcaggtggccaaaacattgaacttgctgatcatgagggaaaacaatccctca

SEQ ID NO: 588426 - DNA, 824 bp, Homo sapiens
aattccatactcggcattgaaccatactaacttgtaggcaatacgaattagatctccacgaaagtttgatactgcctccacgtatcttagtgctctagcaagcgtaataatccatgtgattggcatggtacagcttatgaagcctagggtctgattaaccattctgatcgcattctacgccggcttcattaattcacactgttccaagttgacacttaagtatgcccgagaatccgtaagttacatggtaggcactgagcctagtggaggtcaaatcagtctggtgctcctcatcaccagatcttgaacgtgacctgtcactacaacacattataagccttagcattacaagacgataaaatcgaatcaacatacatccaagtgtttatttagaatgagaagcgcagtgataacatatggtatactatagatatcacacgtggtgcattgtatttggccaagatatatatcattaatatatgttagacctctaaagtctgttcaagtagaactgatctagtgtataatatacctggttagtctggttgtatgtatatgttaatataattaaaactaataaataacacatttctattgtagttgagaatgacgaattcatggggtcaggttcgtatgctccccttaatagaaggactgacgtcctaaattaattatattggagtataacctatatttcattggtagaggactaggtggaatgttattctgtaaggaaagataatgtataactaaagaaaaatatactttttggctattattaagggaagttggtttaaatggagaaaacccgttgttattgattg

SEQ ID NO: 588427 - DNA, 121 bp, Homo sapiens
cggctaatgagaggtatttgggtcatgggggtggatcccacatgaattctggcttgcgcactgttagggtccttctcatggatcttcatatgtctgtgcatgttcccacttgcgatatagt

SEQ ID NO: 588428 - DNA, 134 bp, Homo sapiens
ttcttaaaagaaaaaatgaaatgggaataaatattatgttctaggattcctgaaaatctaggataggtgagcttctctgaattcagtatatcataaatgaagatgttttgccccctgccatatcattcccaaag

SEQ ID NO: 588429 - DNA, 172 bp, Homo sapiens
ccccggctcccctgtgtggcgcattgtgtggctccttgtgcggctcttcgtgtggctcgttgcgtggcgcgtgggggtcgcgtaactaggtagcatgccagagtctcgttcgttatcggaattaaccagacaaatcgctccaccaagcgccacgcaacgagccacacgaaga

SEQ ID NO: 588430 - DNA, 411 bp, Homo sapiens
ttcaacttgtttccgttttttaaaaatatatataaataaaacagttacccaaatcctaactccaaggaatttcagtagttctccagcactttcatcttgcaactctgcatcatattgtaaaaaagaaaatgaattaatgctgtgtaagggaaaatttgtccttcaaaggaaaactatacattgtctacacataagcagaattatgatactatggaagctattttacatctctgtaagctgtagataactgatagtgatgcaaaataattattgcctgtagaaattctgctaagagtcaattgactttcctcccttctgtggagaagctaggattctcttttgaacctattaaacatctacttagttccctcattaattaaagagttaaataaaagctttaacaactatctt

SEQ ID NO: 588431 - DNA, 613 bp, Homo sapiens
ttatattctggcaagacagaaactgatcagatgcatgcgtatgaaaggatggtgcaggcagtcgcaggccgggagcagggctgagaggctgcaggatcacagtggacagcgtggcccaccctagggaaggcactgactgattggaggtatgcaggctaaccaagcgggaggctgcatgtcagaaggagggaggagagctccaggacaatcacaggtgatcatgatgggctgggcgcgtgccggcgtatgcagatacccactaagcacttaacttgcattattttatcatcttcaaaatcccttgccggagggagctgttatagtccccatttttcagaagagaaaacagagacaaaaagcagttgagaccacagagccatgacatgcagtacaaggccgtcggctttccagggtcccctgttaaccacagcctagcgtgcccatccaaggccggcccatggtggccagcttgcacagcaggttggatggcagggccagtcatggggaaggagggcactaacagagaaggtctaagctgagacaccagtgaaagatcctagggcaacaggcaacactgccgcgtgggaattcttctgtgctatgtactaagaat

SEQ ID NO: 588432 - DNA, 387 bp, Homo sapiens
ttataggactcattctgaccagtttctggtggcattcaaaaaagtgggaaaaaagccccccacttttggaaatgggtcagtcattgcccttgaattactaaattctggatatgaatttgatgaaggctccatcatctttaataaattcaggtctgtcatctcctataagacagaagaaaagcccatcttttcccttaaaaccgttgcaagtgctggtaaggagttttttctatgacacaaattttttggcataaagaatggaaagatttgtacactaaggcagacagtgtcaaaatatctggtggtagctaaagcaaatgatttggggctgtttcttttttaaatggaatcttacagcctgggcaaaagagcaagactccgtctcca

SEQ ID NO: 588433 - DNA, 887 bp, Homo sapiens
ggtcgtttatatgtctatattattcggctatatagatatcgccggccgcatacagtttattgcattctattttctggtggtgaaaaaaatgtaacatacatttatttagcacgacattgtgaaatacacaaaacatgttactgagaaagcaggaattttctattcctagcccgtttctgaggacgaaatcatgaaccgctcccaatgtgattaattatttattatcaatagtcgggcaccaagccgaagatttttttattttttcctctcaatttaggcagttaatcaccattttctttcatgtccttcacaacattcaattcttccatcagctcccctttatcatacgaaagtagggtaatttaagctcttctaatcatacttatttcgttgcccgacattttatatacgacaattatcgaatgttccatattacaaaacattctattgcgtatttttcaaaaggtgtataagtgaatcctattgattttatccgtctgcgatatttattaaatatccttgttaatccctcatgtaagcttctgttaacccctttctgtaatgcggaaaatctagttaatgtctgtctcttttcctgtatacgtataggacgttctttttttaatataatgatatatttagaagtgtcaaactagaatgcttatatcgttcgtcctatatttactttttctaccttattcggttaattcttcagtagctgaatagctttaatccccatgttgcctaatttgagtatcgatccccctccccctgatattcgccgtccagattaaacgtgtaagcgtgtaactaaaactcttattacatggcaggagatattttatcacattatatcacttctgtttcacgctgtacatttacgttta

SEQ ID NO: 588434 - DNA, 174 bp, Homo sapiens
cagctcataacgcttagcctagccacacccccacgctaacatctattgattaacctttatctactataacgaaagtttaactaagctattctaaccccagggtttggttcaatttcgtgcctagccaccgcggtcacacgatttacccacgtcaatagaatccatcggttcaat

SEQ ID NO: 588435 - DNA, 552 bp, Homo sapiens
tagaggatccccacaggtggatgcagtgggaggcagagctacatgagctcatcctcaggttctgtgtcaacgtcccgggccaacaagacctccgacaggctagtgctagatgagcttactcatcatcccgctcggtgctcaccctgtggccaaatacttggggtcagtcgacagtaaatacagtagttccttccaggattctggttggagagatctgttcagtcgctcggagaccaccagtgtcagagctaactggccgtggcagggagggtgatgcagtacgtcaacggggcagcactacgacacaccagcttcgcgtggcctgaagccatgctgactggccggcgtatgatacctgatgaagactcctatcagaagtttattcccttcattggcgtggtgaaggtgggtctggttgaagactctccctccacagcaggcgatggggacgattctcctgtggtcagccttactgtgccctccacatcaccaccctccagctcgggcctgagccgagacgccacggacacccctccctcctccccatctatg

SEQ ID NO: 588436 - DNA, 169 bp, Homo sapiens
ccatctgctacgggaggctgaggcaggagaatagctggaactcgggaggcggagactgcagtgagccgagattgcaccagtgcactccagcctaggtgacagagcaagagtccatcttaaaaaatgaaaaagaatcaaattagtaatcgtggtcaacacagccctgtgt

SEQ ID NO: 588437 - DNA, 120 bp, Homo sapiens
cataccaccctgagcgcgccctcgagtgccgccggagtggggaaactattaaatgtgattctatatttaatcaaatacctaactgggaaaataataaagattgagtaatggggagacact

SEQ ID NO: 588438 - DNA, 805 bp, Homo sapiens
gtacctgacggagggcgaccagaatcgagagagtacagtggtcataattccagataagagaatcgtgaccctgaatcgataaagtggtgtccagttcccgacaccgggccgcagagcgggcttctcaggcatcggatggagcatatggtgcgaggctcccggaagacgccagaggagccactgaggtacaaccagaagcgcccggcaaccgtgccactgcaggtgagctgggacctgggaggcggatgaggaaaactcagagacccaggaagaagacgatcacttgcgagacatcaaggaagatggcaccaatgcgaaggccgggagggctgcagttcgctgtcactggcgaatagagactgtgcgtgccgcctccggctgcctatgctgcgcgagatgagtagtggatggcggggccttaacattcgcacggtctgtgtccctccagggatacccaccaagactcacacgtgccaagcaactcgatggcaacatgccagacgacacgggtcgtcagccacagggccatgggggcaaccgcctcaaacccagtagcgcgctagaaaggtgagccccacaagagtcccaggcagcgaactcatggagtgcgaagcactcgcagcgggccacgacacacagcatccagggctactgcaaagagagcggacactgactgaaactgactgcccgcccgaatcgacgaccacgggccgcctgcaggcacacaccgaccgacgagcacgaggaacgcctccgcgccacaaggtcccacagggcgaccccgcgccctcggcccgcgcaactc

SEQ ID NO: 588439 - DNA, 821 bp, Homo sapiens
gtcagcctcccacgtagctgggaccataggcgcacaccatcatacccggctaaccttttgatttttgtagagacggggtctcactttgttgcaccgggctggtcttgaactcctggactcaagcagtcctcctgccttgacctcctaaagtccttgaattacaggtgtgagccacggtgcctggcttcaattaatttgtgtctgttgatttgtatcttgcaacttaactgaatttaatttatttatttatttatttattttgagatagagtcttgttctgtcacacaggctggagttaagtggcacaatctcagctcactatgaccttcgcttcttgtgttcaagctattctcctgcctcagcctcccgagtagctgggattacaggcacctgccacaatgcctggcttaatttttatatttttagtagagacggggtttcaccacattggccaggctgatctggaacgcctcacctcaggtgagccgcccgctcatactcccgaagtgctgggacttaccgatgtgagccacaaagtccaactgaattcatttgtcagtccaatggttcgggactccttagggttcctaattattagaatattttcgttaacacctccggttacttagcttctatttggctccagtccctgcggtggagtacagaggggcccttctgggtggctgcgaacttacttcacgtgatacactgggggcataaaggcgagcccatttaacaaattcccagttaaccgcgcactagagggccccctgattcgagacagccgttcgtaaaaccggcgagccgaccccgcacgacta

SEQ ID NO: 588440 - DNA, 298 bp, Homo sapiens
ggtcatgtatactcttagacccactctgttaaaatatatattctatgtatgcgtatatgggattggaatgtcattattgtaacctaaaaagtgctttgaaatattgatggggggaggtttattggggcaccagatgtatttcagcccaatggcccctcccaaaaagaaattggttagtaaaagcttcgttatacatttgactaagaaatcacccagctttaaagctgcttttaacaatgaagattgaacagagttcagcaattttgattaaattaagacttgggggtgaaactttcca

SEQ ID NO: 588441 - DNA, 1189 bp, Homo sapiens
agcgcggccgcccaggaccctgcagcagagacagatcgcctgcagtcaatggagaccacggaaggggtgagacaaggaagaggatgtctgagctggagaaggccaatggtggccctcatcgacgttttccaccaatattctgcgaagggagggagacacagcatcaagctgaagaaatccggcatactcaaggagctcatcaacaatgagctttcccatttcttagaggaaatcaaagagcagcgaggtctgtgcgacaaagtcatggaaacacctggacacaatggagacgtgcgaagtgtgacttccacggaattccatggcctcttagtgagccacttggttactactcgcctgccaccgagattctcttgacacactgacggtgaagactctcacacacacgcacgccaaaaccctttccctgctacaccaggacgacgcgtccatgtcatcccagaagacgaggaccagccatagggcctctgactgagccctcagctcaggacgcatgatctctcacagcccgctagtacacgtagcctcccatctcaggcaagcctctgcatctcggccttctgctcgcatcgcaccaactctgcagcaacaccgtcctcttcccacacacgcgcctgcttccaaccgcgcctgccctccacttctttctgcctactactctcaggcctgtgtgtggatacaggcctgcaccttgggcccgccagggaactccttgctttgaaccaggctagaccttcacggcacgaccaggctcctccagctcgcacttggccgtcgtgccacccgcggccaagccccgcccaccgcgccccgactggttaagaaccccacttaaacccccgggagcggaaacccgcctgcccctacccggaaacgttaccccccggaggggcaaccccttaaaaaaccttgcccaacctaaccctccaacacacgaaaccacaaccaccccagcgggataccgcccagaccagaaaggtcgcgccccgcgcccagcgactcccggggcgcacaccggcggcgcaagaacagtcaacaaaagcgaggagcccccgcgccgacgcgtggcgcaccccccaatcacagcgggggcaaacaccggcgctggcggacaccaaccggcaaacgtggggctcccgggcgaaaccggtgtcgcgggcaccaaccaacg

SEQ ID NO: 588442 - DNA, 122 bp, Homo sapiens
gactctagcggatccccctgctccgcccctctctgtgacctcaggcactagctttcggctctggagacagccccagagcagggtgttgggatactgcaggatgtagtagatgctattagcgc

SEQ ID NO: 588443 - DNA, 244 bp, Homo sapiens
aacgtctcacggatctcccacctcagcactcaaggctaattatggtattattatatatatatttttttggtagagaggtagagttggggtttgccatgttgtccagactcgtctggaactcctgggctcaaggaatctaccagccttgacctcccaaagtgctgggattacaggcgtgagccagcgtgcccagcctcagacttcttcttcattcttcttcttcttcttttttttttttttggaa

SEQ ID NO: 588444 - DNA, 1020 bp, Homo sapiens
  misc_feature (4)..(4): n is a, c, g, or t
  misc_feature (6)..(6): n is a, c, g, or t
  misc_feature (8)..(8): n is a, c, g, or t
  misc_feature (10)..(10): n is a, c, g, or t
  misc_feature (34)..(34): n is a, c, g, or t
  misc_feature (184)..(184): n is a, c, g, or t
  misc_feature (194)..(194): n is a, c, g, or t
  misc_feature (365)..(365): n is a, c, g, or t
  misc_feature (553)..(553): n is a, c, g, or t
  misc_feature (611)..(611): n is a, c, g, or t
  misc_feature (1020)..(1020): n is a, c, g, or t
tttngngncnaccctggaatcgggctaaaaaagnaaggagaaatattaataatatatgatagtatttatattcaatataagaataattggaaaaaagaggatatatctctaatagacagctgtaacttaaggggcacagccggaggggagccaggcggataaggtggaaaagaaagtagggaanggttaagganctgtgcgagtcgtcgtccgaaggcaaacaaagaaagatgggaggaacaagcgagcactcacccacaaccgagagggaaacaagacaaacaacatcacgacactatatgagccatattatccacaacaggtgaagagcgcatcagccagatcaagagataccagtgaaacanatcaaatttaaaatgataaagtaagaaggtttagaataggtgctggtgcaagtggatatgggtgagtagaagacagttaatacttaaactaatcacactgcgaccattatctactacatcaagccgtcaaacaccatgagaacgcaatacatcagaccgctataccctaacgcagatgactgagcagncgaacgctcacattactattagcgtaccctcaccgctttctcacgtcgcaacgtcctncgacccagcgccgaagcgctcacccggcctcaccacacgacacccaccgacgccctatcatcggccgccttctcgctgttacagtactctttaacatctgtacatattcttatatgtttattattgagaatcataacaactcaagagcataatcacatcacaacatttaatacaacaacttaaataatcagtatcgttatctatttatcttgtgtctaacttcatcacattcacagacaagaagagagacaatagcagagagatagtgaagaaagtgaagaggttaataatatgtatattgagttatagaagtggagatgtgtgataatatgtattatgaagatgtagatggaggagtataatagtaggagattaacacttattaacgaccgcacagccagcatgagan

SEQ ID NO: 588445 - DNA, 194 bp, Homo sapiens
gtcatcgtctcggtggagctgatcctgtccacgatgatcggcgccgaaatgcgccttgaagcgctgggcgatctcggcctggcagcgcctcgcccggccgaggagcacatgcgcaggctgacctgctcgcgtgcgggcagcagcggcgaggccagcatgcccgcaaagcccgtgggcgcgccgaagaacaccgg

SEQ ID NO: 588446 - DNA, 633 bp, Homo sapiens
gctgatgctgggtgactctagaggaccccagcaaagctctaccaggagctgttcagagaaccggcagagctcacgtgttacgaagctgcgccagcggaggaggagcgaacagctgcagacagctggacgagagatgggaggcaagcagaaactggagcgccacattttcactctcaaacatccagctctccgactcgaaagaaagaaagctgcagggactttgccagcaccgtggaagctctggaagaggggaagaagagggtccagaaggagatcgaagaaactcacccagtagtacgagggagaagggggccgcgtatgataaaatggaaaagaccaagaacaggcttcaagcaggagctggacgacctggttgttgatttggacaaccagcggcaactcgtgtccaaacctggaaaagaagcagaggaaatttgatcagttgttagccgaggagaaaaaacatctcttccaaaatacgcggatgagagggacagagctgaggcagaagccagggagaaggaaaccaaggccctgtccctggctcgggcccttggagaggcttggaagccaaagaggaacttgagcggacaacaaaatgctcaaagcgaaatggaagacctggtcggtcca

SEQ ID NO: 588447 - DNA, 288 bp, Homo sapiens
ccgcgtcgacgcgatccggctgaggcatgagagcatgacaagccggttgaggcagggaagcctggcgagctggttgaggcaggatagcctgtagaagttcccggacccgacgtcattactctgacacaaaacaaataaacactccctgaagcttcccttaggtgaggtgttattctgtaacaagtgctctgagagtcgggaagcaaggtcagggagtgagtgttttaataaataaaagaaacaatgaacacgaaacacaaacatttacattacattttacgtcgacgc

SEQ ID NO: 588448 - DNA, 826 bp, Homo sapiens
  misc_feature (249)..(249): n is a, c, g, or t
atcggcgagagctgcttctcgccactcgccagaactcagtcccgccacagaagcgcatgagagagagactgggatgagcatcagactctgacccagtaccacagctggtctatgagatgccctagtgctgcggggggtggtgggcccaagcttatgggcccccctcagccctggggccacctgacgtccacatcgatgctagcaccgatgatccttgccatatcacaagtgactcaagggcatggtgancgagcgattagtcgagacagattggaccatgggctggtgccagcaccgcaccggtgatggagagaaccgttctaaggtagagtttctcttcccgtcgtccgcatgggaagtggaagtcggatggatgagacggagagccgtcaatgcgcgttatgaatgacattacgaagcatgcgatattcccgtggcacgggcagtaaacctgagcgtggaaatttcgccccaggcgggaatttgtgcgtatctctttgggcagcaaccacatagcatggcacggacgtaggtattccggatcgtaacaggtaactcgacccagagatggcaggttggcggacagccgtcctggctgcggtagggcccagggcgcggcccctgggaagaaaccgagctgagggtctgcctgtccctcatggagactggctggtatgataatctctgatcctggacagtagacggaacgctgatgccaatggtcgagatgctggagtgcaggccgtgattgagactggaaggaggcagcggacaatgatcttcgcatcctggagcaggaggacgaggaggatcaggcacgaaacag

SEQ ID NO: 588449 - DNA, 906 bp, Homo sapiens
gggcatctggcggtgtgagtgtgggtggcagcggggcgggtggccagcagccgccgccacagcagcctcgcatggcccgctcacccacaaagaacctgctgaagcacaagagcctctctctatctatgcattcactgaacctcatcccagccaatccggccccccagtcccagctctcccccaatgccaaggagtttgtgtacaacggtggtggctcacccagcctcttcttcgatggggtggaaggcccgagcaccagcaccacggcccccttcggcagcggtggagccagcacttgcaacagcagcagctttgatgtgtcccaggtgttcggaggcggtgctaacagcctgttcttggagaaatcgccctttgtggaaggcctcagctacaacctgaataccatgcagtatcccaaccagcccttccagcctgtcgtgctggccaactgaccgtcttcccatctgccaggccaggagcacacacgaccacaggcaagtgaaaagaaaggccaaacgcaagagggaaagaaaactgtacagaaagattccagtcttctcattctcccagctaggaaaaggattcgcccaggcacagagtaggaggggctcccaaagcaacaagtgttggactcagccctgactattctgcctgctctgatttcctttggtggttggattttgtaattatttttttacatgtagtttctatatgacaactttattagtggttcccgtgctaagagtggcccgatgtgattgtggtcccgtcctgcgcggccttgggcacgggtgtgacagcccgggaaggaagtaaagggagcggacaggacacgaagaatgcgaaaacaacagaggagaaagagaacaaaaaaagagaacgccaaaagagagaaacagaagcaag

SEQ ID NO: 588450 - DNA, 344 bp, Homo sapiens
tcccaagatgtaggattacaggcatgagccactgtgcggggcccagagctaatctttaaacttttttttacagatggggtttctccacgttgctcaggctggtctccaactcccgacctccggtgatctgcccagctgccgcctcccaaagtgttgcttgcgattacaggcttgagccaccgctcaccctggctttttttttttttttccagaacaaattctcgctctgtcgcccaggctggattgcagtggccgcgatctcggctcactggcagcctttacctccggggtcccagcgatcctcctgcctcagcctcctgggtactgggggggaaacttggcga

SEQ ID NO: 588451 - DNA, 263 bp, Homo sapiens
ccggtaccggtgagcctcctcaggcgaactgatggacattgcccgagacggctacgtctaccgggacaaagcatgggttaatgccggaaaaatcgcagaggaggttgcaaaatcaatcacctggaatgcacaaatatacgaagcatggacttacggtttcgccagcaaaattcattcgatttgcgcaaccatgacgtgctttgacgctgaaatcctgcttatcgcatcaggatttcaaaatcaggatctaagtgaactcagcc

SEQ ID NO: 588452 - DNA, 571 bp, Homo sapiens
gcctggccaacataatgaaaccccacctctactacaagtacaaaaattagccatgtgcttggtgtgctgggctgcctatatgtcccatgctactcatgtgagtgctgatgacatgtgatgaatctgcttgaaccctgtggacggctggagtgtttgcatgtgatgccaatgatcactgctcctaatactctagtacttgtgtgttgacatgatgctgatgacttcttgctctccacgagacagacaaccagatgcatgaagcacacacttgaacatgagtttggccactactatgtgtctaacataaccacgcagtataccgctcaagtgctactacttgcttgctcgtagctaagccaaacgcttcgtacactagctacaaacttggaagtacgcagtggtggttagacagcttttggacaatagtgctaaagagaacgggggggtaactggacaaaaacgataagtaacttaacgtaaggttggccaaagagcgaagttttaaagttcgagataggatggaaagagcaagtggggacagttggggtgcgaattggtttgttggtaattg

SEQ ID NO: 588453 - DNA, 194 bp, Homo sapiens
tactccagagtttcaatggaagatctttatattaaagcatgagcatccttgtgaaggaacgtaagttctcttttgttggcatccactcatcaagttgctatccaaaactacgtcataacagaaggcaccagaaattacaggaacttctggagctctgaccaaattgacgtagttttggataacacgttcgcgag

SEQ ID NO: 588454 - DNA, 281 bp, Homo sapiens
ggcatgcctgagtgatctaaggaccccggctagcggatttggaacgggtgatatgctggatgatcatgagataaggagaggtgatcgtggtgagaagtgcgtcgtatagtcatctactcggtgtagttatccatacccgtctaggggttcagttggcggcgatagcgcggataccagcctcaaactgggaatctcggtctgacgtggaagcatcccaagaaatggcaaaaagacaaaaaaaaacccaaaaaacagagagcgttcacttaatgccgctagcg

SEQ ID NO: 588455 - DNA, 232 bp, Homo sapiens
  misc_feature (43)..(43): n is a, c, g, or t
ccggtttcccgggcccttacctttcctgatgcccctgacatcnatcattcttggggagacaccacgcctgtatgtggtgtggggcgtggatcaagtgtacctgtgaaatccatatatatgaaatgtcctgcgggatacagttttagctgactttttttttactctgaactcttatttgaattgttttttgggcaaatatttctgctcccccagagattgtcctatccaaata

SEQ ID NO: 588456 - DNA, 309 bp, Homo sapiens
tagaggatccccccgcgcgcccttagcccttaaccctgcctactgcttcttaaacttaacttcaggctgggaatggtggctcatgtctgtaatccctgaactttgtgaggccaaagaaggaggactgcttgagcccagtagttcagaccagcctgggcaacacagtgagacctcatgtctacaaaaaaaggaaaaaaagaaaactgctgggcatggtggtgcacacctgcagtcccaagctacacgggagcctgaggtgggaagtcaaggctgcagtgagctgtgatcacgccactgcactccagtctg

SEQ ID NO: 588457 - DNA, 957 bp, Homo sapiens
tgtcatgggtgctgacatgtgttgtctgctatcttgctacgtggtccttgtagcccaggagcttgtgcctgccatgagttgagatcatgtcactgctctcctgcgtgctggacatgtagtcggaagctccgattctccgagaacaaatattcgcgtaactatcgatcatagaaacaatttggtggtttccccatgtcctgtgctgtccggatggactgagcgtactctgaaggtgctagagcggcccagaccagtgttcgccacagtcttgcttgttgggtttatacaatgtgaaccgtcttttgcacgatgcattcactttgtatcgagagtgtcagtctgaactaataagataattggccggttgactaatattgtaggactggtaaaaacgattaactccttcttaccctgttgagtagtacaacacgcggtggtcaaacttgtggcagtgtggttaatccgacagttcaaggctgataacgacgtactgccggccttttgtgggctgcttactgaatgcgtcgccgagatcggccccgggataccatccaaaacagtccgtcattggaataccgtttgtgaggactctttccatgagatagctaatgtaaggcccgtaatgatggttcgctgctatccggggggaataagccgtccttttagagaactggagcatgctaaggtgggtgcggtggtcactgtaacattacccttctaaatgatgtaaatcattccctactccatgaatttcatggggctgaggttgctcacttagcacgcatgggggtgtctctgcacatggcatctagcagtacctttgtaaagccaggagtacacgcgctgggccggagacatctgcgcggtaaaagttttcaacatacaaattgacctgcaggccgatccacctttcgggaacaccgggaccggtaaattcctgtaaacgggtatcccagt

SEQ ID NO: 588458 - DNA, 962 bp, Homo sapiens
  misc_feature (168)..(168): n is a, c, g, or t
  misc_feature (170)..(170): n is a, c, g, or t
  misc_feature (200)..(200): n is a, c, g, or t
  misc_feature (209)..(209): n is a, c, g, or t
  misc_feature (250)..(251): n is a, c, g, or t
  misc_feature (271)..(272): n is a, c, g, or t
  misc_feature (285)..(285): n is a, c, g, or t
  misc_feature (287)..(287): n is a, c, g, or t
  misc_feature (316)..(316): n is a, c, g, or t
  misc_feature (333)..(333): n is a, c, g, or t
  misc_feature (340)..(340): n is a, c, g, or t
  misc_feature (343)..(343): n is a, c, g, or t
  misc_feature (351)..(351): n is a, c, g, or t
  misc_feature (371)..(371): n is a, c, g, or t
  misc_feature (376)..(379): n is a, c, g, or t
  misc_feature (385)..(385): n is a, c, g, or t
  misc_feature (387)..(388): n is a, c, g, or t
  misc_feature (401)..(401): n is a, c, g, or t
  misc_feature (403)..(403): n is a, c, g, or t
  misc_feature (415)..(415): n is a, c, g, or t
  misc_feature (428)..(428): n is a, c, g, or t
  misc_feature (439)..(439): n is a, c, g, or t
  misc_feature (441)..(442): n is a, c, g, or t
  misc_feature (446)..(446): n is a, c, g, or t
  misc_feature (461)..(461): n is a, c, g, or t
  misc_feature (465)..(465): n is a, c, g, or t
  misc_feature (545)..(545): n is a, c, g, or t
  misc_feature (547)..(547): n is a, c, g, or t
  misc_feature (616)..(616): n is a, c, g, or t
  misc_feature (728)..(728): n is a, c, g, or t
  misc_feature (870)..(870): n is a, c, g, or t
  misc_feature (950)..(950): n is a, c, g, or t
ttagattacagtatcaattcacaacatttcataaagccactgtacaaatagaggattgaatcactgtgtaagaaagatctaagaacagttaaatcatgatacaagtccatagtttatatggtttagagctttaagagccttaatctaacacgtttacccttcccatantnagactactactgacattcatgttcagttgnccacgagtntgtacaaatcattctaggtaaagacaaacactttcagaatnntttaacagaaaatatttttnntcaactttaaaancncacttagatgtggatgcctttggctaggnaaatagaaatgcaagtnttcagangcntctttganaaggaaacaatggggtagancgccnnnntgtaananncaaaaggcttgananatctaccaagtntatcactgaagtnctattaattangnnatanatactgtatgatgtnggcntttgttgaatacattttacaccagttgggatatagctttttcccccccgtaatgctgctttatcacaactgttttttacnanatcagcaactggatttttgatagaagacataggagattttttcaacatgcaaacatttgctaaatacanggtgtaccatcaatgtgtgattaataagttactttttaaaataatgtgctagcttagatattctactataaaccatttcattgagtacctattatgtaaccaatattttatnatatacactgaatctgaggcaacccaaaatgaacaatggaaagaaaactagtaaatctgaaatgtacttcacattctacttaatctaatttaaaatataaattcattgtgcacccataagaaagatggtccacctgtgggtntttttaaaattctaacaggagatatcatttaaaatattgcttttcacatggcaaaagggaagaattgaacatatatttanttttaaaaaatt

SEQ ID NO: 588459 - DNA, 801 bp, Homo sapiens
atacagtgacaggcacacctgttgcctgtaccacctcttcctggaatacggaggacgaagttcgttatggactgatccctgaggaatggcttccagttactttatcctaaaactggtgtaacaggaccctatgtactcggaactgggcttatcgttgtacgctttatccaaagaagatatatgtgattagcgcacgagaccgttcacggccctagtcagatactatggtgtaatggtctatggaattaaagagaagtatggtcccttcgtggcacgactttgctgagtaaactcaagtgagcaaaaatcttgcccaactatgaagaggcgaagcaggcttccatccatgacatccagaatgcaattgatacggagaagtcacaacaggcactgtggttcacgcaatgcgccgattaccttgttgatgtgcatacggagatacacattgctaggtggctttggaagtatacttaccgggaacgactgtatacgacgtactataacggacacgtaagagaatcgcctggactatcatagtatctgtgcagaacatgatgcgtcgaaagggaacgaagaacagcgatgataaattggtggtgggaagcacgtggtgcaaagcatctccacaggagcaggaaaaggagacaattgccaaggtgcattggggaactaaagctgcttggcaaagaaggctcgagccacagcagtatgtaaatgtgtctatcccagtggagacggtcagaacagttgctgacaaatgggaatagtctatttgcaagtcttctgtgtcgggtctaatga

SEQ ID NO: 588460 - DNA, 209 bp, Homo sapiens
cgaagccctgctaaccttacgcagcgatcgtatagatccagtgtccgtgccttgcatagactgccctgtccctagtctactctatcttgcctggggcctagttcactcaacatgcactgatgacattcgtaagagacaccatgtaagacaagatgaggactcactacaacgactagatggcatgatgcctggcacattctgtggacctc

SEQ ID NO: 588461 - DNA, 714 bp, Homo sapiens
acatgtgtgaggatgtcagcgcctgtgttgcctgcgggactcaaggtctggccttggctcaatgtgaacatgcacgtccatggatggcgacctcgtccgcgggtttgcattctgggtgtggacgagctgggggttcggtccgagccctgtgtggtgatggctccctggagctgctagcctggtgcccatgcccacaccctgctgcctggctggcacatggcgatgtgcacccttgtgaccgtggaccaatggtgctgcactggtgtgaggagctgctccgcgggtgcatcgaagccttcggtgagtggctctgggagtggcacacggagcctgagcctagccccgagtctgagccctgggtccctgcctcccaggcacatgtccagggcacagccctgacccggacccaaacactgctcctgcagagtgcagtctctttaaacgaaagcctcctccgcaacgcatgggcagagagatgcacgcccttcagacatgatgacggtttacccttctctaggccttccccagacagggctgtgcgaatgggaggggcggtgtcccggaattctgaacacgtatgagtgggagcatttatcgtgtcatcccaggtggaaatccgtgagtgaacttcgctattatccggacatgggacgctgatacccggactaaatggaggggcggattatctgggtgaaagggtgtgccccattaccc

SEQ ID NO: 588462 - DNA, 211 bp, Homo sapiens
  misc_feature (42)..(42): n is a, c, g, or t
gcccggaggcaggcagcaccccattctcatcacccaaccacntcattctgcattttgcggtccaccgtgcaagtttcatcattcttcatcctcacccaggcttcaggcacatcacatctaccccatcattgtcaacttcacgtcactgccggcaaacaaaagcacaccattaggcatcacatcaggtcatgggagggcatcctctcagcag

SEQ ID NO: 588463 - DNA, 455 bp, Homo sapiens
  misc_feature (15)..(15): n is a, c, g, or t
  misc_feature (45)..(45): n is a, c, g, or t
  misc_feature (75)..(75): n is a, c, g, or t
  misc_feature (141)..(141): n is a, c, g, or t
ccccccctgctcccnccccccaccaacactgggccaggatcctanccctcccaaacctttgcccagtcctaatantataaaatgatagctcggtgcctattttggttttgcatttcccatggtgaacaatgaagtttgaanagtttttgttcaaaagtccctttgggagttcgagaccagactgggcccacccaggagttcaagaccagcccgggcaattcagtgagatgttcatctctacaaaaaataagaaagataaaaaattagcccaggcatgtttgtgtgtgcctgtggtcccagctcctcaggaggctgaggtgggaggatggcttgaccccgggaggtggaggctgcagtgagttgtgatcgtgtcagtgcacggctagcctgggcaacagagtgagaccccgtttctaaaataaaaataaaaaacaaaagagaaaagtcaaaaaaaa

SEQ ID NO: 588464 - DNA, 113 bp, Homo sapiens
cacgaggagaaccccaactccagtctggtctgtgatatgtcctcactgtttcaggagcttaactctggacaccggccccctcagatcccgtggatgttgctgcacctggtgtg

SEQ ID NO: 588465 - DNA, 549 bp, Homo sapiens
gcacgagcggcacgagaaagtctccaagaaatatgggattatgcaaaacagacaaagaattataggttttcctgagggagaggaaaaaacaaaaaatttggaaaacctatttgagggaataattgaggaaaacttccctgtccttgctaaaaatttagacatccaaataaaagaagctcaaagaagtcctggaagactcattacaaaaaggacgtcaccaaagaacatagtcatcagattatctaaagtcaatgtgaaggaaataattctaagaacagcgagacaaaagcatcaggtaacctattaaggaaaacctagcagactaacagcagacttctcagcagaaaccttacaaaccagaagagattggggtcattttttagtcttcttaaacagaataactgtcaggcaagaattttgtatccagcaaaactaagtttcataaatgaaggagaaataacgtctttctcagacaagcaaatgctgagggaatttgtcaatactagaccagtgttacaagaaatgctaaaaggagtgctaaatcttgaa

SEQ ID NO: 588466 - DNA, 1150 bp, Homo sapiens
ggaatggagctggtgtcgggcgcaacttgctggcgtctgccgcagatgcgggtaccgctgcagcttggttttctcgggagagagcaggttagcagtgcatcgtggggaacggtgaagatgcttccctaccggatgaccctgtccaagcctggtccacctcacagccttcctgggatacaaggctggcattgactcacatcgctgcggtcaatgtcggacaggcctgggatccaaggtgaacaagaagagagtgtaggtggaaggctgtgaccacttgtatgaagacagccaaccaatggtagggttgtggcgcattgtgcggctacgtgggacaactccgcgtccgaggatctccgtgaacctttcaatgaacatgtcttttgcctagagacaacatcaggtgaatagaactgcaacggacgggcagtatatcgtactacagcaacattggcactaaacatcgtaaccgtaacgacagagcccatttaaccaagttacttgcaacgaacatggcacaggcatgacgagactggccaagaacgccacgactgcgcagacaggaactacaacgccaacgacatgaaacacaaagatcacttgtcgcagagagttcacaattcgccgggtagcatccactttaggcccccaaccaacacgcccaacgaaagtaggcatgcaccgttggacgtttcccattccttggacgcctctaggcaaaaggcaaaccgggccccccaaccaccgttgaactgcggcaggaacttcccgactggactaggaacaccagtggaatgcagtagccaaccttggttgcggtcacccggaacggaaacaagcacgtcggggcacagcttagaggaggcccccccccgagctcggacacgtacacggacggcccttctatggatacgcccaaatgaccaaagcagtccattcacacccgttgagaatttcacacaccctcaacacagtctgtatcacctgggcgtatccaaccacgaaaattgcaacggaactttgacattccggcaacagcataccaattacacgtgcgacgccattgtacccccgcacatgtggacaaaaactagagtcgccataacccaacacaatcgacggtaccaaccacaaaagtaaccaggttcctggg

SEQ ID NO: 588467 - DNA, 117 bp, Homo sapiens
catgctattgctcattgacagctcacctgagtcaccttccaagttgtaccatgggctcctggctctggagggtgggcaagcttctccacattccgcccaatctgtaccggatgttgt

SEQ ID NO: 588468 - DNA, 192 bp, Homo sapiens
  misc_feature (63)..(63): n is a, c, g, or t
  misc_feature (107)..(107): n is a, c, g, or t
  misc_feature (174)..(174): n is a, c, g, or t
ggctcagcagactcctgtaggtatgctgctgtatcctcagttgactcattcctcagttcacangatgttggacaatttctacaattttgacttcatcatttgctgtntctcaggaccagatgacaccaagcccaatctgaaatgttcatccggcaaatgtggttctgaaatggntgactttcgacgactagc

SEQ ID NO: 588469 - DNA, 82 bp, Homo sapiens
caaagaccccaatgaaaaatttttagtcccttttttgcatagcctaaagataaaataggaataaaagttttatatttatgga

SEQ ID NO: 588470 - DNA, 298 bp, Homo sapiens
  misc_feature (206)..(206): n is a, c, g, or t
ccccccgggccccccccccccgggggggtttttccccccccccccatttttgggggggcattttttgggggggggggggtttttcccccccccagggggggcccctggggtttttttgggttttccagggccaaggggcccccctttttttttaaaaaagggggggggggccccctccccccccaaggggagggggggggtttttncccctttttggccccccttggggaaggttttgcccaaaaaggttgggcccccccccccccctttccctttttttaagggcgggtttgcggga

SEQ ID NO: 588471 - DNA, 139 bp, Homo sapiens
cacgtgagggcttgctgatgtgctggtggttgcacctccaacacggatgctccacaggcattcatggccacaccccgtactcgtggccagcagttcctctattgcctctatattttgtggtacgcccgtgactccccgt

SEQ ID NO: 588472 - DNA, 332 bp, Homo sapiens
gctgtgtttcattccatccttttatttgagtctagtgtgttcgagtagatatcgatgggtcttgactctttattcaatttgccagtctgtgtcttttaatgggagcatatagtccatttacatttaaagttaatatgttatgtgtgaatctgatcctgtcattatgatgtaagctgggtgattgtgctcgttagttgaatgcagtttcttcctagcctcgatggtctttaccaatttggcatgattttgcgggggctggttacgggttgttcctttccatgtgtagtgcttccttcaggatcaatcaggttccagcccaaccgtggactagt

SEQ ID NO: 588473 - DNA, 449 bp, Homo sapiens
  misc_feature (339)..(339): n is a, c, g, or t
  misc_feature (341)..(341): n is a, c, g, or t
  misc_feature (428)..(428): n is a, c, g, or t
  misc_feature (439)..(439): n is a, c, g, or t
ttagaagttaggatgaatacatgttacactgttaacttttagcaaattttacttttgttgaaaactttgtgtttgggattttaattatccttcgcaattaataagacatcatttagtccaaattaacttagaattggtatagatgattccttcctggttctgtaagtactttaaggcttggctgagtacaaacagctcacacatttgagcagaccaattattaggcaattttcctaacttcatttctacaagagtttgtttccctattagttactgggatacccatagtgtcttcttccctcagtcacccgggggaaaccatctatcatcctgccctgnangggagttcctcctagggtctgggtcagacctctgtatggggcatttaatttaaggttttggatctcctgtttaggaggacctgctgngtttagggggntttttccgtg

SEQ ID NO: 588474 - DNA, 375 bp, Homo sapiens
acactaatcgcaagaggtctgcttcgcctgtgtagactggaaagaataccgtcttgctcacgatgtgtggctcctattgtgtacatagatgataagacgaactttacaaactactatacaggatcgtggctattttgaagagtgatcacccatttggaagcagcactgggacttgagcgagctccacattggaatgtttacttgaattagctattctatactctaaatttaagcctcagaaaatgatggagcacctggagctgttctggtctaaagtgaatattcccaaggtgctaagagctgcagaacaagctcatctttgggccgaactggtgtttatgtatgacacgtatgaagaatatgataatgtgatag

SEQ ID NO: 588475 - DNA, 107 bp, Homo sapiens
caaaatttttcaaaaaccccccccccccccgggaggaaacaaaaaaggattttttttggggggggcgcccccgaaaatccaaaaaaaaaaaaatttcagccccttga

SEQ ID NO: 588476 - DNA, 2174 bp, Homo sapiens
  misc_feature (1818)..(1818): n is a, c, g, or t
gctgcactcaaccaggatgagaggctgcccggccaatgcagctgccgccccgtctgctgcggaggctttgctttttgactccctggcgacagtaaagttgaagagcttccggccggaggccaatagatgggacccccggaaggcggaagttctagggcggaagtggccgagaggagaggagaatggcggcggaaggctggatttggcgttggggctggggccggcggtgcctgggaaggcctgggcttctcggccccggccctggccccactacacctctctttcttcttttgttgttggggtctgtgactgcggatataactgacggcaacagtgaacatctcaagcgggagcattcgctcattaagccctaccaaggggtcggttccagctctatgcccctctgggacttccagggcagcactatgctcacgagccagtacgtacgtctgacccctgacgagcgcagcaaagagggctctatctggaaccaccagccgtgcttcctcaaagactgggaaatgcacgtccacttcaaagtccacggcacagggaagaagaacctccatggagacggcatcgccttgtggtacacccgggaccgcctcgtgccagggcctgtgtttggaagcaaagataacttccacggcttagccatcttcctggacacctaccccaatgatgagaccactgagcgcgtgttcccgtacatctcggtgatggtgaacaatggctccctgtcctacgaccacagcaaggatgggcgctggaccgagctggcgggctgcacggctgacttccgcaaccgcgatcacgacaccttcctggctgtgcgctactcccggggccgtctgacggtgatgaccgacctggaggacaagaacgagtggaagaactgcattgacatcacgggagtgcgcctgcccaccggctactacttcggggcctccgccggcaccggcgacctgtctgacaatcatgacatcatctccatgaagctgttccagctgatggtggagcacacgcccgacgaggagagcatcgactggaccaagatcgagcccagcgtcaacttcctcaagtcgcccaaagacaacgtggacgaccccacggggaacttccgcagcgggcccctgacggggtggcgggtgttcctgctgctgctgtgcgctctcctgggcatcgttgtctgcgccgtggtgggggccgtggtgttccagaagcggcaggagcggaacaagcgcttctactgagtggcgcctccggcggggcctgtccctgggcccaggagccaatgtgaacttttttttttaccgggattataaaagaacaacaagatgaccttatttcttaactgtttcaaataaatgattaaagtattttcatacattttgcttcttgcccagcagggacaggtggcagagccgaggcttagggtctggcaccccccacagctggagacggaggctctcctggggctggtgtctcaggagcaggggtctgtgtctacagatgggctgtggcccctgcaggcagctgttgaacactggagggtcccccggaccacactggggtgggctcctgaggacgtggggaagtgattttgttttgtggtgtgtggcacgtgtggcgacggataaggcctgaactgggaaacccaggccttcctgttcaccctgagctgcttcctgagacagatgctcaagtgaggctgcaggcgcggtgtggtggggccgagtgtgaccgtttgctaaataaagtgaaatacccttaaaaaaaaaaaatatcttaaatgaaataaagggtggatgtaaaggntatatttctttccccggaaaaaaaaaaaaaaaaaaagaaatcccttgtgggccggggccaagggccaaaacccagggtctgccccccattgaaaccttccgcccggtttccccaaaaaatgtcaaatttttttatagggaaaaggtggaaccctttggttattttaaggggaaaaccggggaaacctaggacccttcccaaatttctattgggcccaatgggggggccccccccgggtttggggaccccggggaaaagggggttattttttttaccgggccttttgccccaatttttgcttgggtgggggttaaaaacaaaactggcttaaaaagccttcagggctttttctctgt

SEQ ID NO: 588477 - DNA, 2274 bp, Homo sapiens
gctgcactcaaccaggatgagaggctgcccggccaatgcagctgccgccccgtctgctgcggaggctttgctttttgactccctggcgacagtaaagttgaagagcttccggccggaggccaatagatgggacccccggaaggcggaagttctagggcggaagtggccgagaggagaggagaatggcggcggaaggctggatttggcgttggggctggggccggcggtgcctgggaaggcctgggcttctcggccccggccctggccccactacacctctctttcttcttttgttgttggggtctgtgactgcggatataactgacggcaacagtgaacatctcaagcgggagcattcgctcattaagccctaccaaggggtcggttccagctctatgcccctctgggacttccagggcagcactatgctcacgagccagtacgtacgtctgacccctgacgagcgcagcaaagagggctctatctggaaccaccagccgtgcttcctcaaagactgggaaatgcacgtccacttcaaagtccacggcacagggaagaagaacctccatggagacggcatcgccttgtggtacacccgggaccgcctcgtgccagggcctgtgtttggaagcaaagataacttccacggcttagccatcttcctggacacctaccccaatgatgagaccactgagcgcgtgttcccgtacatctcggtgatggtgaacaatggctccctgtcctacgaccacagcaaggatgggcgctggaccgagctggcgggctgcacggctgacttccgcaaccgcgatcacgacaccttcctggctgtgcgctactcccggggccgtctgacggtgatgaccgacctggaggacaagaacgagtggaagaactgcattgacatcacgggagtgcgcctgcccaccggctactacttcggggcctccgccggcaccggcgacctgtctgacaatcatgacatcatctccatgaagctgttccagctgatggtggagcacacgcccgacgaggagagcatcgactggaccaagatcgagcccagcgtcaacttcctcaagtcgcccaaagacaacgtggacgaccccacggggaacttccgcagcgggcccctgactggtgttccagaagcggcaggagcggaacaagcgcttctactgagtggcgcctccggcggggcctgtccctgggcccaggagccaatgtgaacttttttttttaccgggattataaaagaacaacaagatgaccttatttcttaactgtttcaaataaatgattaaagtattttcatacattttgcttcttgcccagcagggacaggtggcagagccgaggcttagggtctggcaccccccacagctggagacggaggctctcctggggctggtgtctcaggagcaggggtctgtgtctacagatgggctgtggcccctgcaggcagctgttgaacactggagggtcccccggaccacactggggtgggctcctgaggacgtggggaagtgattttgttttgtggtgtgtggcacgtgtggcgacggataaggcctgaactgggaaacccaggccttcctgttcaccctgagctgcttcctgagacagatgctcaagtgaggctgcaggcgcggtgtggtggggccgagtgtgaccgtttgctaaataaagtgaaatacccaaacctcaaaaaaaaaaaaaacaaaaaaaaacaaacaaaaaaaaaagaataaaaccaccacactacaaacaaccctaaaacaaaaaagggggggagggcgggggcccctaagagaagattatttcccccggagggaggcccacaaattgactttcaggtgtccacgcccagtgtttttttacttgcaaaaagaggtgggggccccacaaattagagggggagctgcttatataaacagagacaaggagcaggaggggcagttattaaaaaacacgcgcgtggtggtcggggagacaaactgcttaataagaggtgaggatcacttttgatggagagagaagacaccatcacatctgttggagggggagacagacaaaataatttgggagcaacaaactccatcactcaagagaaaagaaattaacacgtcccctgggaaacatactacaaaaatagttcacgaattatatacatggtggtacaacacaccagatataaaataattacgccgtctataaaaaatatatttgcgcaacaagagcaaatgtgttacagaaaacatatttaaacacggg

SEQ ID NO: 588478 - DNA, 372 bp, Homo sapiens
ggaccaggcgctcaccacctagtgacatagagagataactctcgccatgaccggcttgtgttaagctggctcagtgctcccaacgattgggatcggagcgcgaaccaagctggaatcatggaacttgaccatactctgaaatactctatcttgcagattgagccaacacctcgccgaggcaagccacatgttaattgtggtacctgatactagttactgtgatgagaattttaaactggttcaggattgtcatggaccatatctcggcctaatggacacgggaagagcaagagtaactccaacatgtgcagaaattgctatgatccaatcgtcatcaggcgcgaccactttagaatgccagttcattggcgc

SEQ ID NO: 588479 - DNA, 1526 bp, Homo sapiens
gctgcactcaaccaggatgagaggctgcccggccaatgcagctgccgccccgtctgctgcggaggctttgctttttgactccctggcgacagtaaagttgaagagcttccggccggaggccaatagatgggacccccggaaggcggaagttctagggcggaagtggccgagaggagaggagaatggcggcggaaggctggatttggcgttggggctggggccggcggtgcctgggaaggcctgggcttctcggccccggccctggccccactacacctctctttcttcttttgttgttggggtctgtgactgcggatataactgacggcaacagtgaacatctcaagcgggagcattcgctcattaagccctaccaaggggtcggttccagctctatgcccctctgggacttccagggcagcactatgctcacgagccagtacgtacgtctgacccctgacgagcgcagcaaagagggctctatctggaaccaccagccgtgcttcctcaaagactgggaaatgcacgtccacttcaaagtccacggcacagggaagaagaacctccatggagacggcatcgccttgtggtacacccgggaccgcctcgtgccagggcctgtgtttggaagcaaagataacttccacggcttagccatcttcctggacacctaccccaatgatgagaccactgagcgcgtgttcccgtacatctcggtgatggtgaacaatggctccctgtcctacgaccacagcaaggatgggcgctggaccgagctggcgggctgcacggctgacttccgcaaccgcgatcacgacaccttcctggctgtgcgctactcccggggccgtctgacggtgatgaccgacctggaggacaagaacgagtggaagaactgcattgacatcacgggagtgcgcctgcccaccggctactacttcggggcctccgccggcaccggcgacctgtctgacaatcatgacatcatctccatgaagctgttccagctgatggtggagcacacgcccgacgaggagagcatcgactggaccaagatcgagcccagcgtcaacttcctcaagtcgcccaaagacaacgtggacgaccccacggggaacttccgcagcgggcccctgacggggtggcgggtgttcctgctgctgctgtgcgctctcctgggcatcgttgtctgcgccgtggtgggggccgtggtgttccagaagcggcaggagcggaacaagcgcttctactgagtggcgcctccggcggggctgtcctggccggagccatgttgacttgattttaccggatttaagacacagatgacttcttttacgttcaattcctgatagttagaaaaaaaagaggaggcgctctaaatcccgaggaccgtagcctacgatttgaaagggcaagagaaatagaacagaggacaagaaggacagaacgattgaaccattggggatgacacaaaagagaatagaagtaaggaaatgatagaacaaggaaacagacttacgatagcc

SEQ ID NO: 588480 - DNA, 103 bp, Homo sapiens
gctcagcgtcagctcagcatctcatgtgcctggcatgtcattagctgctctgacacacacaataccccacggtttattatataaatccaagcctgaagagttg

SEQ ID NO: 588481 - DNA, 137 bp, Homo sapiens
agtaggccagagacaggaacttatatacagtagtcctgatagttcactggcccatataatagaattctgtatgaaggctatgtagctagcttagtaagccttgaatctactcacaatactaaggtactatatagacc

SEQ ID NO: 588482 - DNA, 1409 bp, Homo sapiens
gctgcactcaaccaggatgagaggctgcccggccaatgcagctgccgccccgtctgctgcggaggctttgctttttgactccctggcgacagtaaagttgaagagcttccggccggaggccaatagatgggacccccggaaggcggaagttctagggcggaagtggccgagaggagaggagaatggcggcggaaggctggatttggcgttggggctggggccggcggtgcctgggaaggcctgggcttctcggccccggccctggccccactacacctctctttcttcttttgttgttggggtctgtgactgcggatataactgacggcaacagtgaacatctcaagcgggagcattcgctcattaagccctaccaaggggtcggttccagctctatgcccctctgggacttccagggcagcactatgctcacgagccagtacgtacgtctgacccctgacgagcgcagcaaagagggctctatctggaaccaccagccgtgcttcctcaaagactgggaaatgcacgtccacttcaaagtccacggcacagggaagaagaacctccatggagacggcatcgccttgtggtacacccgggaccgcctcgtgccagggcctgtgtttggaagcaaagataacttccacggcttagccatcttcctggacacctaccccaatgatgagaccactgagcgcgtgttcccgtacatctcggtgatggtgaacaatggctccctgtcctacgaccacagcaaggatgggcgctggaccgagctggcgggctgcacggctgacttccgcaaccgcgatcacgacaccttcctggctgtgcgctactcccggggccgtctgacggtgatgaccgacctggaggacaagaacgagtggaagaactgcattgacatcacgggagtgcgcctgcccaccggctactacttcggggcctccgccggcaccggcgacctgtctgacaatcatgacatcatctccatgaagctgttccagctgatggtggagcacacgcccgacgaggagagcatcgactggaccaagatcgagcccagcgtcaacttcctcaagtcgcccaaagctcccccgtttcttctcccccagacaacgtggacgaccccacggggaacttccgcagcgggcccctgacggggtggcgggtgttcctgctgctgctgtgcgctctcctgggcatcgttgtctgcgccgtggtgggggccgtggtgttccagaagcggcaggagcggaacaagcgcttctactgagtggcgcctccggcggggcctgtccctgggcccaggagccaatgtgaacttttttttttaccgggattataaaagaacaacaagatgaccttatttcttaactgtttcaaataaatgattaaagtattttcat

SEQ ID NO: 588483 - DNA, 892 bp, Homo sapiens
  misc_feature (6)..(6): n is a, c, g, or t
ccgccncgccgcgaagaataccacgagcgacgaagacagacaggagaccagaacagcccggctaggacccggtcgggccccccgtttcgtgtcctggataatggacccttcaagggggcagattcttccgggaccaaaccgtggttagccacccgcctttgtgtaccgcgccaaacgggtcctacacggccacaaaggtaatcttgtggtccaggcgcacgcccagtaacccagctggcgattccaagggccgcagaaccaagaattgcgtcttgaaaccgttgtaagcgcccgcgggggtatagccgtctcctgccgcccccgggcagccttgggcctaccgaagcggcacccccggcggcggacacttgcgaaagaagcagccttgttcctccaaaacgaggaaaacaggctccacgcaatatcggacaaacacccggccttttacaacacatggcgtggcacccccgcgcccacccggggccactgtacacccccctcatgccaaaacagggcgtctaggggcaaacccacactgggacctacatgggccaaacgagaacccaagaggggggatcagagaacggaccaggtgaaaaaaactccccacgtacgcgagtgggtcataaatctcccatctcgtagtcacggaacactggagaacgcacgggcgagtgaggcaacactcccttacagggcaccaaacttgcggagcgatgcccgcaaggagcccctccccccgataagggtccccgaggacgaccgaccctcaggagggacgggcgcaacaacgattttcttacaacgcggccgcagcgcaaaaaaacagttgccgggaaaaaccgggcgaaaacaatatgggccccaattagtctttacaccaacaaaaaca

SEQ ID NO: 588484 - DNA, 330 bp, Homo sapiens
tacctacctcatcatacctactcactatcagggtcttaaaattctttttactactaaaagagtactggccaggcacggtggctcacaactgtaatcccaacattttgggaggccgaggtgagaggatggcttgagcacaggagttcgagaccagccaggccaacacagtgagaccccatctctacaaaaaatttgttaaaaaaatagccaggcatggtggtgcacacatgtagtaccaactactcaggaagctgaggcaggagaaccacttgagtcagggcagtcaaagctgcagtgagtcatgatcacaggtaggtatgatgaaggacg

SEQ ID NO: 588485 - DNA, 2208 bp, Homo sapiens
aaaattgctagcgatcagtgctcgttgtatttcgtcacaggagaagtggtcgagaatagctggatttggcgttggggctggggccggcggtgcctgggaaggcctgggcttctcggccccggccctggccccactacacctctctttcttcttttgttgttggggtctgtgactgcggatataactgacggcaacagtgaacatctcaagcgggagcattcgctcattaagccctaccaaggggtcggttccagctctatgcccctctgggacttccagggcagcactatgctcacgagccagtacgtacgtctgacccctgacgagcgcagcaaagagggctctatctggaaccaccagccgtgcttcctcaaagactgggaaatgcacgtccacttcaaagtccacggcacagggaagaagaacctccatggagacggcatcgccttgtggtacacccgggaccgcctcgtgccagggcctgtgtttggaagcaaagataacttccacggcttagccatcttcctggacacctaccccaatgatgagaccactgagcgcgtgttcccgtacatctcggtgatggtgaacaatggctccctgtcctacgaccacagcaaggatgggcgctggaccgagctggcgggctgcacggctgacttccgcaaccgcgatcacgacaccttcctggctgtgcgctactcccggggccgtctgacggtgatgaccgacctggaggacaagaacgagtggaagaactgcattgacatcacgggagtgcgcctgcccaccggctactacttcggggcctccgccggcaccggcgacctgtctgacaatcatgacatcatctccatgaagctgttccagctgatggtggagcacacgcccgacgaggagagcatcgactggaccaagatcgagcccagcgtcaacttcctcaagtcgcccaaagacaacgtggacgaccccacggggaacttccgcagcgggcccctgacggggtggcgggtgttcctgctgctgctgtgcgctctcctgggcatcgttgtctgcgccgtggtgggggccgtggtgttccagaagcggcaggagcggaacaagcgcttctactgagtggcgcctccggcggggcctgtccctgggcccaggagccaatgtgaacttttttttttaccgggattataaaagaacaacaagatgaccttatttcttaactgtttcaaataaatgattaaagtattttcatacattttgcttcttgcccagcagggacaggtggcagagccgaggcttagggtctggcaccccccacagctggagacggaggctctcctggggctggtgtctcaggagcaggggtctgtgtctacagatgggctgtggcccctgcaggcagctgttgaacactggagggtcccccggaccacactggggtgggctcctgaggacgtggggaagtgattttgttttgtggtgtgtggcacgtgtggcgacggataaggcctgaactgggaaacccaggccttcctgttcaccctgagctgcttcctgagacagatgctcaagtgaggctgcaggcgcggtgtggtggggccgagtgtgaccgtttgctaaataaagtgaaatacccaaacctcaaaaaaaaaaaaaacaaaaaaaaacaaacaaaaaaaaaagaataaaaccaccacactacaaacaaccctaaaacaaaaaagggggggagggcgggggcccctaagagaagattatttcccccggagggaggcccacaaattgactttcaggtgtccacgcccagtgtttttttacttgcaaaaagaggtgggggccccacaaattagagggggagctgcttatataaacagagacaaggagcaggaggggcagttattaaaaaacacgcgcgtggtggtcggggagacaaactgcttaataagaggtgaggatcacttttgatggagagagaagacaccatcacatctgttggagggggagacagacaaaataatttgggagcaacaaactccatcactcaagagaaaagaaattaacacgtcccctgggaaacatactacaaaaatagttcacgaattatatacatggtggtacaacacaccagatataaaataattacgccgtctataaaaaatatatttgcgcaacaagagcaaatgtgttacagaaaacatatttaaacacggg

SEQ ID NO: 588486 - DNA, 104 bp, Homo sapiens
gcagggcctcaccgcttcgttctccgtccctcccgcgcctcgctcgactagccaagtgaggcggagggactcggacctttccctgcatttcgtttcggccagtg

SEQ ID NO: 588487 - DNA, 2319 bp, Homo sapiens
gctgcactcaaccaggatgagaggctgcccggccaatgcagctgccgccccgtctgctgcggaggctttgctttttgactccctggcgacagtaaagttgaagagcttccggccggaggccaatagatgggacccccggaaggcggaagttctagggcggaagtggccgagaggagaggagaatggcggcggaaggctggatttggcgttggggctggggccggcggtgcctgggaaggcctgggcttctcggccccggccctggccccactacacctctctttcttcttttgttgttggggtctgtgactgcggatataactgacggcaacagtgaacatctcaagcgggagcattcgctcattaagccctaccaaggggtcggttccagctctatgcccctctgggacttccagggcagcactatgctcacgagccagtacgtacgtctgacccctgacgagcgcagcaaagagggctctatctggaaccaccagccgtgcttcctcaaagactgggaaatgcacgtccacttcaaagtccacggcacagggaagaagaacctccatggagacggcatcgccttgtggtacacccgggaccgcctcgtgccagggcctgtgtttggaagcaaagataacttccacggcttagccatcttcctggacacctaccccaatgatgagaccactgagcgcgtgttcccgtacatctcggtgatggtgaacaatggctccctgtcctacgaccacagcaaggatgggcgctggaccgagctggcgggctgcacggctgacttccgcaaccgcgatcacgacaccttcctggctgtgcgctactcccggggccgtctgacggtgatgaccgacctggaggacaagaacgagtggaagaactgcattgacatcacgggagtgcgcctgcccaccggctactacttcggggcctccgccggcaccggcgacctgtctgctgttccagctgatggtggagcacacgcccgacgaggagagcatcgactggaccaagatcgagcccagcgtcaacttcctcaagtcgcccaaagacaacgtggacgaccccacggggaacttccgcagcgggcccctgacggggtggcgggtgttcctgctgctgctgtgcgctctcctgggcatcgttgtctgcgccgtggtgggggccgtggtgttccagaagcggcaggagcggaacaagcgcttctactgagtggcgcctccggcggggcctgtccctgggcccaggagccaatgtgaacttttttttttaccgggattataaaagaacaacaagatgaccttatttcttaactgtttcaaataaatgattaaagtattttcatacattttgcttcttgcccagcagggacaggtggcagagccgaggcttagggtctggcaccccccacagctggagacggaggctctcctggggctggtgtctcaggagcaggggtctgtgtctacagatgggctgtggcccctgcaggcagctgttgaacactggagggtcccccggaccacactggggtgggctcctgaggacgtggggaagtgattttgttttgtggtgtgtggcacgtgtggcgacggataaggcctgaactgggaaacccaggccttcctgttcaccctgagctgcttcctgagacagatgctcaagtgaggctgcaggcgcggtgtggtggggccgagtgtgaccgtttgctaaataaagtgaaatacccaaacctcaaaaaaaaaaaaaacaaaaaaaaacaaacaaaaaaaaaagaataaaaccaccacactacaaacaaccctaaaacaaaaaagggggggagggcgggggcccctaagagaagattatttcccccggagggaggcccacaaattgactttcaggtgtccacgcccagtgtttttttacttgcaaaaagaggtgggggccccacaaattagagggggagctgcttatataaacagagacaaggagcaggaggggcagttattaaaaaacacgcgcgtggtggtcggggagacaaactgcttaataagaggtgaggatcacttttgatggagagagaagacaccatcacatctgttggagggggagacagacaaaataatttgggagcaacaaactccatcactcaagagaaaagaaattaacacgtcccctgggaaacatactacaaaaatagttcacgaattatatacatggtggtacaacacaccagatataaaataattacgccgtctataaaaaatatatttgcgcaacaagagcaaatgtgttacagaaaacatatttaaacacggg

SEQ ID NO: 588488 - DNA, 303 bp, Homo sapiens
atgggctatactatgaacactaagtacaccaatattctcttagagaccctggtttcaattattttgggtataccttaggtcctccttatctggtgggggggatccaggactccccatggatggtgtgaaaccagggagagtatccaaccccggataggggtgttttttcctatattatgtttattccatggtaaaggtactttataaacttaggcagacgtaagagattaacaaaaaaataaaaataaaactataacaattatatggtaataaattatatttgatggtggtgaggctgctacg

SEQ ID NO: 588489 - DNA, 2286 bp, Homo sapiens
gctgcactcaaccaggatgagaggctgcccggccaatgcagctgccgccccgtctgctgcggaggctttgctttttgactccctggcgacagtaaagttgaagagcttccggccggaggccaatagatgggacccccggaaggcggaagttctagggcggaagtggccgagaggagaggagaatggcggcggaaggctggatttggccccactacacctctctttcttcttttgttgttggggtctgtgactgcggatataactgacggcaacagtgaacatctcaagcgggagcattcgctcattaagccctaccaaggggtcggttccagctctatgcccctctgggacttccagggcagcactatgctcacgagccagtacgtacgtctgacccctgacgagcgcagcaaagagggctctatctggaaccaccagccgtgcttcctcaaagactgggaaatgcacgtccacttcaaagtccacggcacagggaagaagaacctccatggagacggcatcgccttgtggtacacccgggaccgcctcgtgccagggcctgtgtttggaagcaaagataacttccacggcttagccatcttcctggacacctaccccaatgatgagaccactgagcgcgtgttcccgtacatctcggtgatggtgaacaatggctccctgtcctacgaccacagcaaggatgggcgctggaccgagctggcgggctgcacggctgacttccgcaaccgcgatcacgacaccttcctggctgtgcgctactcccggggccgtctgacggtgatgaccgacctggaggacaagaacgagtggaagaactgcattgacatcacgggagtgcgcctgcccaccggctactacttcggggcctccgccggcaccggcgacctgtctgacaatcatgacatcatctccatgaagctgttccagctgatggtggagcacacgcccgacgaggagagcatcgactggaccaagatcgagcccagcgtcaacttcctcaagtcgcccaaagacaacgtggacgaccccacggggaacttccgcagcgggcccctgacggggtggcgggtgttcctgctgctgctgtgcgctctcctgggcatcgttgtctgcgccgtggtgggggccgtggtgttccagaagcggcaggagcggaacaagcgcttctactgagtggcgcctccggcggggcctgtccctgggcccaggagccaatgtgaacttttttttttaccgggattataaaagaacaacaagatgaccttatttcttaactgtttcaaataaatgattaaagtattttcatacattttgcttcttgcccagcagggacaggtggcagagccgaggcttagggtctggcaccccccacagctggagacggaggctctcctggggctggtgtctcaggagcaggggtctgtgtctacagatgggctgtggcccctgcaggcagctgttgaacactggagggtcccccggaccacactggggtgggctcctgaggacgtggggaagtgattttgttttgtggtgtgtggcacgtgtggcgacggataaggcctgaactgggaaacccaggccttcctgttcaccctgagctgcttcctgagacagatgctcaagtgaggctgcaggcgcggtgtggtggggccgagtgtgaccgtttgctaaataaagtgaaatacccaaacctcaaaaaaaaaaaaaacaaaaaaaaacaaacaaaaaaaaaagaataaaaccaccacactacaaacaaccctaaaacaaaaaagggggggagggcgggggcccctaagagaagattatttcccccggagggaggcccacaaattgactttcaggtgtccacgcccagtgtttttttacttgcaaaaagaggtgggggccccacaaattagagggggagctgcttatataaacagagacaaggagcaggaggggcagttattaaaaaacacgcgcgtggtggtcggggagacaaactgcttaataagaggtgaggatcacttttgatggagagagaagacaccatcacatctgttggagggggagacagacaaaataatttgggagcaacaaactccatcactcaagagaaaagaaattaacacgtcccctgggaaacatactacaaaaatagttcacgaattatatacatggtggtacaacacaccagatataaaataattacgccgtctataaaaaatatatttgcgcaacaagagcaaatgtgttacagaaaacatatttaaacacggg

SEQ ID NO: 588490 - DNA, 2067 bp, Homo sapiens
cggacgcgtgggtcgacccacgcgtcggtgactgcggatataactgacggcaacagtgaacatctcaagcgggagcattcgctcattaagccctaccaaggggtcggttccagctctatgcccctctgggacttccagggcagcactatgctcacgagccagtacgtacgtctgacccctgacgagcgcagcaaagagggctctatctggaaccaccagccgtgcttcctcaaagactgggaaatgcacgtccacttcaaagtccacggcacagggaagaagaacctccatggagacggcatcgccttgtggtacacccgggaccgcctcgtgccagggcctgtgtttggaagcaaagataacttccacggcttagccatcttcctggacacctaccccaatgatgagaccactgagcgcgtgttcccgtacatctcggtgatggtgaacaatggctccctgtcctacgaccacagcaaggatgggcgctggaccgagctggcgggctgcacggctgacttccgcaaccgcgatcacgacaccttcctggctgtgcgctactcccggggccgtctgacggtgatgaccgacctggaggacaagaacgagtggaagaactgcattgacatcacgggagtgcgcctgcccaccggctactacttcggggcctccgccggcaccggcgacctgtctgacaatcatgacatcatctccatgaagctgttccagctgatggtggagcacacgcccgacgaggagagcatcgactggaccaagatcgagcccagcgtcaacttcctcaagtcgcccaaagacaacgtggacgaccccacggggaacttccgcagcgggcccctgacggggtggcgggtgttcctgctgctgctgtgcgctctcctgggcatcgttgtctgcgccgtggtgggggccgtggtgttccagaagcggcaggagcggaacaagcgcttctactgagtggcgcctccggcggggcctgtccctgggcccaggagccaatgtgaacttttttttttaccgggattataaaagaacaacaagatgaccttatttcttaactgtttcaaataaatgattaaagtattttcatacattttgcttcttgcccagcagggacaggtggcagagccgaggcttagggtctggcaccccccacagctggagacggaggctctcctggggctggtgtctcaggagcaggggtctgtgtctacagatgggctgtggcccctgcaggcagctgttgaacactggagggtcccccggaccacactggggtgggctcctgaggacgtggggaagtgattttgttttgtggtgtgtggcacgtgtggcgacggataaggcctgaactgggaaacccaggccttcctgttcaccctgagctgcttcctgagacagatgctcaagtgaggctgcaggcgcggtgtggtggggccgagtgtgaccgtttgctaaataaagtgaaatacccaaacctcaaaaaaaaaaaaaacaaaaaaaaacaaacaaaaaaaaaagaataaaaccaccacactacaaacaaccctaaaacaaaaaagggggggagggcgggggcccctaagagaagattatttcccccggagggaggcccacaaattgactttcaggtgtccacgcccagtgtttttttacttgcaaaaagaggtgggggccccacaaattagagggggagctgcttatataaacagagacaaggagcaggaggggcagttattaaaaaacacgcgcgtggtggtcggggagacaaactgcttaataagaggtgaggatcacttttgatggagagagaagacaccatcacatctgttggagggggagacagacaaaataatttgggagcaacaaactccatcactcaagagaaaagaaattaacacgtcccctgggaaacatactacaaaaatagttcacgaattatatacatggtggtacaacacaccagatataaaataattacgccgtctataaaaaatatatttgcgcaacaagagcaaatgtgttacagaaaacatatttaaacacggg

SEQ ID NO: 588491 - DNA, 2246 bp, Homo sapiens
gctgcactcaaccaggatgagaggctgcccggccaatgcagctgccgccccgtctgctgcggaggctttgctttttgactccctggcgacagtaaagttgaagagcttccggccggaggccaatagatgggacccccggaaggcggaagttctagggcggaagtggccgagaggagaggagaatggcggcggaaggctggatttgggtgactgcggatataactgacggcaacagtgaacatctcaagcgggagcattcgctcattaagccctaccaaggggtcggttccagctctatgcccctctgggacttccagggcagcactatgctcacgagccagtacgtacgtctgacccctgacgagcgcagcaaagagggctctatctggaaccaccagccgtgcttcctcaaagactgggaaatgcacgtccacttcaaagtccacggcacagggaagaagaacctccatggagacggcatcgccttgtggtacacccgggaccgcctcgtgccagggcctgtgtttggaagcaaagataacttccacggcttagccatcttcctggacacctaccccaatgatgagaccactgagcgcgtgttcccgtacatctcggtgatggtgaacaatggctccctgtcctacgaccacagcaaggatgggcgctggaccgagctggcgggctgcacggctgacttccgcaaccgcgatcacgacaccttcctggctgtgcgctactcccggggccgtctgacggtgatgaccgacctggaggacaagaacgagtggaagaactgcattgacatcacgggagtgcgcctgcccaccggctactacttcggggcctccgccggcaccggcgacctgtctgacaatcatgacatcatctccatgaagctgttccagctgatggtggagcacacgcccgacgaggagagcatcgactggaccaagatcgagcccagcgtcaacttcctcaagtcgcccaaagacaacgtggacgaccccacggggaacttccgcagcgggcccctgacggggtggcgggtgttcctgctgctgctgtgcgctctcctgggcatcgttgtctgcgccgtggtgggggccgtggtgttccagaagcggcaggagcggaacaagcgcttctactgagtggcgcctccggcggggcctgtccctgggcccaggagccaatgtgaacttttttttttaccgggattataaaagaacaacaagatgaccttatttcttaactgtttcaaataaatgattaaagtattttcatacattttgcttcttgcccagcagggacaggtggcagagccgaggcttagggtctggcaccccccacagctggagacggaggctctcctggggctggtgtctcaggagcaggggtctgtgtctacagatgggctgtggcccctgcaggcagctgttgaacactggagggtcccccggaccacactggggtgggctcctgaggacgtggggaagtgattttgttttgtggtgtgtggcacgtgtggcgacggataaggcctgaactgggaaacccaggccttcctgttcaccctgagctgcttcctgagacagatgctcaagtgaggctgcaggcgcggtgtggtggggccgagtgtgaccgtttgctaaataaagtgaaatacccaaacctcaaaaaaaaaaaaaacaaaaaaaaacaaacaaaaaaaaaagaataaaaccaccacactacaaacaaccctaaaacaaaaaagggggggagggcgggggcccctaagagaagattatttcccccggagggaggcccacaaattgactttcaggtgtccacgcccagtgtttttttacttgcaaaaagaggtgggggccccacaaattagagggggagctgcttatataaacagagacaaggagcaggaggggcagttattaaaaaacacgcgcgtggtggtcggggagacaaactgcttaataagaggtgaggatcacttttgatggagagagaagacaccatcacatctgttggagggggagacagacaaaataatttgggagcaacaaactccatcactcaagagaaaagaaattaacacgtcccctgggaaacatactacaaaaatagttcacgaattatatacatggtggtacaacacaccagatataaaataattacgccgtctataaaaaatatatttgcgcaacaagagcaaatgtgttacagaaaacatatttaaacacggg

SEQ ID NO: 588492 - DNA, 2019 bp, Homo sapiens
gctgcactcaaccaggatgagaggctgcccggccaatgcagctgccgccccgtctgctgcggaggctttgctttttgactccctggcgacagtaaagttgaagagcttccggccggaggccaatagatgggacccccggaaggcggaagttctagggcggaagtggccgagaggagaggagaatggcggcggaaggctggatttggcgttggggctggggccggcggtgcctgggaaggcctgggcttctcggccccggccctggccccactacacctctctttcttcttttgttgttggggtctgtgactgcggatataactgacggcaacagtgaacatctcaagcgggagcattcgctcattaagccctaccaaggggtcggttccagctctatgcccctctgggacttccagggcagcactatgctcacgagccagtacgtacgtctgacccctgacgagcgcagcaaagagggctctatctggaaccaccagccgtgcttcctcaaagactgggaaatgcacgtccacttcaaagtccacggcacagggaagaagaacctccatggagacggcatcgccttgtggtacacccgggaccgcctcgtgccagggcctgtgtttggaagcaaagataacttccacggcttagccatcttcctggacacctaccccaatgatgagaccactgagcgcgtgttcccgtacatctcggtgatggtgaacaatggctccctgtcctacgaccacagcaaggatgggcgctggaccgagctggcgggctgcacggctgacttccgcaaccgcgatcacgacaccttcctggctgtgcgctactcccggggccgtctgacggtgatgaccgacctggaggacaagaacgagtggaagaactgcattgacatcacgggagtgcgcctgcccaccggctactacttcggggcctgtccctgggcccaggagccaatgtgaacttttttttttaccgggattataaaagaacaacaagatgaccttatttcttaactgtttcaaataaatgattaaagtattttcatacattttgcttcttgcccagcagggacaggtggcagagccgaggcttagggtctggcaccccccacagctggagacggaggctctcctggggctggtgtctcaggagcaggggtctgtgtctacagatgggctgtggcccctgcaggcagctgttgaacactggagggtcccccggaccacactggggtgggctcctgaggacgtggggaagtgattttgttttgtggtgtgtggcacgtgtggcgacggataaggcctgaactgggaaacccaggccttcctgttcaccctgagctgcttcctgagacagatgctcaagtgaggctgcaggcgcggtgtggtggggccgagtgtgaccgtttgctaaataaagtgaaatacccaaacctcaaaaaaaaaaaaaacaaaaaaaaacaaacaaaaaaaaaagaataaaaccaccacactacaaacaaccctaaaacaaaaaagggggggagggcgggggcccctaagagaagattatttcccccggagggaggcccacaaattgactttcaggtgtccacgcccagtgtttttttacttgcaaaaagaggtgggggccccacaaattagagggggagctgcttatataaacagagacaaggagcaggaggggcagttattaaaaaacacgcgcgtggtggtcggggagacaaactgcttaataagaggtgaggatcacttttgatggagagagaagacaccatcacatctgttggagggggagacagacaaaataatttgggagcaacaaactccatcactcaagagaaaagaaattaacacgtcccctgggaaacatactacaaaaatagttcacgaattatatacatggtggtacaacacaccagatataaaataattacgccgtctataaaaaatatatttgcgcaacaagagcaaatgtgttacagaaaacatatttaaacacggg

SEQ ID NO: 588493 - DNA, 248 bp, Homo sapiens
gcagtccttattagcctaggcttgacatacttaaatagaacatttaaactaaaggcttactccctaatcttgggtggcttcctttaaaaaaaaaaaaaaagtatcttcattctagaaatttatttgggataaatccgataacatatatgtcctcaatctcttggggctcttccataacttacttccttttggtctgagcaatgtgaatggaagtctctttagtaccacttctaccatagatggttacg

SEQ ID NO: 588494 - DNA, 1139 bp, Homo sapiens
  misc_feature (1)..(1): n is a, c, g, or t
  misc_feature (219)..(219): n is a, c, g, or t
  misc_feature (586)..(586): n is a, c, g, or t
  misc_feature (816)..(816): n is a, c, g, or t
  misc_feature (897)..(897): n is a, c, g, or t
  misc_feature (1012)..(1012): n is a, c, g, or t
nagcagctcccatttttgatgggacaccacctgggaagacgcggccactcaagggccggggcaatagcaaccatatttaatttcataagagccggagagggaaagcaagcttgatactatgtcagcaatcttcaatcatagacacgtgccaatagaagacagtatatagttgatctcatctacgagaccaggtgtaaaaagcaagagagacaagagtgngagacgcgagcttttgctcttaatggggagagtaagaagaaattagcattcgttcatgatgacgttgtgcacatatactataagttgagcgcgaggtgtacaatatacagagataggtaatgaagcagatagtcataatagtaaaacttgtacacaccttatcaagaaggatactattaacccatactatgtctgtctagatgtacagggtacgtgagcaggggaggggagagcggagggagtgagcggcggaagggatgagagcagaggagctgaaagagaaagaatcgagggcgggatacgggggacaggtaggcacacaacaaagacgcgaccatatccgaagctgcctaccgtatataggctnattcgatatctctcacctgaagtagctcaaacacatcattagtagtacacagttcgtcaattgagaatgggatggttgtgaagtcaatgttgtagatgacggaggctagtggtagtgtataggcgcataatgaggtgcgaagaagtaaagacggtatacatacacatataagagaagaaacatcaaacacatatattatgatatcaagacgctgtgagtcagatcagccnagctcgcacgagcagtgtcggacgtgtgtataggtcgcaatgggtcgtcacactatatgtctactcacaccgaccgagaangacaactgatcgactctataccctacctcgaacttatcagagccatagatgtgtcgggcgacacggcggcgcgcgcgcgacacgatgctatagagcgcgatggatctaaataagnacatgcatgtaacctctgcgggtcgatcaaggggttagtgttagcggaagagtggagagaaggacgggtcagatgttaaggcaagtgtgtgcaagaaagacaccaggcgatataagtgcagtaggat

SEQ ID NO: 588495 - DNA, 691 bp, Homo sapiens
gcctcgtgccggagtttcaggctcactggtgcgtgtacaccctgcctggcccaggtcctcttccaaggccttctggtagagttctctgactaacctgctgtccccaggaaaggctgtcccaagccaagcctggaagtccccattggccatggtatccattttgaggggttaatggtcttccctcaggaggtgacactgccacctggagctgggtgcattctgcctggtgccctgctgaccccaactgcctttcccctctggaaggcagcgaacatctgagctcagggacgagccctgcttggggtcagacagacatgctgtcttcatccaggctgcacccaggccagatagaccagcaaaatctctgcccgcgactcctcgctgtctaccctggctcaggcgtctgccaggccactcgcaggagccaccgagaaggccctttcctccctgccgggggtacccccaaaataacctgttggatgccaagcagacaggacactgcgtgtggatgccaggccgcaggtcggaggctggaccgggggagccctgttaccgtgagctttgctcagtctggcccaaacaaacccctttgggacctaccggacataactttacgaatccggttgtgagaaatccatcaggggatccttggtgaagtcccggagctggcagtttctaaaatttcatcata

SEQ ID NO: 588496 - DNA, 180 bp, Homo sapiens
tgactcaccgagcttagtgactaggctggagtgaactggccgttcacagcagcctcaagagatcctgggctcaagagatccacttgcctcagctcctcgggtggttgggaccacaagtgtgtaccacacacccagctaattatctttttgtagagacacggtctcccatttgtatctcag

SEQ ID NO: 588497 - DNA, 444 bp, Homo sapiens
  misc_feature (3)..(3): n is a, c, g, or t
  misc_feature (26)..(26): n is a, c, g, or t
  misc_feature (39)..(39): n is a, c, g, or t
  misc_feature (49)..(49): n is a, c, g, or t
  misc_feature (76)..(76): n is a, c, g, or t
  misc_feature (126)..(126): n is a, c, g, or t
cantaaaaaaacttggccttgcaagncaatacagcccancgaatggcanaacctggaaactcaaaccctaggcaanctggccccttgaagttccatggtcttattgcccttataacaagcctaaanccccggaaagtatttattgaaaattatatactactttttctttttttttttttttgagatgaagtcttgcactatcacccgggctggggtgcggtggcatgatcctcagctcactgcagccctgggagttcgagaacagccttggcaaaagggtaaaaccctctctctacaaaaaaatacaaaaaattagcttggcatgtggcaagcacctgtatttccagctactccggaggccaaggctgcggtgagctgtgatcatgtgaatgcactgcagcctgagtcacagggtgagactctggcttaagaaaataaaaaaaa

SEQ ID NO: 588498 - DNA, 276 bp, Homo sapiens
ataataaagacagattgcttcttcgcttctcaaaaaaaaaaaaaaaaaaaaaagaaaaaaaaaaaagaaaaaaaaaaaaaaaaaaaaaaaaaaaaaaaaaaaaaaaaaaaaaaaaaaaaaaaaaaaaaaaaaaaaaaaaaaaaaagggccgcctgggcccaggcgactcaagacccgggaaagctaaggcaggcggccgaaattggggccaactgggccaaatcgcccaaaaggggggcggataacaattaacgggccggggtttaaaaaaggggg

SEQ ID NO: 588499 - DNA, 305 bp, Homo sapiens
  misc_feature (246)..(246): n is a, c, g, or t
tattatataacttttgttagaagtactcaaaacaaactgtaaagtagtttcagggtctactaccctgaccctgggtgggtggttaggaatcaacctttaatccatttacaatttgctaaaagtaaaaaagataagctgggtatggcaacatacgcctgtagtcacagctattcaggaggctgaggcaggaggattgcttgagcccaggagttcaaggatatagcgtgctatgatcatacttatgancagccactggactccagaatgggcaacataggaaagactccatcttcaaacaacaaaag

SEQ ID NO: 588500 - DNA, 280 bp, Homo sapiens
ttcagcatgtagttaccacgaaatacaatgatcatagtttgccataccagatagcatcgtctctgtacctgacagacgatacttcatggttactcttgcttcattatctgcggcacatgagatatacgctggacgaccaacgaatactgatggtgctacgctccaaatacagttttcataatcaatggggagtcctgtcttgggactaatcggctttggcatttgattaccgtgcatgatttggccccaattggcagctagattttcacgaaggccgatt

SEQ ID NO: 588501 - DNA, 389 bp, Homo sapiens
ttctcggcgtgtctagaggatccctgcggcgaaaaaccgtattcggtttcaaacaagtgaagaaacgctgcatctggctaggaactatctgtcgatatggctttgctgctgatggggtgtgctgggaggcagtccagagcagggcgggtgcggggtgggggcgtccgctggctgggtgctccaggggtgctcggaggagcagcttctgtttctagcccctgtgaacgtgtccacacctcacagctaaggcagtgggagaccttgaattggaccccagaggactgtctgcctgtcctgcctcacaaatgaagatgaaatttgtttctttttgaaagtgatatttattacgataattttttttaataattaaggggggtcttgcggccgag

SEQ ID NO: 588502 - DNA, 227 bp, Homo sapiens
gtggattcaaggctcctgtccccagaccatttcccaattcctggcaaaagccaaagatccaggttaagagagaccctctgtatcccaggtccttccagaactgactctaagtcttcagccagggctcttagatgcaaggtttggccttaggggattaacctttcttaagggccttggcttaactaatatctagcattctggccaggcctataactgctttgcttctg

SEQ ID NO: 588503 - DNA, 447 bp, Homo sapiens
  misc_feature (7)..(7): n is a, c, g, or t
  misc_feature (10)..(10): n is a, c, g, or t
  misc_feature (17)..(17): n is a, c, g, or t
  misc_feature (21)..(21): n is a, c, g, or t
  misc_feature (349)..(349): n is a, c, g, or t
  misc_feature (352)..(352): n is a, c, g, or t
  misc_feature (386)..(386): n is a, c, g, or t
  misc_feature (421)..(421): n is a, c, g, or t
  misc_feature (433)..(433): n is a, c, g, or t
ttttcgngtngccaccngtgngcgtacgatctgggcgctgacgttcgtcagaaagttgacctgagtaccttcagcgatgaagaagttatgcgtctggctgaaaacctgcgcaaaggtatgccaatcgcaacgccggtgttcgacggtgcgaaagaagcagaaattaaagagctgctgaaacttggcgacctgccgacttccggtcagatccgcctgtacgatggtcgcactggtgaacagttcgagcgtccggtaaccgttggttacatgtacatgctgaaactgaaccacctggtcgacgacaagatgcacgcgcgttccaccggttcttacagcctggttactcagnagncgctgggtgggtaaggcacaagttcggggtcagngtttcggggagatggaagtgtgggcgcttggaagnatacggggcagnatacaaccctgcag

SEQ ID NO: 588504 - DNA, 226 bp, Homo sapiens
ctagttcctagaagtttcaatagcgctaataggtaatgatggtaatctgaaacctgtggctcaaaggaactgcagattgtgttggaaatttggctagcttcttctgaaaccctgcatccttgtcctttcctctatacacaagagtttgtttcttggtgttctatcctctcattgctctatgtctgtctttatgtcattaccatgctattgaaacttctaaaactag

SEQ ID NO: 588505 - DNA, 326 bp, Homo sapiens
agtgagtgcagctccaggataccaatcatgatgataacgggcaaacagtcccttaccataacaccttataaatccaagtctcttgaggaccagagaagcactgctagctttctcttgattcaacaaagataccacagaatcagcagggtgagaaacatttgcatcaaaagcactccagctaatgtgacctgctagaaatgttacaaccagctgctctggctttgaacattcactggggggcttaggaaccactaatttgtacagtgcttcaacagtacgttcaaagcaggcaaacttcatcatggtgtatggtatctagtactcat

SEQ ID NO: 588506 - DNA, 968 bp, Homo sapiens
tatttggccgccacaaatggtataacaaaatctcccccctgcaacgcaattgtaaagttccccagtgtccattgtatacttacaaatggggaacaaaactctcacaacgttttgtgaaacgcccctatttcaacaatatggttttcccgggaccaatagttattactagggttcacatccctggccaaaaatactcacactcaaccaccagttgtagcactcccccccctcttcatgttgttcaacccccaaaattctcctgtttcaccccaattgcccccttcaaatattgtagccacttattgatgtgcgccaccccccctctagttcttctgagtaactgttaaggtaccccctcgtgtcccctcctctccttctaagaaagatccccccccgcctcggggagcgatcccctccagggctaataccacattcctgtagccgtatgctctccccccccaccggagtttgttcttctcaaaacagaatagatgcccacctctagtttcccccgcccctcgtcaaagacttaaaaataatagcgtgacacactcaattaaggaggctctctcttatattaaaaaccagactcctacttctttgtaaataccacacactctcttgtaaaatggtgaaacctgtcaaagtcgtgccaaaatagttaactaacctagtgttatatcttcatgatacagaatgtcacaaagaaaagacaattctattgggttatacattttataaacaggtttggcattatcagctgtgaataaaagcacccagttaggtcccccccaacgtttaccaccttttatctaagtagtcccccgtgttgttaaacactatatacaatctagccatacatataaaaacatcaggtcacaacaactgtgaacacactttgttaaggaccaaaaacttttttttttgtccccgggcaaaaaaaaggggctttctttacaaacacaaca

SEQ ID NO: 588507 - DNA, 99 bp, Homo sapiens
gcttaaacagtgcagtcaaagtacaataataaagaagatcatgtccatgtcaacattattataaccctacattttgtgcataaagtgtaagtgtacaag

SEQ ID NO: 588508 - DNA, 423 bp, Homo sapiens
  misc_feature (46)..(46): n is a, c, g, or t
  misc_feature (102)..(102): n is a, c, g, or t
  misc_feature (117)..(117): n is a, c, g, or t
  misc_feature (157)..(157): n is a, c, g, or t
  misc_feature (193)..(193): n is a, c, g, or t
  misc_feature (327)..(328): n is a, c, g, or t
  misc_feature (415)..(415): n is a, c, g, or t
ttttggtgttttagttgttagagggttatggctgtgtgtgtttgtntgtttttttttgtgtttgtttagtggtgtgtggtctaactagtataataattcggncctcgagtgtgtctnagtacctggggggatacggggtggttctgtctgtcctagnccttctctttggaacactcctcttccaccacactgntctgggtctgggagcctcccaccgcgctgctgaagtcaattccttaagggagaatctgggcggtcgcagccgcgcaactggggatggacagggagtggggaccccagggcccccaatctggaagggccccctcnnagccattgtgggaacaataaatactgtgtgacggtggcagggagtggggggttcggccactgggtggggggcaagggggagctggcngggctagg

SEQ ID NO: 588509 - DNA, 349 bp, Homo sapiens
ccgattaatgcatgtagtatgcaataagcacatcatggagaatggggtatccactcccccaagcatttatcctttcaattacaaacaacccaattacactgtttaagttatttttaaatgtgcaattaagttattatttactatagtcaccatgtggtgctatcagatagtaggtcttattcattctttctgttttttgtacccattaaccatccccacctccctgccagcttacactaggcgcttcctatacatctgcaaactatccgttcttactctttgggtgtgcctgtagtttgaaatagcacagtcatggagaatggggtatcactcccccaagcatttatcg

SEQ ID NO: 588510 - DNA, 249 bp, Homo sapiens
acaagttagcttgagaaaacagatgctctagacacttaaggccaatggagcggagggcaggaagacgtagcagcagcttggcaaagcgtccctgctgctcagggtacttctgtgtgcagtaggtctccagcgatgcatacactttctcccgcaggacctccacctcactagggtaggagaggcccttggcatctggattaaacagaatgatagccctcaggcagccaagctctgtcttgtccatcctca

SEQ ID NO: 588511 - DNA, 440 bp, Homo sapiens
aaacccgaatgtttctgtagcttccttttccctgccccagaattgtttggtttttatcaaagaagcccctctgtccctccagccctgcccaattgtttcccatggtggaagggttcctgttatatggtccgggccccccccccgttttttttaaagtgttcaagggtccccccggtttttcccccctaggggggggggccaatggggggtgcatgggcttcctgggtttcccccccccgtttggcccaaaggttatgtttttggggtttggcccccccgtcccccctttttggggtttagggggatttgggccccccccccctccccccgtggttgcttttttttttcccgttttggccctaaagttttcccccctctgttaatttgtttttaaattttacccctgaatttgctttttttttttaaaaagtttttgggga

SEQ ID NO: 588512 - DNA, 426 bp, Homo sapiens
caatagacagaactcaaagtcatccctctgctcacctgagacaaatgtgtatctgattgctgcttctgccctattgtttatgcaaaaatgcagatccactgagccagactaaggcatcagtgtgactattcctttactccccactccatgtaaattgtgtattcagtgaaaggctgatcaaagaccccaaaaaatgcagccttttgtctcttatctacctatgacctggaagcccccacttcgagttgtcccgcctttccagactgaaccagtgtacaccttacacgtattgattgatgtctcatgtctccccaaaatgtataaaaccaagctgtgcaccgaccacctttagcatgtgttgtcagaacctcctgaggctgtatcatgtcatgagtgtgtgctcaaccttggcaaaataaactttct

SEQ ID NO: 588513 - DNA, 127 bp, Homo sapiens
aagggaaggggcaggggtttaatttttgggccccccccaaggggggaaaatgggaaaaattttttttaaagggaaaaggtaaagggggggttttaaaaaaaaaaaaaaaaaatttttttccggggga

SEQ ID NO: 588514 - DNA, 686 bp, Homo sapiens
gctccccggtccttgtggcataagataatgtttccctggttttcttggttaagcaagtatctcccggagactttggcagccaacgctgacaaagttgggatgtgcccctccagttgttcgaggcaagtttcctccagatcaaggctttctttattggtcttcacatctcgttaggatgacttcgtagccatcacggagctgatgcatctcgtgggtgctggtttccaagtctgcgatgctgacccgagctgcccacatgccggcagcgcgtggaggcagcagtgggtatggacctcttccagaaggcccatgaggtcactctgaagtccaagtccttatcacgtgcagactccggcataaagcagaatgtgatgccatgggtgctgcccatgatccggtgaggtgagaatcttcacccttgcgccgtcctcagcagtccggaaagctttttcatttataatggcccatgggatccaggcccataaagcaggaatggcttgcttaagacttggccaagtcccagagcacgtcgcctcagtaagccaccatccccggcctgtcttcctcagccgcctgaaagccccaatgagaatgatgcccacttaggcgttgtgtcctttaatcccagcatttccttttgattttggataataaccctgggctcagcctgagcctctgcttctaaa

SEQ ID NO: 588515 - DNA, 301 bp, Homo sapiens
tgctagcgggtctcttaccgtatcatgttgagaccacggtataaaacctacaagagtagaagtatatggtttacacaagtgatcccttcctaagagatgtactagaggatgagcttcattaagtcaagagatgactgggcagactttggcaaaaggtctgatggttactgtttatgtatttaacgaaatatataagactaaaacaacaatagggcaagtgtgggcataattatatgtaaatgttatattctaatcaaactagaaataatgcaattttttaaaatgcagagaagggggagag

SEQ ID NO: 588516 - DNA, 818 bp, Homo sapiens
tctaggtggtgctggtggtcaatcggccgaggcgggcggcgggcccctggtgtcctcaggcggctgtggcggcgtttggcggcggttgggccgaggcaggcggcctcactggccgaggtggctggacgcgtagcaggtggatgggagggagggagcctgcagggcgcacgcaacccatccctgccatgaaggccccccgcatcctgtgctggaaacatggcggacgcagtcatctccgtgcctctgtggtaaacgagcctgcgtgtgggacctgaggtgcccacgcaccatagtaggcatgcgcaccacgggagctcatcgaggcagagccaatgcgcgtgtatgaccaggttggcacccaggatgtatgaggacgttgtcctacgagagcacgctcaatggcgctggccgatgtggagtgtcacctacacagttcagaggaatatccttgacttacccccagcatgtttccccctccaatggacatccggacagccagcacagatggccgacaagaagctctctgagttcgacgtggagatgagcatgagggaggacgtgtaccagaggatcgtgtggctccagtgagaaagttcagaaggactcacttgaggcccgaggacatgcgcggtacctggagctggctaatcaagctgggccggagaaatgggcttcacatcccccagagagactcaggaacacatcaaacgcatcaagaagaagctgagccttctgtgcctcgattcacaagaacctgagaggcactgaacttctgcccttagctccagagctagagggtcccgaggaatatggactca

SEQ ID NO: 588517 - DNA, 266 bp, Homo sapiens
  misc_feature (207)..(207): n is a, c, g, or t
cagcctcttaaagccagcataggggaatggctttcatgctgggggagaggacacgatgagagatgcacctcccaatggacaccaacttgtggctcagcatggctcaaggtagcagatcagaattctcgtgcacgcctaccactcgactgcagttcttcctgccagtacccatgcactttgggacactactgagttctatagctccanactatggcaggcctcttgcagctatcatcctggaactttgtaactctgacgtccacgag

SEQ ID NO: 588518 - DNA, 188 bp, Homo sapiens
aggagttgggaagatgctgccctctgggaaccttagtgtgtgagcagggaagttggaaaggcaagactttctttctcatttgcagaatgcgggcactagtcacagctgatttgtagagtttcttggaggaactaatgaagtagttggtgcatgttaatggtacataaaaaggccgagcaaaggttaag

SEQ ID NO: 588519 - DNA, 243 bp, Homo sapiens
attccattcgctgatgtttccgttcaattccattcgatgatgattccattcgattccattcattgaggattccatttgattccattcaatgatgattccattctattccattcaatgattgcattcaattccattcaatgattatcccattagagtaaactcaacgattccattcaataccattcgatgatgattccttttgagtccattcaatgatttcattcaagtccatttgatgactcc

SEQ ID NO: 588520 - DNA, 295 bp, Homo sapiens
catctgcaggtccagtagtcattgaagtaaataatgggatagtagtcaccgctcacgggtcaaacttcacatatttgatccagtgaagggggcacactgcccttcacccacggcgtgtggtcgtccacaatgttaatggtaatataggggtgccaatgggagatcacctccacaggcccatagtcctcagccctcttgatcatttctgggtccgcttctgtctctcctgtttgcaggtccttggttttctgaaatcgtctgcgcttgtatttcgttgatcatccgggacatgtgg

SEQ ID NO: 588521 - DNA, 2108 bp, Homo sapiens
gctgcactcaaccaggatgagaggctgcccggccaatgcagctgccgccccgtctgctgcggaggctttgctttttgactccctggcgacagtaaagttgaagagcttccggccggaggccaatagatgggacccccggaaggcggaagttctagggcggaagtggccgagaggagaggagaatggcggcggaaggctggatttggcgttggggctggggccggcggtgcctgggaaggcctgggcttctcggccccggccctggccccactacacctctctttcttcttttgttgttggggtctgtgactgcggatataactgacggcaacagtgaacatctcaagcgggagcattcgctcattaagccctaccaaggggtcggttccagctctatgcccctctgggacttccagggcagcactatgctcacgagccagtacgtacgtctgacccctgacgagcgcagcaaagagggctctatctggaaccaccagccgtgcttcctcaaagactgggaaatgcacgtccacttcaaagtccacggcacagggaagaagaacctccatggagacggcatcgccttgtggtacacccgggaccgcctcgtgccagggcctgtgtttggaagcaaagataacttccacggcttagccatcttcctggacacctaccccaatgatgagaccactgagcgcgtgttcccgtacatctcggtgatggtgaacaatggctccctgtcctacgaccacagcaaggatgggcgctggaccgagctggcgggctgcacggctgacttccgcaaccgcgatcacgacaccttcctggctgtgcgctactcccggggccgtctgacggtgatgaccgacctggaggacaagaacgagtggaagaactgcattgacatcacgggagtgcgcctgcccaccggctactacttcggcatcgttgtctgcgccgtggtgggggccgtggtgttccagaagcggcaggagcggaacaagcgcttctactgagtggcgcctccggcggggcctgtccctgggcccaggagccaatgtgaacttttttttttaccgggattataaaagaacaacaagatgaccttatttcttaactgtttcaaataaatgattaaagtattttcatacattttgcttcttgcccagcagggacaggtggcagagccgaggcttagggtctggcaccccccacagctggagacggaggctctcctggggctggtgtctcaggagcaggggtctgtgtctacagatgggctgtggcccctgcaggcagctgttgaacactggagggtcccccggaccacactggggtgggctcctgaggacgtggggaagtgattttgttttgtggtgtgtggcacgtgtggcgacggataaggcctgaactgggaaacccaggccttcctgttcaccctgagctgcttcctgagacagatgctcaagtgaggctgcaggcgcggtgtggtggggccgagtgtgaccgtttgctaaataaagtgaaatacccaaacctcaaaaaaaaaaaaaacaaaaaaaaacaaacaaaaaaaaaagaataaaaccaccacactacaaacaaccctaaaacaaaaaagggggggagggcgggggcccctaagagaagattatttcccccggagggaggcccacaaattgactttcaggtgtccacgcccagtgtttttttacttgcaaaaagaggtgggggccccacaaattagagggggagctgcttatataaacagagacaaggagcaggaggggcagttattaaaaaacacgcgcgtggtggtcggggagacaaactgcttaataagaggtgaggatcacttttgatggagagagaagacaccatcacatctgttggagggggagacagacaaaataatttgggagcaacaaactccatcactcaagagaaaagaaattaacacgtcccctgggaaacatactacaaaaatagttcacgaattatatacatggtggtacaacacaccagatataaaataattacgccgtctataaaaaatatatttgcgcaacaagagcaaatgtgttacagaaaacatatttaaacacggg

SEQ ID NO: 588522 - DNA, 225 bp, Homo sapiens
aaaaaattaaaagttggggggggatgccgcttttaaccgattttttccgccgattttttccaatggttttgatgaagggaaacgggccctggaccaatcctttttggggtcgggggggccagtttttaggcccccctggttttatgttgggtaaaggaaagttgaaatccatcctcctttttatttgggatgggaaaaggtcttaattaatttatttgttttcca

SEQ ID NO: 588523 - DNA, 2315 bp, Homo sapiens
gctgcactcaaccaggatgagaggctgcccggccaatgcagctgccgccccgtctgctgcggaggctttgctttttgactccctggcgacagtaaagttgaagagcttccggccggaggccaatagatgggacccccggaaggcggaagttctagggcggaagtggccgagaggagaggagaatggcggcggaaggctggatttggcgttggggctggggccggcggtgcctgggaaggcctgggcttctcggccccggccctggccccactacacctctctttcttcttttgttgttggggtctgtgactgcggatataactgacggcaacagtgaacatctcaagcgggagcattcgctcattaagccctaccaaggggtcggttccagctctatgctcacgagccagtacgtacgtctgacccctgacgagcgcagcaaagagggctctatctggaaccaccagccgtgcttcctcaaagactgggaaatgcacgtccacttcaaagtccacggcacagggaagaagaacctccatggagacggcatcgccttgtggtacacccgggaccgcctcgtgccagggcctgtgtttggaagcaaagataacttccacggcttagccatcttcctggacacctaccccaatgatgagaccactgagcgcgtgttcccgtacatctcggtgatggtgaacaatggctccctgtcctacgaccacagcaaggatgggcgctggaccgagctggcgggctgcacggctgacttccgcaaccgcgatcacgacaccttcctggctgtgcgctactcccggggccgtctgacggtgatgaccgacctggaggacaagaacgagtggaagaactgcattgacatcacgggagtgcgcctgcccaccggctactacttcggggcctccgccggcaccggcgacctgtctgacaatcatgacatcatctccatgaagctgttccagctgatggtggagcacacgcccgacgaggagagcatcgactggaccaagatcgagcccagcgtcaacttcctcaagtcgcccaaagacaacgtggacgaccccacggggaacttccgcagcgggcccctgacggggtggcgggtgttcctgctgctgctgtgcgctctcctgggcatcgttgtctgcgccgtggtgggggccgtggtgttccagaagcggcaggagcggaacaagcgcttctactgagtggcgcctccggcggggcctgtccctgggcccaggagccaatgtgaacttttttttttaccgggattataaaagaacaacaagatgaccttatttcttaactgtttcaaataaatgattaaagtattttcatacattttgcttcttgcccagcagggacaggtggcagagccgaggcttagggtctggcaccccccacagctggagacggaggctctcctggggctggtgtctcaggagcaggggtctgtgtctacagatgggctgtggcccctgcaggcagctgttgaacactggagggtcccccggaccacactggggtgggctcctgaggacgtggggaagtgattttgttttgtggtgtgtggcacgtgtggcgacggataaggcctgaactgggaaacccaggccttcctgttcaccctgagctgcttcctgagacagatgctcaagtgaggctgcaggcgcggtgtggtggggccgagtgtgaccgtttgctaaataaagtgaaatacccaaacctcaaaaaaaaaaaaaacaaaaaaaaacaaacaaaaaaaaaagaataaaaccaccacactacaaacaaccctaaaacaaaaaagggggggagggcgggggcccctaagagaagattatttcccccggagggaggcccacaaattgactttcaggtgtccacgcccagtgtttttttacttgcaaaaagaggtgggggccccacaaattagagggggagctgcttatataaacagagacaaggagcaggaggggcagttattaaaaaacacgcgcgtggtggtcggggagacaaactgcttaataagaggtgaggatcacttttgatggagagagaagacaccatcacatctgttggagggggagacagacaaaataatttgggagcaacaaactccatcactcaagagaaaagaaattaacacgtcccctgggaaacatactacaaaaatagttcacgaattatatacatggtggtacaacacaccagatataaaataattacgccgtctataaaaaatatatttgcgcaacaagagcaaatgtgttacagaaaacatatttaaacacggg

SEQ ID NO: 588524 - DNA, 287 bp, Homo sapiens
tgctgagcacagagcagacccgtcgtcaaaaaaaaaagaaagggtactacttctgctccttctgaggactaggaatcaacataaataaaatgtagcaaaagtagtcacaaactataactattattattgctttttttttttttttttcttgaaaaattttcgcccttgtgccccaggtggaaacccaagggcccactcccggctccccaaacccctccgcccccggggttcaaccactttctcctgtgcctcaccccccctgtgttaagctaggattccgggctttt

SEQ ID NO: 588525 - DNA, 2011 bp, Homo sapiens
gttaagtagggaaacccagacacaaaagagttcatactgtggttgccatttatgtaatgttcaagtataggcaaaaccaagctgggttgctatgctcacgagccagtacgtacgtctgacccctgacgagcgcagcaaagagggctctatctggaaccaccagccgtgcttcctcaaagactgggaaatgcacgtccacttcaaagtccacggcacagggaagaagaacctccatggagacggcatcgccttgtggtacacccgggaccgcctcgtgccagggcctgtgtttggaagcaaagataacttccacggcttagccatcttcctggacacctaccccaatgatgagaccactgagcgcgtgttcccgtacatctcggtgatggtgaacaatggctccctgtcctacgaccacagcaaggatgggcgctggaccgagctggcgggctgcacggctgacttccgcaaccgcgatcacgacaccttcctggctgtgcgctactcccggggccgtctgacggtgatgaccgacctggaggacaagaacgagtggaagaactgcattgacatcacgggagtgcgcctgcccaccggctactacttcggggcctccgccggcaccggcgacctgtctgacaatcatgacatcatctccatgaagctgttccagctgatggtggagcacacgcccgacgaggagagcatcgactggaccaagatcgagcccagcgtcaacttcctcaagtcgcccaaagacaacgtggacgaccccacggggaacttccgcagcgggcccctgacggggtggcgggtgttcctgctgctgctgtgcgctctcctgggcatcgttgtctgcgccgtggtgggggccgtggtgttccagaagcggcaggagcggaacaagcgcttctactgagtggcgcctccggcggggcctgtccctgggcccaggagccaatgtgaacttttttttttaccgggattataaaagaacaacaagatgaccttatttcttaactgtttcaaataaatgattaaagtattttcatacattttgcttcttgcccagcagggacaggtggcagagccgaggcttagggtctggcaccccccacagctggagacggaggctctcctggggctggtgtctcaggagcaggggtctgtgtctacagatgggctgtggcccctgcaggcagctgttgaacactggagggtcccccggaccacactggggtgggctcctgaggacgtggggaagtgattttgttttgtggtgtgtggcacgtgtggcgacggataaggcctgaactgggaaacccaggccttcctgttcaccctgagctgcttcctgagacagatgctcaagtgaggctgcaggcgcggtgtggtggggccgagtgtgaccgtttgctaaataaagtgaaatacccaaacctcaaaaaaaaaaaaaacaaaaaaaaacaaacaaaaaaaaaagaataaaaccaccacactacaaacaaccctaaaacaaaaaagggggggagggcgggggcccctaagagaagattatttcccccggagggaggcccacaaattgactttcaggtgtccacgcccagtgtttttttacttgcaaaaagaggtgggggccccacaaattagagggggagctgcttatataaacagagacaaggagcaggaggggcagttattaaaaaacacgcgcgtggtggtcggggagacaaactgcttaataagaggtgaggatcacttttgatggagagagaagacaccatcacatctgttggagggggagacagacaaaataatttgggagcaacaaactccatcactcaagagaaaagaaattaacacgtcccctgggaaacatactacaaaaatagttcacgaattatatacatggtggtacaacacaccagatataaaataattacgccgtctataaaaaatatatttgcgcaacaagagcaaatgtgttacagaaaacatatttaaacacggg

SEQ ID NO: 588526 - DNA, 601 bp, Homo sapiens
  misc_feature (1)..(1): n is a, c, g, or t
ngctgcaaattatcacatagtgtttctattgacaaatagtgctgagtactatacgaattcttatgtctaaaggtgattttggtaaggtttttgtcacacttaaagtgtatgaaaggtgatttcttcatgcagcttaagcacgttttaaaagggggattaaggtcaggctgtatatatacacagccacatgatgtataggaaaccatgctgtggtaatcagacttagaatgtgtcaaagtatgattgttaccagtgtccaggagtaatgttctatttttgcgcaaggatgtcaaataagtctcagtccagtacagaagtcatattcctgttctgttaataaagtaactgggtcattgatgttcaggtctttgtgtgcagatatgctcagtcaaatgatctatgaaatcattgatggtgttcaagaatgttgatggcagttagttttgtaggaccttgattgtagtttggagacattaagcattcaaaacgtaaggctgtagactcttgagacattcaggtattatcaaccaccgacactagacttatgtaggattgtcctacattctccctcgtgtaggtaggatataatgatagatcttgt

SEQ ID NO: 588527 - DNA, 1914 bp, Homo sapiens
agcaactgccattacaggcgtgagctactgcgcctggcccaatgttaaccagttttaagtgtacagccgtgcttcctcaaagactgggaaatgcacgtccacttcaaagtccacggcacagggaagaagaacctccatggagacggcatcgccttgtggtacacccgggaccgcctcgtgccagggcctgtgtttggaagcaaagataacttccacggcttagccatcttcctggacacctaccccaatgatgagaccactgagcgcgtgttcccgtacatctcggtgatggtgaacaatggctccctgtcctacgaccacagcaaggatgggcgctggaccgagctggcgggctgcacggctgacttccgcaaccgcgatcacgacaccttcctggctgtgcgctactcccggggccgtctgacggtgatgaccgacctggaggacaagaacgagtggaagaactgcattgacatcacgggagtgcgcctgcccaccggctactacttcggggcctccgccggcaccggcgacctgtctgacaatcatgacatcatctccatgaagctgttccagctgatggtggagcacacgcccgacgaggagagcatcgactggaccaagatcgagcccagcgtcaacttcctcaagtcgcccaaagacaacgtggacgaccccacggggaacttccgcagcgggcccctgacggggtggcgggtgttcctgctgctgctgtgcgctctcctgggcatcgttgtctgcgccgtggtgggggccgtggtgttccagaagcggcaggagcggaacaagcgcttctactgagtggcgcctccggcggggcctgtccctgggcccaggagccaatgtgaacttttttttttaccgggattataaaagaacaacaagatgaccttatttcttaactgtttcaaataaatgattaaagtattttcatacattttgcttcttgcccagcagggacaggtggcagagccgaggcttagggtctggcaccccccacagctggagacggaggctctcctggggctggtgtctcaggagcaggggtctgtgtctacagatgggctgtggcccctgcaggcagctgttgaacactggagggtcccccggaccacactggggtgggctcctgaggacgtggggaagtgattttgttttgtggtgtgtggcacgtgtggcgacggataaggcctgaactgggaaacccaggccttcctgttcaccctgagctgcttcctgagacagatgctcaagtgaggctgcaggcgcggtgtggtggggccgagtgtgaccgtttgctaaataaagtgaaatacccaaacctcaaaaaaaaaaaaaacaaaaaaaaacaaacaaaaaaaaaagaataaaaccaccacactacaaacaaccctaaaacaaaaaagggggggagggcgggggcccctaagagaagattatttcccccggagggaggcccacaaattgactttcaggtgtccacgcccagtgtttttttacttgcaaaaagaggtgggggccccacaaattagagggggagctgcttatataaacagagacaaggagcaggaggggcagttattaaaaaacacgcgcgtggtggtcggggagacaaactgcttaataagaggtgaggatcacttttgatggagagagaagacaccatcacatctgttggagggggagacagacaaaataatttgggagcaacaaactccatcactcaagagaaaagaaattaacacgtcccctgggaaacatactacaaaaatagttcacgaattatatacatggtggtacaacacaccagatataaaataattacgccgtctataaaaaatatatttgcgcaacaagagcaaatgtgttacagaaaacatatttaaacacggg

SEQ ID NO: 588528 - DNA, 2324 bp, Homo sapiens
gctgcactcaaccaggatgagaggctgcccggccaatgcagctgccgccccgtctgctgcggaggctttgctttttgactccctggcgacagtaaagttgaagagcttccggccggaggccaatagatgggacccccggaaggcggaagttctagggcggaagtggccgagaggagaggagaatggcggcggaaggctggatttggcgttggggctggggccggcggtgcctgggaaggcctgggcttctcggccccggccctggccccactacacctctctttcttcttttgttgttggggtctgtgactgcggatataactgacggcaacagtgaacatctcaagcgggagcattcgctcattaagccctaccaaggggtcggttccagctctatgcccctctgggacttccagggcagcactatgctcacgagccagtacgtacgtctgacccctgacgagcgcagcaaagagggctctatctggaaccaccagccgtgcttcctcaaagactgggaaatgcacgtccacttcaaagtccacggcacagggaagaagaacctccatggagacggcatcgccttgtggtacacccgggaccgcctcgtgccagataacttccacggcttagccatcttcctggacacctaccccaatgatgagaccactgagcgcgtgttcccgtacatctcggtgatggtgaacaatggctccctgtcctacgaccacagcaaggatgggcgctggaccgagctggcgggctgcacggctgacttccgcaaccgcgatcacgacaccttcctggctgtgcgctactcccggggccgtctgacggtgatgaccgacctggaggacaagaacgagtggaagaactgcattgacatcacgggagtgcgcctgcccaccggctactacttcggggcctccgccggcaccggcgacctgtctgacaatcatgacatcatctccatgaagctgttccagctgatggtggagcacacgcccgacgaggagagcatcgactggaccaagatcgagcccagcgtcaacttcctcaagtcgcccaaagacaacgtggacgaccccacggggaacttccgcagcgggcccctgacggggtggcgggtgttcctgctgctgctgtgcgctctcctgggcatcgttgtctgcgccgtggtgggggccgtggtgttccagaagcggcaggagcggaacaagcgcttctactgagtggcgcctccggcggggcctgtccctgggcccaggagccaatgtgaacttttttttttaccgggattataaaagaacaacaagatgaccttatttcttaactgtttcaaataaatgattaaagtattttcatacattttgcttcttgcccagcagggacaggtggcagagccgaggcttagggtctggcaccccccacagctggagacggaggctctcctggggctggtgtctcaggagcaggggtctgtgtctacagatgggctgtggcccctgcaggcagctgttgaacactggagggtcccccggaccacactggggtgggctcctgaggacgtggggaagtgattttgttttgtggtgtgtggcacgtgtggcgacggataaggcctgaactgggaaacccaggccttcctgttcaccctgagctgcttcctgagacagatgctcaagtgaggctgcaggcgcggtgtggtggggccgagtgtgaccgtttgctaaataaagtgaaatacccaaacctcaaaaaaaaaaaaaacaaaaaaaaacaaacaaaaaaaaaagaataaaaccaccacactacaaacaaccctaaaacaaaaaagggggggagggcgggggcccctaagagaagattatttcccccggagggaggcccacaaattgactttcaggtgtccacgcccagtgtttttttacttgcaaaaagaggtgggggccccacaaattagagggggagctgcttatataaacagagacaaggagcaggaggggcagttattaaaaaacacgcgcgtggtggtcggggagacaaactgcttaataagaggtgaggatcacttttgatggagagagaagacaccatcacatctgttggagggggagacagacaaaataatttgggagcaacaaactccatcactcaagagaaaagaaattaacacgtcccctgggaaacatactacaaaaatagttcacgaattatatacatggtggtacaacacaccagatataaaataattacgccgtctataaaaaatatatttgcgcaacaagagcaaatgtgttacagaaaacatatttaaacacggg

SEQ ID NO: 588529 - DNA, 230 bp, Homo sapiens
  misc_feature (209)..(209): n is a, c, g, or t
  misc_feature (228)..(228): n is a, c, g, or t
tattacgagttttcattcttttgagcaaaaaagtcgaactttttctgttgaacaaaatattcacaacaagggcagttgtgatacgaatagaacaaaaaaaaaaaaaaaacacttaaacttgttaggactccgatgagtttggggacttcgggatcaaccccagcaccagcagctaccaaccaccattccatctctcacttggaacagcnttagttagtcctgtggggncc

SEQ ID NO: 588530 - DNA, 2037 bp, Homo sapiens
gctgcactcaaccaggatgagaggctgcccggccaatgcagctgccgccccgtctgctgcggaggctttgctttttgactccctggcgacagtaaagttgaagagcttccggccggaggccaatagatgggacccccggaaggcggaagttctagggcggaagtggccgagaggagaggagaatggcggcggaaggctggatttggcgttggggctggggccggcggtgcctgggaaggcctgggcttctcggccccggccctggccccactacacctctctttcttcttttgttgttggggtctagggcctgtgtttggaagcaaagataacttccacggcttagccatcttcctggacacctaccccaatgatgagaccactgagcgcgtgttcccgtacatctcggtgatggtgaacaatggctccctgtcctacgaccacagcaaggatgggcgctggaccgagctggcgggctgcacggctgacttccgcaaccgcgatcacgacaccttcctggctgtgcgctactcccggggccgtctgacggtgatgaccgacctggaggacaagaacgagtggaagaactgcattgacatcacgggagtgcgcctgcccaccggctactacttcggggcctccgccggcaccggcgacctgtctgacaatcatgacatcatctccatgaagctgttccagctgatggtggagcacacgcccgacgaggagagcatcgactggaccaagatcgagcccagcgtcaacttcctcaagtcgcccaaagacaacgtggacgaccccacggggaacttccgcagcgggcccctgacggggtggcgggtgttcctgctgctgctgtgcgctctcctgggcatcgttgtctgcgccgtggtgggggccgtggtgttccagaagcggcaggagcggaacaagcgcttctactgagtggcgcctccggcggggcctgtccctgggcccaggagccaatgtgaacttttttttttaccgggattataaaagaacaacaagatgaccttatttcttaactgtttcaaataaatgattaaagtattttcatacattttgcttcttgcccagcagggacaggtggcagagccgaggcttagggtctggcaccccccacagctggagacggaggctctcctggggctggtgtctcaggagcaggggtctgtgtctacagatgggctgtggcccctgcaggcagctgttgaacactggagggtcccccggaccacactggggtgggctcctgaggacgtggggaagtgattttgttttgtggtgtgtggcacgtgtggcgacggataaggcctgaactgggaaacccaggccttcctgttcaccctgagctgcttcctgagacagatgctcaagtgaggctgcaggcgcggtgtggtggggccgagtgtgaccgtttgctaaataaagtgaaatacccaaacctcaaaaaaaaaaaaaacaaaaaaaaacaaacaaaaaaaaaagaataaaaccaccacactacaaacaaccctaaaacaaaaaagggggggagggcgggggcccctaagagaagattatttcccccggagggaggcccacaaattgactttcaggtgtccacgcccagtgtttttttacttgcaaaaagaggtgggggccccacaaattagagggggagctgcttatataaacagagacaaggagcaggaggggcagttattaaaaaacacgcgcgtggtggtcggggagacaaactgcttaataagaggtgaggatcacttttgatggagagagaagacaccatcacatctgttggagggggagacagacaaaataatttgggagcaacaaactccatcactcaagagaaaagaaattaacacgtcccctgggaaacatactacaaaaatagttcacgaattatatacatggtggtacaacacaccagatataaaataattacgccgtctataaaaaatatatttgcgcaacaagagcaaatgtgttacagaaaacatatttaaacacggg

SEQ ID NO: 588531 - DNA, 868 bp, Homo sapiens
gagtcggctcgagtactccccgtaacgaggaggtgttctcggccgtcccacccttcactgccgtctccgggctgcgccgccggagccgggacgcgcctccgcagccctcgccgcctccatccccgcggccgcagctcctctcgccgtccgcgcgcacaccatgacgaagaacgagaagaagtccctcaaccagagcctggccgagtggaagctcttcatctacaacccgaccaccggagaattcctggggcgcaccgccaagagctggggtttgatcttgctcttctacctagttttttatgggttcctggctgcactcttctcattcacgatgtgggttatgcttcagactctcaacgatgaggttccaaaataccgtgaccagattcctagcccaggactcatggtttttccaaaaccagtgacccgcattggaaatatacattcagtaggtctgatccaacttcgtatgcagggtacattgaaagacgcgttaagaagtctctaaaacatatactttagaagaagccagaagaacctcaaagtctgtcctgatggagcactttggtgaacagaagggtccagtttatgttgcatgtcagtttcctatttcattacttcaagcatgcgagtggtatgaactgatcctgattttggtattctcaaggaaaccttgtatgctggtgacaatgaaccgaatacttggataaagcctgaaaggaggggcacggctagatgggtcccacgcactgaaggatatccccaatgtaggagttaatctcataaggatgacgactccgactttcccatattggcacaaaaccgctgtgggtttcacacgcccggttgcgcagaagaaggctcctaa

SEQ ID NO: 588532 - DNA, 880 bp, Homo sapiens
cagcagatttgtccgcctctggttcccataggttgaaggccccctccccagatgctgcttaattactcttgaggttccggaccccattagcgcctggcttttcagaaccctgttttggccacctccccaaggtggattcgaagttgagggattggttctgaaccccaattctctttagaccagttccttcgatttttccacctttcgtataggatcctcgtggctttccccttgtggaaaggatggccacaagacagctggtaatcgttctctcccctgccagttctttaccccgaatgtaaccttgcagggttaagcccccttccccgggggcccctccgtgtggctcccgggtggcctctgctccgtcagagtcttgcccttgtgtctttatctgctttgccttgcctagtgccccgtcctgcttcgtggcccgggcatctggcacgggctgggaggaccgcctcttcccgcgttcctctggaagcatcccctctgggcctcctctctggcccgttgtgccgggcgcttctcccggcctcgtggctgtggtcctggacacggtctccccacccctggtggggtcccttgtttcggggggtggagtcctctagctccctggccccctcttccttctccctttgttttctctggtttttgtcccgcgtatcttcctgtagcttcttgagaaaagaggtgctccggagatataacttgagcttgggttggtttgtactgtgagagtgggatcattttcccgtaagatttttgacggccttgcttatcttctagagctaaagttgttaccctgaagtttaacccttctgactcggtttctttgggacccgcctgagccacttagtggaacccgtctttacca

SEQ ID NO: 588533 - DNA, 1060 bp, Homo sapiens
gctgcactcaaccaggatgagaggctgcccggccaatgcagctgccgccccgtctgctgcggaggctttgctttttgactccctggcgacagtaaagttgaagagcttccggccggaggccaatagatgggacccccggaaggcggaagttctagggcggaagtggccgagaggagaggagaatggcggcggaaggctggatttggcgttggggctggggccggcggtgcctgggaaggcctgggcttctcggccccggccctggccccactacacctctctttcttcttttgttgttggggtctgtgactgcggatataactgacggcaacagtgaacatctcaagcgggagcattcgctcattaagccctaccaaggggtcggttccagctctatgcccctctgggacttccagggcagcactatgctcacgagccagtacgtacgtctgacccctgacgagcgcagcaaagagggctctatctggaaccaccagccgtgcttcctcaaagactgggaaatgcacgtccacttcaaagtccacggcacagggaagaagaacctccatggagacggcatcgccttgtggtacacccgggaccgcctcgtgccagggcctgtgtttggaagcaaagataacttccacggcttagccatcttcctggacacctaccccaatgatgagaccactgagcgcgtgttcccgtacatctcggtgatggtgaacaatggctccctgtcctacgaccacagcaaggatgggcgctggaccgagctggcgggctgcacggctgacttccgcaaccgcgatcacgacaccttcctggctgtgcgctactcccggggccgtctgacggtgatgaccgacctggaggacaagaacgagtggaagaactgcattgacatcacgggagtgcgcctgcccaccggctactacttcggggcctgtccctgggcccaggagccaatgtgaacttttttttttaccgggattataaaagaacaacaagatgaccttatttcttaactgtttcaaataaatgattaaagtattttcat

SEQ ID NO: 588534 - DNA, 889 bp, Homo sapiens
tggatattttacaaaagcaaatgaactgtgacaatccacaactcccacagatgtgaattcagaaatgcatctgaaactccggtatgcctgacaatctattctttaagtttcattaacaaagtggtcatccaatcctttcacttacaattccttgcaggaatgtattgtctagcaggctagtctagtagtcgattcaagcagagggttccaagtatctgtttctatctctcgttctactgtattaggtgaggaactgccactatttcttgtcagccaacagatacttgctctgagcacacgccaaatttacatcacaacagcataaacagaaaccctaactaacattacacatcctctgtggcactttgacttccctgaccataatcgattttcattaagctttcacaattagacaacaataacagcatgagattcgaccaggattattcgaccaccttgaaacgaaagaacaagccctactatagctacatgtttcactttgagagttattctagtactggtttaccttatcacgtttcctggcaaattttcacaatccactctatcaacggcgtgccctcactttctacaatcttgctgaacactacacatgtgtcattaatgaccctcacttaaacacatgaaccacaactccaatctccttgcacacaccagtcgacacacgctattacattcattggaacacgcttaaaattctatcccattcaacttgacccacactgaaatttcataattaagtatcgacgcacccattaatcaatggtacacgtgagaccattacctgccatcacgaaattcttgacatatcagaatcgagcacacctcacatgggttgacccaatggactctacaaaccgcgctcgtacct

SEQ ID NO: 588535 - DNA, 1679 bp, Homo sapiens
gcaccatcaccgagatgtacgggaacacgcgctcagtggtctcatcattggggtaggtgaacaatggctccctgtcctacgaccacagcaaggatgggcgctggaccgagctggcgggctgcacggctgacttccgcaaccgcgatcacgacaccttcctggctgtgcgctactcccggggccgtctgacggtgatgaccgacctggaggacaagaacgagtggaagaactgcattgacatcacgggagtgcgcctgcccaccggctactacttcggggcctccgccggcaccggcgacctgtctgacaatcatgacatcatctccatgaagctgttccagctgatggtggagcacacgcccgacgaggagagcatcgactggaccaagatcgagcccagcgtcaacttcctcaagtcgcccaaagacaacgtggacgaccccacggggaacttccgcagcgggcccctgacggggtggcgggtgttcctgctgctgctgtgcgctctcctgggcatcgttgtctgcgccgtggtgggggccgtggtgttccagaagcggcaggagcggaacaagcgcttctactgagtggcgcctccggcggggcctgtccctgggcccaggagccaatgtgaacttttttttttaccgggattataaaagaacaacaagatgaccttatttcttaactgtttcaaataaatgattaaagtattttcatacattttgcttcttgcccagcagggacaggtggcagagccgaggcttagggtctggcaccccccacagctggagacggaggctctcctggggctggtgtctcaggagcaggggtctgtgtctacagatgggctgtggcccctgcaggcagctgttgaacactggagggtcccccggaccacactggggtgggctcctgaggacgtggggaagtgattttgttttgtggtgtgtggcacgtgtggcgacggataaggcctgaactgggaaacccaggccttcctgttcaccctgagctgcttcctgagacagatgctcaagtgaggctgcaggcgcggtgtggtggggccgagtgtgaccgtttgctaaataaagtgaaatacccaaacctcaaaaaaaaaaaaaacaaaaaaaaacaaacaaaaaaaaaagaataaaaccaccacactacaaacaaccctaaaacaaaaaagggggggagggcgggggcccctaagagaagattatttcccccggagggaggcccacaaattgactttcaggtgtccacgcccagtgtttttttacttgcaaaaagaggtgggggccccacaaattagagggggagctgcttatataaacagagacaaggagcaggaggggcagttattaaaaaacacgcgcgtggtggtcggggagacaaactgcttaataagaggtgaggatcacttttgatggagagagaagacaccatcacatctgttggagggggagacagacaaaataatttgggagcaacaaactccatcactcaagagaaaagaaattaacacgtcccctgggaaacatactacaaaaatagttcacgaattatatacatggtggtacaacacaccagatataaaataattacgccgtctataaaaaatatatttgcgcaacaagagcaaatgtgttacagaaaacatatttaaacacggg

SEQ ID NO: 588536 - DNA, 986 bp, Homo sapiens
gctgcactcaaccaggatgagaggctgcccggccaatgcagctgccgccccgtctgctgcggaggctttgctttttgactccctggcgacagtaaagttgaagagcttccggccggaggccaatagatgggacccccggaaggcggaagttctagggcggaagtggccgagaggagaggagaatggcggcggaaggctggatttggcgttggggctggggccggcggtgcctgggaaggcctgggcttctcggccccggccctggccccactacacctctctttcttcttttgttgttggggtctgtgactgcggatataactgacggcaacagtgaacatctcaagcgggagcattcgctcattaagccctaccaaggggtcggttccagctctatgcccctctgggacttccagggcagcactatgctcacgagccagtacgtacgtctgacccctgacgagcgcagcaaagagggctctatctggaaccaccagccgtgcttcctcaaagactgggaaatgcacgtccacttcaaagtccacggcacagggaagaagaacctccatggagacggcatcgccttgtggtacacccgggaccgcctcgtgccagggcctgtgtttggaagcaaagataacttccacggcttagccatcttcctggacacctaccccaatgatgagaccactgagcgcgtgttcccgtacatctcggtgatggtgaacaatggctccctgtcctacgaccacagcaaggatgggcgctggaccgagctggcgggctgcacggctgacttccgcaaccgcgatcacgacaccttcctggctgtgcgctactcccggggccgtctgacggtgatgaccgggggcctgtccctgggcccaggagccaatgtgaacttttttttttaccgggattataaaagaacaacaagatgaccttatttcttaactgtttcaaataaatgattaaagtattttcat

SEQ ID NO: 588537 - DNA, 1857 bp, Homo sapiens
gctgcactcaaccaggatgagaggctgcccggccaatgcagctgccgccccgtctgctgcggaggctttgctttttgactccctggcgacagtaaagttgaagagcttccggccggaggccaatagatgggacccccggaaggcggaagttctagggcggaagtggccgagaggagaggagaatggcggcggaaggctggatttggcgttggggctggggccggcggtgcctgggaaggcctgggcttctcggccccggccctggccccactacacctctctttcttcttttgttgttggggtctgtgactgcggatataactgacggcaacagtgaacatctcaagcgggagcattcgctcattaagccctaccaaggggtcggttccagctctatgcccctctgggacttccagggcagcactatgctcacgagccagtacgtacgtctgacccctgacgagcgcagcaaagagggctctatctggaaccaccagccgtgcttcctcaaagactgggaaatgcacgtccacttcaaagtccacggcacagggaagaagaacctccatggagacggcatcgccttgtggtacacccgggaccgcctcgtgccagggcctgtgtttggaagcaaagataacttccacggcttagccatcttcctggacacctaccccaatgatgagaccactgagcgcgtgttcccgtacatctcggtgattggtgttccagaagcggcaggagcggaacaagcgcttctactgagtggcgcctccggcggggcctgtccctgggcccaggagccaatgtgaacttttttttttaccgggattataaaagaacaacaagatgaccttatttcttaactgtttcaaataaatgattaaagtattttcatacattttgcttcttgcccagcagggacaggtggcagagccgaggcttagggtctggcaccccccacagctggagacggaggctctcctggggctggtgtctcaggagcaggggtctgtgtctacagatgggctgtggcccctgcaggcagctgttgaacactggagggtcccccggaccacactggggtgggctcctgaggacgtggggaagtgattttgttttgtggtgtgtggcacgtgtggcgacggataaggcctgaactgggaaacccaggccttcctgttcaccctgagctgcttcctgagacagatgctcaagtgaggctgcaggcgcggtgtggtggggccgagtgtgaccgtttgctaaataaagtgaaatacccaaacctcaaaaaaaaaaaaaacaaaaaaaaacaaacaaaaaaaaaagaataaaaccaccacactacaaacaaccctaaaacaaaaaagggggggagggcgggggcccctaagagaagattatttcccccggagggaggcccacaaattgactttcaggtgtccacgcccagtgtttttttacttgcaaaaagaggtgggggccccacaaattagagggggagctgcttatataaacagagacaaggagcaggaggggcagttattaaaaaacacgcgcgtggtggtcggggagacaaactgcttaataagaggtgaggatcacttttgatggagagagaagacaccatcacatctgttggagggggagacagacaaaataatttgggagcaacaaactccatcactcaagagaaaagaaattaacacgtcccctgggaaacatactacaaaaatagttcacgaattatatacatggtggtacaacacaccagatataaaataattacgccgtctataaaaaatatatttgcgcaacaagagcaaatgtgttacagaaaacatatttaaacacggg

SEQ ID NO: 588538 - DNA, 742 bp, Homo sapiens
ggtgaaaatggtatttcattgtagctatttaggattatctaagttatgagtgaagatgagcatctttacatgtgtttaaaagccatttgtatgttcttttctgtgatctttttcggtagaatcctttgctcatttttctattggattattcatctttttcttattcatagtggtaagagctctttatatattgaggaaatcggctcgtcgtacaccgtgggtgttataaatattcattccactttgtcctttaatttctcttctcctcggagaaagtctcatcctggttgcccagcctgggcgtgcagtgggcccgatctgggccaggttcaagcgatcctggtgcctcatcctcccgaggaactggggattacaggcgcgtatcaccacactcagctaatctttggcatttcttcacgtagcagacagggtttggccatgtgggccaggctggtcttgaactccttgatctcgggtgatccaccttgcctcgacctcccaaagtgctgggattacagccaagagccacctcaccgtggccatggtcctttaaatttggaccttggcatttcacactacagtttcaaaacatattggaactcactaatatgcaactttcacgcctcggaattgtggcatgacttctaaaagcactcttcaccaatcctgggcatctctttcaacccattctcccaggctccccctctagtactgtaaggtctgtaacgcgctcaaatctact

SEQ ID NO: 588539 - DNA, 149 bp, Homo sapiens
tacatgatacgaccgagtgaacccacgatatcggtccctagccgttaattctactatcaacattactaactaagtggctcctttttcctcttgcttatagactcacttccttcctcatcttcttcttcttcctctatgaccgaatatcg

SEQ ID NO: 588540 - DNA, 280 bp, Homo sapiens
gtcacgcccacaatgctggggactgtcagagaggtagaagagagtagcaagggtagaaagtctaggccagagggctaggcgcggtggctcacacctgtaatcccggcactttgggaggccaaggcgggcagatcacgaggccaggagatcgagaccatcttggctagcacggtgaaaccccgcctctactaaaaatacaaaaaaattagctggacatgatggcagacgcccatagtcccagctactcaggaggctgaggcaggagaatggcgtgaaccca

SEQ ID NO: 588541 - DNA, 1585 bp, Homo sapiens
  misc_feature (628)..(628): n is a, c, g, or t
  misc_feature (1585)..(1585): n is a, c, g, or t
ggccgcctggatgcgacgcagagggtccaccttctacaccccggaaaaacccctcaaggcgatagcccctgaccccactgccgtgctctctcggagaaggaggagaactatgcttgtatcaggcatctatccatcatgatcactcacgctgccaaggcggagcatggcaacgtccctagcggctcagatgccgtcctctctcctctccatgcggcgggcacatgaagcttccttgtgatgttgtcgtgctgaggaggttcagggatggggcgtgtcgacagtggacgtgacgcgaacaggtgctcctcgtgcccccccacaatagcgaacaactttttgactggcagcaatcgttttgaagacacctccaaaaccaaggacacttcacatatagctcggcttcgaggtcatacgacataggccttcgaggggcaaaggctcactagtattgggcagttggctcctttgcgaaacttccatgtagacttttgcgtcgagtgggagttaccacgaagttatcaaactttggaaaaatgccctaccgggcaccaagggatttcttcaattttacttgcaattgcggttccacccagtcaagtcaatttcgtctctcgccttgcggcgaaanacttatgagaccaaaggaggggtcagataggaagtgttcgcttacaaaaaagcttgcgtttgggagaagagctagaaggagcgtgacccgaactatgaggaaccccaacggtggcaccctatattaattcgatccccaccacggggctccaaccaatggggtttccccaggtcgtgtgaaaggcgttttggatgggggcgaccggatcacggctgtgcgggcggggactttccacccaaaggaggcaagacctccaaagtcccttctagaattgtgtaaatatagcgacctttgcgagcaccggtgcggtttttgctccacattaaatcccttttgggttgtgtgatggaaccaatcttcgaacttccaaaagggtatagatcacaaacgctcgttacccattacagacgccgacgctaacggggggctctttagaaaggtgagctctcaaaggggagcgcaatcccaacttccgttgcacaggacaggcgctctacattagaccgccttgaaagaattgaaccaagtggttcacttaaatcctcttggtatcctttcaccctaacgttaaactgaaaccggggaacaggggttgggcggtttgcgagccaacccctgtggagagacaggattttaaaacagaacattaagtgttgccttcccccaaagtttccccaagcgttaggccaaggacgacaccccgcgcagagttccccccttgaaagtaacctggaacgggggggtatctaacagaggtagcctttgtagaaaattgggacctcttacaagtgctccctggtgtccacaaagccccgttgcgccattttaccccacacggtggtatggactcgcaagcatactctgggtacgtgtgaactcggtacaatagcagtcttgctggtggagaactcacaacggtcttttcaattctcccgctcttcctttggaataattcgn

SEQ ID NO: 588542 - DNA, 290 bp, Homo sapiens
gaacaaagccgggtgtcagacactttggctgtcatgaagactggctttactttgagggcaactgagaaaccactggaggattttgagcaaaggagtatgtgatctgattattgttacatagaatcacactggctgtctatattgagactagatgaaagagaatttggggcacgagcaaagcaaaactggagactagttaggaggctatgcagttaccagatgagaatcatggtggcctgtctcaaggtggtagcagccaaagcggtggaggcattcagattctggctgta

SEQ ID NO: 588543 - DNA, 765 bp, Homo sapiens
tatgtccaaattgcattttttgttcttaaagttgtcgggttggttttagttaaacaaactggctctcatttttctattaaagcaattcaacaagaaattggggcttgtggcaaacccaaaaatttggttccaagctcctcacaaaatttcctaatgaaaattaaagctcgagaacttttgccttaaaaaatcatagggggacattttttccaggcgggcttttttccatcacattccccgtccttttcctttaaactgccggtgtttgcaaagggaaggcaaattaattttattttcatgagcttattataattttgatggaaaaactgaaatctttttaaaatcacattgtcaaactaaaatggctttttctccattactcgcttactcccttccaataaaacacttgattccaagtaaactgaaagtgggacaatttccaaatactcagatggaggacgttcatcgaaggcattcctaaatggttgccaaattttgacaaaccgagcacaggcagtggttttaaaatacttggcaaggtgaaaaacaatgattcccattagctacagttatcattattgagcctgggaaaactctggctaatatttttccataaacattttcccatcccaaatgattaacaccccccagcggtttgcttaaagagacctttccacaaccggtttctaatgatccaattttttttgaaccttaaaacttgcaacggacttaaaaccactttggatttcttcgaggttgattgat

SEQ ID NO: 588544 - DNA, 198 bp, Homo sapiens
tatgaggctagcgcaggagaattgctagaacccttgaggtggaggttgcagtgagccaagatcgtgccactgcactccagcctggcgacagagtaagactccatgtcaaaaaaaaaggcaaaaaaaaacccaaccaatacaaaaacccccaaaaaaacaaattattcaagcttgacccacatagccatgctcatcagg

SEQ ID NO: 588545 - DNA, 920 bp, Homo sapiens
  misc_feature (156)..(156): n is a, c, g, or t
gtgtgtctttccctcctcgtggacttgtgtgccacgttgtacacttgtctgcctctacgcagtagtctccttccgctgtgtatctgctctgacgatgtgttctttcggtgtactactgtgttgttgcctctcgctgtcccggtccccggtggggancccttccgcccctgtgtgtttacccccccccgatttgggttcgcccctcccattgcggggttttcgcccgcccccgatgacctcggcgcccgcgtgtcttttggggaaggactgcccgcgcacattctcttcgttaaaccgctcctatattgccgcattctttcccttgggctggtgccgggcaaatatcccccggtttttgctcccctccgcccccgggggtctgcgcccaaatttccgccgcggttatgccaccacacgccccacacaccacgcgtccgtgtttacttccccggcgatcgaacattacaggggcgctccttcccgacacccgcctgggcgcctccttacaaggtgtgtgaccctctcccccaggtggcgtctcgcccccaatcatgcacgacggcgtctgccccccccccaactatgttttagccgcccgtggttcgttccgcggcatccctctgtccccctggttgacaccgcgtcttgttgcccgcagtcctcggtactacctctccccgcgttccctttccacgtggcccaagacctctaactccctcgagacaccgtggctttctataccccccgtccccatcgccccccgcgtccttcggcgccaccacgagtgggctcctgcttacttccccgccggccccctcccgggtaggcggcggcctgcttaccccccgcggtcttcacccgtccaccccccccggggccctcttccctaaaaccccccccccttggcagcacacatgaca

SEQ ID NO: 588546 - DNA, 358 bp, Homo sapiens
atttgatcttaacacattatatgaatgtgtcaaaatatcacatgtaccccataaataggtacaattatgtatcaaccaaataaattaaaaataaaatacttctaaaaagtaatttgaggccgggtccggtgtcacgcctgtagtcccagccaggatgactatagttaataatttattgtatattttaaaatagctagaagatttggaatgttcccaacacaaagaaatggtaagtgcttgagttgatggatatcctaattatcctgatttgatcttaacacattatatgaatgtgtcaaaatatcacatgtaccccataaataggtacaattatgtatcaaccaaataaattaaaaat

SEQ ID NO: 588547 - DNA, 824 bp, Homo sapiens
  misc_feature (1)..(1): n is a, c, g, or t
nggcgggaccgcggttcctcatgggtcgtgggtgtaccgaccgcgccggtgcgtgtcgctgttgggccgacttgctccctaggtggtttgcctgtgcggcttgggggacgtctgtttcttggccccgcccctacggggcgggcgttcttctcataccccaggggtgccgccccccatgtgtgcctgccgggggccacccccctggcggagcactccaattgtctgtcccgcgcggtccccgcttggtcgctcgttggccgtatgttccacgccgcggggtgcatttgtaccagcttcttggtgtgtgcgcacacgcaccgagctttttttctggggcacatatcttcccgcgatgtgtacccaccggcggctgattgtcctggtgaccgttcctcactgtgaggtgactctgctccccaccactcgttggaacactcccctccattcattcgcactcgatgggcgctacgcttcacgcttcttgtttcgagccacgcccacgcaggactccatgatactcatagttctactggctagatgtcagagagcagaagctcccttcgctcctctttgtccggcgcctgacagtatctgcctccaattaagttggagaagaaccccccccgctcaccctcgcgggggagaaaaataataggaggacccccccccccgcgccgcacaccactctgatgagacccctagagaactaagaagatgtctcgtgccccacaaaagcggagcggggatcggacgccccgcccaagctcgaggtttccgccccacgccccctcaggaactacgacagactttcgccccacaaaaca

SEQ ID NO: 588548 - DNA, 1119 bp, Homo sapiens
  misc_feature (363)..(363): n is a, c, g, or t
  misc_feature (365)..(365): n is a, c, g, or t
  misc_feature (462)..(462): n is a, c, g, or t
  misc_feature (471)..(471): n is a, c, g, or t
  misc_feature (481)..(482): n is a, c, g, or t
  misc_feature (496)..(496): n is a, c, g, or t
  misc_feature (500)..(500): n is a, c, g, or t
  misc_feature (749)..(749): n is a, c, g, or t
tgtctaaaaatcttaagggataggtttcaggtgggttccctggggatggtatgtataaggttaaactctggctggccatcttggtttttatttatttttaccctttaattattggataaggtggattaattatggcttggattaaaactttggaaattacaattccaggttggtccttggcagagggtatgcaataaggtcccaccaacaaacatttggcaacagccatctcttaccccaattttccttccaccatctcccaacaatttattcatattggttccccatggtccatcaggtggataggggcaagaccaggttaccagcagaccagacggtcccttcctgcgtggttctcccctntncataggttggttcagcatcatagtgggccaacccaacaggcccagcagaggtggtctacatggttgggggttcatcatgtcacagagttcccatctntctcaacanataggggagnnacaccataggaccncagnagagtcttccccagacatgtcattaccacaggtatccttatgtccagacctgtccatatcacacatcagagccccacatcatggtcttcctttaaatcaggttacaaggtcttccaacacatcatatcgtcgtctcaatgttcaacacagttgtccatctcctcccttggaccacatccttctgggttccctttcaccgcaacacttcatcccttcaaattaagagttcctcattataggggtccagcnctgtccagtccttccccttttttatgttattatattgtatggagcaaagggagagtttcggcttccttggttaggcccaacgccgggaagtacccaacaggtgggagatcctccggcgacacctgggcactcctccgagccttcctgggggttccaacgtggactctcccgagtgcggcctcccccaaggtagcgctggggattaacagcgagggcctgcgcaaccaatggcccagggccacatacagagtataccacggacaacagtggggggttaccaggggattggcacagactggtcctgaaatcccggaacacaaatgaatccgcgcgcgcccaccctccacgcgggggcaacggcgaagcccgc

SEQ ID NO: 588549 - DNA, 413 bp, Homo sapiens
ctgtcctagagacctcatccccatttccagtctgatttatcagtgctaagtggctgaaaggtctggaataatatacatcaaaaagaagaggcacagctgttgatactcagttgcatgcatcaggttctatgagggtgggggaagtgttctgatgaagtaaaagagagtaagacaatgtaactggaacattttagctaaagttctttcagttcatctttgtctttggctccttgtttcaggatgcgtgtgaactctatgtaattgaaattcccctttttgtcaataggtgcttctctatacagctcatccacttcctcatctgtaaaccgatcccccatggttgtcatcagctctcttaggtgatcttcctgaatggtgcctgttgcttcttcatcaaagcaagtcaaggcgtt

SEQ ID NO: 588550 - DNA, 531 bp, Homo sapiens
  misc_feature (379)..(379): n is a, c, g, or t
gaggtgacaaaaaaaaaggtttcttctcggttcttgggattttttcttttctcttttggtttggggaactccagttatagacatatgttagagtttctcattccagggttcttagctctttcattcgttccatctctcgatttttttttctaaaaggtcacctttatgtctcttatgctcttttatggtctcaatcttagtttggtctcccgaagttctggagtctaatcctacttctaatccatccttccttcttttggagcttggggcttttagcctctctaccattggtgcggatcggggggtatccttttaagccgggtatgaggtaaattctttccggaggcggggggggggggaatggctttctggtttggtnaatatctcagttggggctaggggttccgggacaaaggggctgggtggtagagtactagtccatggtccctacagctcaagagaggctccggtcggccagctcaggatagtcagagaaggcatcctgtagtcccctctacactagtgggcttt

SEQ ID NO: 588551 - DNA, 586 bp, Homo sapiens
cgggaccccctcgagtcgaaggattacaagctgatactgtgtaagctggccacggaagagcctgtccatgaagagcacgaggatgatgactgccaggtcagcaacccaagcacaggagacctgttggatctgagctccttaagtggcatgggcgtgattcacggctgcttacagcgagaaggagttggtttacatgagcatctgtggggagaatgaaaactgccctcctggcgtgggggcctgtttggacagaccaggattagcgtgggcaaggccaacaagaggctgagatacgtggaccaggtcctgcagctggtgtacaaggatgggtccccttgtccctccaaatccggcctgagctataagagtgtgatcagtttcgtgtgcaggcctgaggccgggccaaccaataggcccatgctcatctccctggacaagcagacatgcactctcttcttctcctggcacacgccgctggcctgcgagcaagcgaccgaatgttccgtgaggaatggaagctctattgtcgacttgtctccccttattcatcgcactggtggttatgaggcttatgattgaaagtgag

SEQ ID NO: 588552 - DNA, 469 bp, Homo sapiens
actaccgcatggcccaccataattattcccatactccttacactattcctcatcaccgaactaacaaatattaaacacaaactaccacctacctccctcaccaaagcccataaacatacaaaattataacaaaccctgagaaccaaaatgaacgtctgttcgcttcattcattgcccccgcaattctaggcctacccgtcacagtactgatcattctatctcacactctattgatccccaccaccagatatatgatcaacaatcgactatttactacccagcactgacccagtaaactaatctaaacccacatgatagcgcatacacaacactaacggacgaacctgatcttcttatactagtatccttaatcatttttattggcacaactaacctcctgggactcctgcctgactcatttacaccaaccacccaactatctatcctagctggcacacccctttacgcg

SEQ ID NO: 588553 - DNA, 149 bp, Homo sapiens
cataatcttagactgggaaaccacatgatctgctgaatctataaaggagaagtcttattggatttctctagtgtcacttcgggtctgttgcaaccaacgtccttccgaatcctatagagaagaagatgtccttgtgttggttcccacag

SEQ ID NO: 588554 - DNA, 882 bp, Homo sapiens
tatttctcatgggtcactgaggcttttaattttgagcaccaaaaccaccggggatctaccctgtggccaccccgtagattgacacgaggcatcacattgacctctagacacttgagtgagaaagtagaggctgagaaaaacaatgacttggggccaatctacactgacatgcaacacgctacaagctgccaacagggcctccaggaaacctctgagcattcttgataaaagttctaaggacacgcggtaccagaactccacgtggtggtgagtggcgctaactagacagaggacccctgagaagttgttaggtacggggaggcctcagagtcttgcctagagctagacaccgaagggcaagaaggttcctgagtgttaaacccaagcagagagttgtaacacgcagagaggcaatttaaccttgacaccaactagccatacacactagtgtgccccacagtggcgatatctctaacagactatctcacatagccgcgcaacaaaaaccttcaagaccccactgctgtgctttgactccccgacgagctattccctatactgtatccaaaaaattataccgtgaaagaagacaaagacgtagagaagatggagatcaacatgaggggacacacagaaagcagcgcgctcctcctaagatgaaatgcctgagtcctaaaatgatggtgggagtcacaccaccgaggtgctactttatatgcaaaacaccaataggagccccccttaaagtgtgttgccacacacaaacgggacgtccccaccacaaggacaacaacgcgcaagcggaataaaatgagaggagcaaacattgagacaaccggaggaaaaatatccactctttcacagtattatcttcccccccgc

SEQ ID NO: 588555 - DNA, 790 bp, Homo sapiens
ggccctaacacgccgtggtgtgtgtggcatggtcatgtctctcagtgatccctgaaaagttcgagcatatttggcgagtactcaatcatcgatacatcgaatggtgcggcggcacaatagcctttgccatcatggccattaagggtcgtgggccgaacgatatgctcatgtggatgttgcaggacaatgcaagaccattgaccttcgagcaagaacggcgctgggagaacgtcgacttgagcgatgaggtgtgaacgatgtgatcatcgatgtgatgctagtaatctcaccgcctaatagcaagatcccagatgtggttcttgacacagacccggacaggattgtatactggactgggaagaatttaccaggcgcaggttcgctaatgcgcagaaagggtcatggcatacataacatgcttcctgtggaacgaccacctggaaagtcagactcgatacgaacatgactctccggggtgccccactaggacgggacatggcggttcacgttttcgtagagggggccctatccggtggttttccggaagggacccaaggccacacgaggcccaaaagggaacccaacctgtggctccggcgccggtttgttggcccatgaaaacccaggtttgtggggttcgttaggttacgcaacaaggaaaaagaaaattaaacggttcacttgggttaagagggccgttgtggtactggaggacaaatgtcaacacgtaaacggtattaacttatttagccgctaactttgagagaacaaaaagaacgaaacaccagaa

SEQ ID NO: 588556 - DNA, 100 bp, Homo sapiens
ctgacttagaggatccccttccttagatcatccaatttattggatttatcgaaatgtttcattgtgggagcagacaatgtgggctcaagcagatgcagca

SEQ ID NO: 588557 - DNA, 443 bp, Homo sapiens
  misc_feature (119)..(119): n is a, c, g, or t
  misc_feature (126)..(126): n is a, c, g, or t
ctttttcttttgttcttaatacctaatacctaaaattccacttcagaaaatttagatttaaaatgcctaaatctattaccacatttactatcacccctaccagaatgcaggctctacgnaatcagnaatctttctttcttccagtcatggatttatcccacacactgagaatagtgccttgcacggagcaggccctcaggaggtaattgttgaattattgaccatcgcccatgcaatttcccctgtatcccactgctctccaactccttagacatctgccgatgtctcctctgcaaaggtctgccacctacctacctccaaatcatgtccacaaatacagcacattaggcaaggaagaaccgagagtactgcattttaaataaagcaatatttcatagataatgccagaatgtcttctgaatctcatcaaatcatttagtaaa

SEQ ID NO: 588558 - DNA, 135 bp, Homo sapiens
gcaggtccttagacttttaagctgtctcgtactgtctggcgagcacttaacgttgatttaactgttgaggtttagggctaagcgtagatggggtatctaatcccagcttgggtcttagctattcgtgtgttcaga

SEQ ID NO: 588559 - DNA, 276 bp, Homo sapiens
agagaggaagggccaggtttgcagcagctcaagtctcactcaggctgatgccccggagctgggggccttttgtaaccctttttcttttttccttttggaaaggccgtgacttttggccaccaaggtgggggggaaagggggcgacttgggccaatggaaaccccaacttcaacttcagggtccaagcgaatcctcgggcaaaaccctccggaggggtggaaataaagggcccccacaacaagcccaagtaatttttttaattttaagaagagacgg

SEQ ID NO: 588560 - DNA, 1003 bp, Homo sapiens
tgtgacatttgggctgatatgtggatgatgagagaaggagtcaggcaggcgtgccctggaggagatagcgatgcgcacagcagaagccctgcggacagagccagctgaacagcccatgtggtgccgagcaggggagaactgtgggaagtgaaatcgttccacggatgatatcaacagacgggagtactgaacttgaggatccagtaggatgtttgcagatcccttcttaggcctcaactgtgtttcctcggtttcccctgtgttgcaggatgctcgtcagaagttccgtatctgttctggttgaagacaacggtgaaactggatgaactggtgaagaagatcggcagaagctgtggaagactccaagccctacgtgggaggcacggagggatggccgaggtcaggcgtcacgctggaagtctcacgcaaagtcgcatcgcgaggaacttccagaggggacacagaggtgctccgagccggcataggagaccaatctctcctggcccgagtaggcgtggttgcgtggaggatgacatggacggtataggtgtcagactccgcctggagggagatgcctgcaagtcacgccactcagagggtcatcgacgcggagcagacaagaacagggagcgagctggtgcatcaggaagacggaggcaggtacaagtgcgcaaggggcgaatgggacggctggagaagaagactcagagagcatcacaaggtccaagcctacttgacccggcaagactatgtgcgggtcgagcacgtggcaccgacgggatgactgggggcaaatgacctggaaaggaggcacgtggccgaacctggatgtcagagaaccgacggggcccaggcagggcccgatggggtggagggcgcccaccctggtcgcggcacagcgggcctggccggagcgacacccgcatcggtagtcgcgcacgcggcacgaaccgcgacaccggggagcccaatcggcacacggcaggagagtgctgctcgcggg

SEQ ID NO: 588561 - DNA, 732 bp, Homo sapiens
  misc_feature (103)..(103): n is a, c, g, or t
  misc_feature (312)..(312): n is a, c, g, or t
  misc_feature (315)..(315): n is a, c, g, or t
  misc_feature (567)..(567): n is a, c, g, or t
  misc_feature (681)..(681): n is a, c, g, or t
aaaggaacttgcaattttaaagtatcctaaaatgaatttttcaaaagttttttgtaaggatactgtctaatggctttggagataattgagggatgctgagatnggctgctaggattggtcataaaaccagtactattaacatatccttacatatactggatatgaagaagttgtgagagaaaataattgcttaataagcatttcttcaattgtccctggaaatggaggttaataggttctggtaatgagcagtagaaggcgggaaagggttttgtaacacaagtttgggaaattctgctcttgagattcacnatnagcaagattaaaggttccagaaagttctaaatatatacctaactttaaccaggtagttcttaaacctttaattatgaaacctttctttacttcattcctttttagcatccggtgaaatagtgttctgtttctgtggtttgagaattttttgaccgtatatttcaggtgcctagaaagtgttagaagatacttgcgggtatttgaaatgatggctctatacttggcactctgccctttgcagagatgactaanataagagagttgccttcaagaaattgctgcctgatcagaggaaagaaaatgaatgcacatgcaacagcttcaggtgtacacagtccttgttcattgccatgtcatagaccacangtagaatgagtagttagagactggagagctcctgggtttgggtctgcgtct

SEQ ID NO: 588562 - DNA, 141 bp, Homo sapiens
tgacaaattggctccaggtaggagtctcagaaaataaacagaagaaaacaagccccctcccaaaagaagtatgacacacacattatgaagaaaccccaaggtttcatgcaatgggtaggcaacgatgtaagaagcccaccc

SEQ ID NO: 588563 - DNA, 1953 bp, Homo sapiens
cgctgaggagactgtacagtgtggagtcgggggggcgcagtcagggagggaggcagagtggcagaaacagggcccagccagaccccagctcctccacccacagcctggagagcttgggaaagtcagtgtcttctctccgcctgtacaagggagcgtaccagtgggccccatcccaggatgggcaggacctgtgggaaccttgtgtggaggagagaggctgtgggctggggtggagtgtgggactcaggtcctgggagaccctcctggggggctgccgagagcatccagctgtgggctgggagagcctgtgaccaggccgcgctgctccagaaagggccctcagaccacagcgtgggggtggggcttggatatgtagactcctgggcctccccttatccagagttggactcagaggagcccaggagtctggttttaactggcttcctgcagcagaaggcagcccaggcttgtcgctggggtcccgggtccctgtgggcttggtcctctctctgccccaccctgcctggggactgcagagctggctgggatgggcttcacctgacctctgcccctccccggtgaggggggtgagtacgaccggcctgccaccgtggcggctgtcctgttccatccccactgcctctgcgcccctgatcccggccgtgctgccgtttcagctcccccgtttcttctcccccagacaacgtggacgaccccacggggaacttccgcagcgggcccctgacggggtggcgggtgttcctgctgctgctgtgcgctctcctgggcatcgttgtctgcgccgtggtgggggccgtggtgttccagaagcggcaggagcggaacaagcgcttctactgagtggcgcctccggcggggcctgtccctgggcccaggagccaatgtgaacttttttttttaccgggattataaaagaacaacaagatgaccttatttcttaactgtttcaaataaatgattaaagtattttcatacattttgcttcttgcccagcagggacaggtggcagagccgaggcttagggtctggcaccccccacagctggagacggaggctctcctggggctggtgtctcaggagcaggggtctgtgtctacagatgggctgtggcccctgcaggcagctgttgaacactggagggtcccccggaccacactggggtgggctcctgaggacgtggggaagtgattttgttttgtggtgtgtggcacgtgtggcgacggataaggcctgaactgggaaacccaggccttcctgttcaccctgagctgcttcctgagacagatgctcaagtgaggctgcaggcgcggtgtggtggggccgagtgtgaccgtttgctaaataaagtgaaatacccaaacctcaaaaaaaaaaaaaacaaaaaaaaacaaacaaaaaaaaaagaataaaaccaccacactacaaacaaccctaaaacaaaaaagggggggagggcgggggcccctaagagaagattatttcccccggagggaggcccacaaattgactttcaggtgtccacgcccagtgtttttttacttgcaaaaagaggtgggggccccacaaattagagggggagctgcttatataaacagagacaaggagcaggaggggcagttattaaaaaacacgcgcgtggtggtcggggagacaaactgcttaataagaggtgaggatcacttttgatggagagagaagacaccatcacatctgttggagggggagacagacaaaataatttgggagcaacaaactccatcactcaagagaaaagaaattaacacgtcccctgggaaacatactacaaaaatagttcacgaattatatacatggtggtacaacacaccagatataaaataattacgccgtctataaaaaatatatttgcgcaacaagagcaaatgtgttacagaaaacatatttaaacacggg

SEQ ID NO: 588564 - DNA, 805 bp, Homo sapiens
  misc_feature (176)..(176): n is a, c, g, or t
  misc_feature (385)..(385): n is a, c, g, or t
  misc_feature (388)..(388): n is a, c, g, or t
  misc_feature (640)..(640): n is a, c, g, or t
  misc_feature (754)..(754): n is a, c, g, or t
aattgagacagagtgtcactcagtcacccaggctggggtacagcggcgtgttctcagcccactgcaaccttcacctcccaggtccaagcacttctcccccctcagcctcccaagtagccgggattacagacgtgtgctaccacacccagctaatttttatatttttagtagagatnggctgctaggattggtcataaaaccagtactattaacatatccttacatatactggatatgaagaagttgtgagagaaaataattgcttaataagcatttcttcaattgtccctggaaatggaggttaataggttctggtaatgagcagtagaaggcgggaaagggttttgtaacacaagtttgggaaattctgctcttgagattcacnatnagcaagattaaaggttccagaaagttctaaatatatacctaactttaaccaggtagttcttaaacctttaattatgaaacctttctttacttcattcctttttagcatccggtgaaatagtgttctgtttctgtggtttgagaattttttgaccgtatatttcaggtgcctagaaagtgttagaagatacttgcgggtatttgaaatgatggctctatacttggcactctgccctttgcagagatgactaanataagagagttgccttcaagaaattgctgcctgatcagaggaaagaaaatgaatgcacatgcaacagcttcaggtgtacacagtccttgttcattgccatgtcatagaccacangtagaatgagtagttagagactggagagctcctgggtttgggtctgcgtct

SEQ ID NO: 588565 - DNA, 509 bp, Homo sapiens
  misc_feature (21)..(21): n is a, c, g, or t
  misc_feature (130)..(130): n is a, c, g, or t
  misc_feature (138)..(138): n is a, c, g, or t
  misc_feature (160)..(160): n is a, c, g, or t
  misc_feature (169)..(169): n is a, c, g, or t
  misc_feature (178)..(178): n is a, c, g, or t
  misc_feature (207)..(207): n is a, c, g, or t
  misc_feature (308)..(308): n is a, c, g, or t
  misc_feature (336)..(336): n is a, c, g, or t
  misc_feature (347)..(347): n is a, c, g, or t
  misc_feature (395)..(395): n is a, c, g, or t
  misc_feature (400)..(400): n is a, c, g, or t
  misc_feature (408)..(408): n is a, c, g, or t
  misc_feature (500)..(500): n is a, c, g, or t
gtggtacatgcgagccttggncccgccgcaaaggggcggtcaaggggctggggggaaggtggtttgctctttccccctcctcctctctctttcctaccgggctttaagtccgtgggagagaaagtttttnatcagttngaactgataaggcctcgggggngtggggggngggtttggntgttcagtaatataaaatgtgtttaaggnaaaaaacagcccaggcttcccagcagttgcccatgtgttgggtggtttagcagcctgacctctacatctaggcaagggagtggggggggtggttgctgggnattggtgtaggtttatggggggggcggntaaggttttgncgtgggctgtggacacgtttacaaacattcatagccccttcccttagncctgntttgttgnaagggagctgctgagagtgagttacagctgggcacaaagtgtcttgtgagaccagctatagggtctaatgcagtgaagtcagtcatttaggncctattttc

SEQ ID NO: 588566 - DNA, 1612 bp, Homo sapiens
gctgcactcaaccaggatgagaggctgcccggccaatgcagctgccgccccgtctgctgcggaggctttgctttttgactccctggcgacagtaaagttgaagagcttccggccggaggccaatagatgggacccccggaaggcggaagttctagggcggaagtggccgagaggagaggagaatggcggcggaaggctggatttggcgttggggctggggccggcggtgcctgggaaggcctgggcttctcggccccggccctggccccactacacctctctttcttcttttgttgttggggtctgtgactgcggatataactgacggcaacagtgaacatctcaagcgggagcattcgctcattaagccctaccaaggggtcggttccagctctatgcccctctgggacttccagggcagcactatgctcacgagccagtacgtacgtctgacccctgacgagcgcagcaaagagggctctatctggaaccaccagccgtgcttcctcaaagactgggaaatgcacgtccacttcaaagtccacggcacagggaagaagaacctccatggagacggcatcgccttgtggtacacccgggaccgcctcgtgccagggcctgtgtttggaagcaaagataacttccacggcttagccatcttcctggacacctaccccaatgatgagaccactgagcgcgtgttcccgtacatctcggtgatggtgaacaatggctccctgtcctacgaccacagcaaggatgggcgctggaccgagctggcgggctgtggcccctgcaggcagctgttgaacactggagggtcccccggaccacactggggtgggctcctgaggacgtggggaagtgattttgttttgtggtgtgtggcacgtgtggcgacggataaggcctgaactgggaaacccaggccttcctgttcaccctgagctgcttcctgagacagatgctcaagtgaggctgcaggcgcggtgtggtggggccgagtgtgaccgtttgctaaataaagtgaaatacccaaacctcaaaaaaaaaaaaaacaaaaaaaaacaaacaaaaaaaaaagaataaaaccaccacactacaaacaaccctaaaacaaaaaagggggggagggcgggggcccctaagagaagattatttcccccggagggaggcccacaaattgactttcaggtgtccacgcccagtgtttttttacttgcaaaaagaggtgggggccccacaaattagagggggagctgcttatataaacagagacaaggagcaggaggggcagttattaaaaaacacgcgcgtggtggtcggggagacaaactgcttaataagaggtgaggatcacttttgatggagagagaagacaccatcacatctgttggagggggagacagacaaaataatttgggagcaacaaactccatcactcaagagaaaagaaattaacacgtcccctgggaaacatactacaaaaatagttcacgaattatatacatggtggtacaacacaccagatataaaataattacgccgtctataaaaaatatatttgcgcaacaagagcaaatgtgttacagaaaacatatttaaacacggg

SEQ ID NO: 588567 - DNA, 295 bp, Homo sapiens
  misc_feature (41)..(42): n is a, c, g, or t
  misc_feature (72)..(72): n is a, c, g, or t
  misc_feature (107)..(107): n is a, c, g, or t
gaggactacaagcagctgggactacaggcgcctgccaccgnncccggctaatttctgtatttttcatagagncaaggtttcaccatcttggccaggctggtcttganctcctaacctcatgatccacccacctcggcctcccaaagggctgggattacaggtgtgagccaccgtgcctggccttttgaaactttaaattacaattgtgattctcccgtgtccacatggctggggaggcctcagaatcatggcaggaggcaaaaggcatttcttacttggtgggtcagaacataag

SEQ ID NO: 588568 - DNA, 1165 bp, Homo sapiens
gctgcactcaaccaggatgagaggctgcccggccaatgcagctgccgccccgtctgctgcggaggctttgctttttgactccctggcgacagtaaagttgaagagcttccggccggaggccaatagatgggacccccggaaggcggaagttctagggcggaagtggccgagaggagaggagaatggcggcggaaggctggatttggcgttggggctggggccggcggtgcctgggaaggcctgggcttctcggccccggccctggccccactacacctctctttcttcttttgttgttggggtctgtgactgcggatataactgacggcaacagtgaacatctcaagcgggagcattcgctcattaagccctaccaaggggtcggttccagctctatgcccctctgggacttccagggcagcactatgctcacgagccagtacgtacgtctgacccctgacgagcgcagcaaagagggctctatctggaaccaccagccgtgcttcctcaaagactgggaaatgcacgtccacttcaaagtccacggcacagggaagaagaacctccatggagacggcatcgccttgtggtacacccgggaccgcctcgtgccagggcctgtgtttggaagcaaagataacttccacggcttagccatcttcctggacacctaccccaatgatgagaccactgagcgcgtgttcccgtacatctcggtgatggtgaacaatggctccctgtcctacgaccgacaatcatgacatcatctccatgaagctgttccagctgatggtggagcacacgcccgacgaggagagcatcgactggaccaagatcgagcccagcgtcaacttcctcaagtcgcccaaagacaacgtggacgaccccacggggaacttccgcagcgggcccctgacggggtggcgggtgttcctgctgctgctgtgcgctctcctgggcatcgttgtctgcgccgtggtgggggccgtggtgttccagaagcggcaggagcggaacaagcgcttctactgagtggcgcctccggcggggcctgtccctgggcccaggagccaatgtgaacttttttttttaccgggattataaaagaacaacaagatgaccttatttcttaactgtttcaaataaatgattaaagtattttcat

SEQ ID NO: 588569 - DNA, 233 bp, Homo sapiens
atgacatgatacgactcgagtcggtacctttacatctttgagcacatgtgtgagaatatctttaacctactccatttctaaaaatgtagtctaaagatattctcacacatgtgctcaagagttgaatgtcgcagggatatgcacagtaccaccatgtgtgggcagcaaagttatctatacaggagggctgactgaactacatttatgacacatccaatcaacggagatctaat

SEQ ID NO: 588570 - DNA, 1037 bp, Homo sapiens
gctgcactcaaccaggatgagaggctgcccggccaatgcagctgccgccccgtctgctgcggaggctttgctttttgactccctggcgacagtaaagttgaagagcttccggccggaggccaatagatgggacccccggaaggcggaagttctagggcggaagtggccgagaggagaggagaatggcggcggaaggctggatttggcgttggggctggggccggcggtgcctgggaaggcctgggcttctcggccccggccctggccccactacacctctctttcttcttttgttgttggggtctgtgactgcggatataactgacggcaacagtgaacatctcaagcgggagcattcgctcattaagccctaccaaggggtcggttccagctctatgcccctctgggacttccagggcagcactatgctcacgagccagtacgtacgtctgacccctgacgagcgcagcaaagagggctctatctggaaccaccagccgtgcttcctcaaagactgggaaatgcacgtccacttcaaagtccacggcacagggaagaagaacctccatggagacggcatcgccttgtggtacacccgggaccgcctcgtgccagggcctgtgtttggaagcaaagataacttccacggcttagccatcttcctggacacctaccccaatgatgagaccactgagcgcgtgttcccgtacatctcggtgatggtgaacaatggctccctgtcctacgaccacagcaaggatgggcgctggaccgagctggcgggctgtggcccctgcaggcagctgttgaacactggagggtcccccggaccacactggggtgggctcctgaggacgtggggaagtgattttgttttgtggtgtgtggcacgtgtggcgacggataaggcctgaactgggaaacccaggccttcctgttcaccctgagctgcttcctgagacagatgctcaagtgaggctgcaggcgcggtgtggtggggccgagtgtgaccgtttgctaaataaagtgaaataccc

SEQ ID NO: 588571 - DNA, 344 bp, Homo sapiens
  misc_feature (325)..(325): n is a, c, g, or t
cgtacaatgggaaacccttggaagatcagacccagctccttacccttgtttgccagttgtaccaggggcaagaagcgggatgtttgcccttcctcaaccagctccctcaggagtgtttgtttcaagtaatggccggtgagctgcggaaagttcatggaaggcgagtgggaacccggctgcctgccttttttttttgatccagaccctgggcacctgttgtttaccaattggaaaattttatgcatcccatgaagcccaaatacacaaaattccaccccatgatcaagaatcctgttccattaagaacggttgttaaaggtaaaanttagtttaataagccctta

SEQ ID NO: 588572 - DNA, 898 bp, Homo sapiens
gctgcactcaaccaggatgagaggctgcccggccaatgcagctgccgccccgtctgctgcggaggctttgctttttgactccctggcgacagtaaagttgaagagcttccggccggaggccaatagatgggacccccggaaggcggaagttctagggcggaagtggccgagaggagaggagaatggcggcggaaggctggatttggcgttggggctggggccggcggtgcctgggaaggcctgggcttctcggccccggccctggccccactacacctctctttcttcttttgttgttggggtctgtgactgcggatataactgacggcaacagtgaacatctcaagcgggagcattcgctcattaagccctaccaaggggtcggttccagctctatgcccctctgggacttccagggcagcactatgctcacgagccagtacgtacgtctgacccctgacgagcgcagcaaagagggctctatctggaaccaccagccgtgcttcctcaaagactgggaaatgcacgtccacttcaaagtccacggcacagggaagaagaacctccatggagacggcatcgccttgtggtacacccgggaccgcctcgtgccagggcctgtgtttggaagcaaagataacttccacggcttagccatcttcctggacacctaccccaatgatgagaccactgagcgcgtgttcccgtacatctcggtgattggtgttccagaagcggcaggagcggaacaagcgcttctactgagtggcgcctccggcggggcctgtccctgggcccaggagccaatgtgaacttttttttttaccgggattataaaagaacaacaagatgaccttatttcttaactgtttcaaataaatgattaaagtattttcat

SEQ ID NO: 588573 - DNA, 889 bp, Homo sapiens
gctgcactcaaccaggatgagaggctgcccggccaatgcagctgccgccccgtctgctgcggaggctttgctttttgactccctggcgacagtaaagttgaagagcttccggccggaggccaatagatgggacccccggaaggcggaagttctagggcggaagtggccgagaggagaggagaatggcggcggaaggctggatttggcgttggggctggggccggcggtgcctgggaaggcctgggcttctcggccccggccctggccccactacacctctctttcttcttttgttgttggggtctgtgactgcggatataactgacggcaacagtgaacatctcaagcgggagcattcgctcattaagccctaccaaggggtcggttccagctctatgcccctctgggacttccagggcagcactatgctcacgagccagtacgtacgtctgacccctgacgagcgcagcaaagagggctctatctggaaccaccagccgtgcttcctcaaagactgggaaatgcacgtccacttcaaagtccacggcacagggaagaagaacctccatggagacggcatcgccttgtggtacacccgggaccgcctcgtgccagggcctgtgtctacagactgggctgtggcccctgcaggcagctgttgaacactggagggtcccccggaccacactggggtgggctcctgaggacgtggggaagtgattttgttttgtggtgtgtggcacgtgtggcgacggataaggcctgaactgggaaacccaggccttcctgttcaccctgagctgcttcctgagacagatgctcaagtgaggctgcaggcgcggtgtggtggggccgagtgtgaccgtttgctaaataaagtgaaataccc

SEQ ID NO: 588574 - DNA, 340 bp, Homo sapiens
  misc_feature (5)..(5): n is a, c, g, or t
  misc_feature (132)..(132): n is a, c, g, or t
  misc_feature (199)..(199): n is a, c, g, or t
  misc_feature (261)..(261): n is a, c, g, or t
  misc_feature (294)..(294): n is a, c, g, or t
ggagntgggggaagcgccgtggtggaatcgaggggtagggcattttagattgcccttcagacgcttttaggatgaggcggatctgcttgacgagggcccttggtttgatcccaaattgtataaggccgatgnatttgtgtgcgggcagtagtaatcttatgcccgcggtgatttcatgtcacatatgcaaagtaggcgnctgttttcttaggggcaggagtttcaagcttcgcttttgggcagaagaaacaaaagtaggcnccagtctgtgccatgttgatgggcagtttctgngattgtttgacaaggctttgataataaaacccttaaacttatgggc

SEQ ID NO: 588575 - DNA, 570 bp, Homo sapiens
gctgcactcaaccaggatgagaggctgcccggccaatgcagctgccgccccgtctgctgcggaggctttgctttttgactccctggcgacagtaaagttgaagagcttccggccggaggccaatagatgggacccccggaaggcggaagttctagggcggaagtggccgagaggagaggagaatggcggcggaaggctggatttggcgttggggctggggccggcggtgcctgggaaggcctgggcttctcggccccggccctggccccactacacctctctttcttcttttgttgttggggtctgtgactgcggatataactgacggcaacagtgaacatctcaagcgggagcattcgctcattaagccctaccaaggggtcggttccagcttggtgttccagaagcggcaggagcggaacaagcgcttctactgagtggcgcctccggcggggcctgtccctgggcccaggagccaatgtgaacttttttttttaccgggattataaaagaacaacaagatgaccttatttcttaactgtttcaaataaatgattaaagtattttcat

SEQ ID NO: 588576 - DNA, 101 bp, Homo sapiens
gacacacacacaaagtgcatgacacacaacatcacgaaaacagcaagggagagaatccagcctaaaattaaataaatctttcagcctgcttcttccccagt

SEQ ID NO: 588577 - DNA, 220 bp, Homo sapiens
tggatctgacttaaacttgatccactgagttgcgcaccacgaacttcgaaagtgtgggttgctggagctagatgtcgtacctcagctcttccaaaggtggctcaagatcgtccgtgattggaagaaccctgtcgtcaatctccttcctcacttccacatcaatttcctttagttcttccacactggcaagattgctgttcaccatcctgtccttgagaag

SEQ ID NO: 588578 - DNA, 204 bp, Homo sapiens
tggcggctgtgttcactgcttggtctgtgggttgagactccaggcgcatccgtgcttcttttgcgcctttccggaaacatctcgccattcaaagtgtttctttcatcatcctcatgggtttatccatcacccatgctacgctcttggttagtgccttgaaccttctcattgtgagtagcagcggagactgctagacaactttgt

SEQ ID NO: 588579 - DNA, 181 bp, Homo sapiens
actttagttcagtacagcattaaaccacaatgggtataaatcttcatttagtaattaataatttcttcgcataacaatgtttagatatttggcaaccaaacacaaccatttttgggaaagccattcgcattccagtcccatcagcattctagtgcccaacaattcaacctaacgagtccag

SEQ ID NO: 588580 - DNA, 661 bp, Homo sapiens
taccctacccacgagcacagcagagctggattggctctaagtcctcatgcatgacaaggcgaatagtcagctacctctgtgactcgagatgaggtggagcccagcagcaggggaggtgttaatatcactctgatctattcagccctatcgctttttctttcaaagccgtggttgacgggaacactacacctatttcatcgctgaatagtgaccgatgctacaatgggtgatgagttgatcgacagcatccggagccacttggtcggacggtgaagagccttcgatcccacgcgaaagaacaaccgtggtggagatcatcttggcatagtccaagcgtcgagtcaggctaactgagaggctgaaggggcatgttcatccgcccaaattggggtccgtcctgggggtgctggattccgacatcattgtgcaaaagattcagccgtacacggaggcagagcaccgaaatggtattatctatgttcagaacgagcctccccaccagatcttcagaaggccattgaggtggcagcgatgctcaatgagtgagctgcggaagcagataggcagactaccttgatattcagagccgtggcaagtcaacactgtcaccctgtcagctgaactgttccgaccatggccactggtgactcgttcccaagac

SEQ ID NO: 588581 - DNA, 448 bp, Homo sapiens
  misc_feature (69)..(69): n is a, c, g, or t
  misc_feature (120)..(120): n is a, c, g, or t
  misc_feature (149)..(149): n is a, c, g, or t
  misc_feature (197)..(197): n is a, c, g, or t
  misc_feature (411)..(411): n is a, c, g, or t
  misc_feature (416)..(416): n is a, c, g, or t
agacctgcgggccatggaggaacgataccgccgctacgtggacaaggcgcgcacggtcattcagacccntggaacccaagcagaggccacccactgtggtgtccccagaattccataccnttgaggtcacagctctgggagcggaaccntgcggatacggcagatggagatggactatgagaagagtcggagaggcnaggaacaggaggaaaagctgcttatcagtgcctggtacagcatgggcatggcttggagcatcgggctggggaagagcacgctcctgcccatgcccagtccttcttggcacaacaaagactggccaccaatgctcgccgtggacccctggggcgccaggctctgagcctccgccccacttgacaagcactgacaagacctcgacttcctgctgcntgctnggagtcttccagtttacatttacccagctggg

SEQ ID NO: 588582 - DNA, 161 bp, Homo sapiens
ccaacttactgacgctggtctgtggagttcaccatgttggcctggctggtctcgaactcctgacctctggtgatccacctgtcttggcctcccaaagtgctgagattacaggagtgagccaccaaacctagctgaggctggtctgagttttaatgtggttg

SEQ ID NO: 588583 - DNA, 226 bp, Homo sapiens
aggtcactctagagtctcccccgtattacaactatctagcgaggggcttatgtatacttatgggcgtcgcttagtaaattgttactaggttgaacatagtttgtcggtgtatatattgtaattgagattgctcgggggaataggttctgtgattaggagtagggttaggatgagtgggaagaagaatgagaggaagtaaagtataattatgcctataagggttgag

SEQ ID NO: 588584 - DNA, 1216 bp, Homo sapiens
gacagcgattctcactccctggacatattctagaacaccaggaacagagacccaaactactacaccaaacccaacccataaaatggaagaagccgccagccaaagcttagaagaagattttgaaggacaggccacgcacacaggacccaaaggagtaataaatgattggagaaagtttaaattagaaagtgaagatggtgattcaattccacccagcaagaaggaaatcctcagacaaatgtcctctcctcagagcagagatgactcaaaagaaagaatgagcagaaagatgagcattcaagaatatgaactcattcatcaagacaaagaagatgagagttgccttcgcaaataccggaggcagtgcatgcaggatatgcatcagaagttgagttttgggcctaggtatgggtttgtgtatgagctggaaacaggggagcaattcctggaaaccatcgagaaggagcagaaggtcaccacaattgtggttaacatttacgaggatggtgtcaggggctgcgatgcactcaacagcagcttagcgtgccttgcagtagagtacccaatggtcaagttctgtaaaataaaagcttctaataccggagcgggggaccgcttttccacagacgtactccctacgttgctggtgtacaaaggtggggaactcataagcaattttattagtgtggctgaacaatttgctgaagaattttttgctgtggatgtggagtctttcctaaatgaatatggattactaccagaaagagagatacatgacctagagcagaccaacatggaagacgaggacattgaataagccttcaccatgtcagtatctcatgtctatcctttacacagtgaacactgatttttttttttggtagtatctatattcctttagcaaacactaaatatgggcctggctatttaaactcggggggggggacacactaaaattatgtacatagcactttttagtactaattactcaaattgagataatattttactgcaaggatattgtggtttttagcaaataactagtaagcagaggaggtgggtaatgtcaatgtttagatcattgtaaaaatccctttcaagttccgtgttagattttgctcctcatttttcccttggcatttttatttgggcttttcaaactgaatactgcttataaactggtttgtacaataaaaataaaatcctatgaagaaac

SEQ ID NO: 588585 - DNA, 148 bp, Homo sapiens
gtatggctcggtacccttatatgagacataatcaggtgtagaaaaatctgcctgtagggcacttccccctagccgaaattgaagtgcgtcgcggccagccgcccagagatccatggcaagcgccatcgtttctccgaccgtcaaccag

SEQ ID NO: 588586 - DNA, 441 bp, Homo sapiens
gatatgggtacggccggcgcgagattaaacctctccccggatttacaggcagcgagagtcacggacgcgcggaacgcgagctttcaagcagggccctctctcggggcgaaccattcagggcgcctggccttcacaagaaagagaactctcccggggctcccggcggcttctccgggatcggtcgcgttaccggactggacgcctcgcggcgcccatcttcggcactccggatagcggggatctgaacccgactacctttcgatcgggcgagggccacggagggcatcgcccggtcccttcggaacggcgctcgcccatctctcaggaacgactgacccatgttcaactgctgtacacatggaacccttctccacttcggccttcacagttctcgtttgaatatttgctactaacaccaagatccgcaaatggtacggcggg

SEQ ID NO: 588587 - DNA, 615 bp, Homo sapiens
cctttgttaccccctgggttcccagagctctcgatgtatactgtatccttcatgttttcaatatgctgtttgttttcttttctctttgggccgtgtctcggtgtccgtgggtaatggtgctcgtagctaggctcccaggaggcctccatgatgtcagtctggatccttgctgctgtcgcccgctggctagtccctgcagtacaccggtgagtgtgggatgatttcaggaggtcgccagcaccgggatctgcccgcccctctgcctctgggaaccagtccaaggggctgtcagttgtatttgccttttgtgttgttgttgttgtttttgttgtttatattgttactccttttaaggaattatgaagctaagaaaagttttgtgttttgggggttggatggacaaagttctagcatgatataaatatggtctaatcttattgatactattttatttttcttttaatgttgtactgtggagaaaactattttgagccatggggttaggtgtataaacaagaactttccacttttgcctaaatgtaacaaatagaaaggcatctaatactgcgtcttcagtatcctgataattttcttaaaagatctaacgtcctaggg

SEQ ID NO: 588588 - DNA, 436 bp, Homo sapiens
aggattactgtagcaccgaatgtacgacgacgtggtatgctttgtcatgcagatcaagtggcagttcaagctgcaagcgacgcaggaggattgggatcacatcacgaccatcgagcagatagtcgatttgatcgtccagcgttcgactcttcggtgaggccactgacgccatcgcaggcaagccagctcccacagttgaccgcgtcgctcgggcagtacgcgatccctgtgggaacgatcgctcagccagcatttttgccattggtgtccaactgccccaacggcacccgccgctctatggcgctggacagaataatcgaggtcttgctgaagccgaacttcgctacccgattaatcaggctctccaactcgggcatcgagcccaccgccgcttgcatgatcacgcaggggtcgccggtgacgcggtggcattcgg

SEQ ID NO: 588589 - DNA, 448 bp, Homo sapiens
gttactaaaaccaaggaaactggagctacagttaagggtggactactgtatcttatcaaacaaacttaaaagacatagtggataggaaaccaatatggcagttcttcaaaaaagcaaccatggaagtggcatatgattcaacaatggcttctctgggtacacacccaaaagaattgaaagtggagacttggggaggtgtttgtacatccatgctcatagaagtattactcacaatagccaaaagtggaagtcaccctagtgagcatggatggatgaatggataagcagaatgtgatctatccatacaatggaatatcattcagccttacaaaggaaggcaattctgtcccatgctacgacacggaggaaccttgaagacattacgttacgtgaaataatctagatgcaaaagaataaatatcgtatgagtccgtctatgaggaaaaaa

SEQ ID NO: 588590 - DNA, 135 bp, Homo sapiens
aatcagatcaagacccgagatgctctgtcctatgcgcctacagaattctccgatccgtccctaacgaactaggaggcgtccttgaatgtattactatacatactgatcctcggcaatactccccatcctccatac

SEQ ID NO: 588591 - DNA, 108 bp, Homo sapiens
gggagaagatgtgagctcagactccgcccctgactctgccccaggtcctgactcccaagcgaccccgtggaggggtgcgcagggggtgagcagtgctagagtacacgg

SEQ ID NO: 588592 - DNA, 417 bp, Homo sapiens
tcctagactgcacaaacattaagaaaattaggccaggtgtggtagtacgtacctgtggtcccagatatattccagaggctgaggatttggcttgagcccaggaggtcaagacctcaatgagcttgtgccactgcactccagcctgggcgatggagcaagacccagtcccaaaaaaaaaaaagaaaaaaaaaaaagggttttgggtttatctgggactctttaagttttgggtgagaaatagtaaagaggccctttggacacaaccttcctttaaaagagaatgatgattttataacctttaaccaccctgaaagctcaactcacttttggtccccctgaatgcttgaaagcagtgtatctgccaggtggctctccaagggactcttgcccagtttcagaatgccaaggggtgcagtt

SEQ ID NO: 588593 - DNA, 413 bp, Homo sapiens
  misc_feature (59)..(59): n is a, c, g, or t
  misc_feature (98)..(98): n is a, c, g, or t
  misc_feature (196)..(196): n is a, c, g, or t
ggaaaaattgtgaacttagaagagagatctttttaagtgggtgcccagcctgctttccnccaaagggtagaaacagggatttatattacatcacacgnggggtatgagaatggccacttccaacgaggctaactaaaataacaccttctttgttgtctctcttcctgtccaaggtgcgttctggggtaacacccancccatccggcagagtttgctggggaggaagacgtccagcgcttctttgcacagggccagcagttagcctcaactaccagctggcaggctgacccaggtgtcaatcagacgcggatgggtggttccgggcccagatcctcgcaccccattggccacccccactggaactctggcggtagcggtggtggcatgggaggaggtggagccaaggtcgacgc

SEQ ID NO: 588594 - DNA, 226 bp, Homo sapiens
tgggattccattaccggaaaggtcaaaaggtttatagtgttaacccaattcaattataaattcgcggggaaatttcacgagcgagcacttttctctccacaagagcgtggtcttcccaatctacaaattccttctttctctctcgcggtatagagaaatttattcaacgagacactatataagatgtggcctatatattataatataaacttataattctcttata

SEQ ID NO: 588595 - DNA, 195 bp, Homo sapiens
gtgctgaggtgatctagaggatctgagtgctactccacaaacagggtcaagtgattctcctgcctcagcctcctgagtagctgggattacaggcatacaccaccacacccagctagttttgtattattagtagacacgggggtttctccatgttggccaggctggtctcaaactcctgacctcgtgatacgcccg

SEQ ID NO: 588596 - DNA, 620 bp, Homo sapiens
acgctgcgcaccgtaccgaggcgcgggcgcttgcagaggctcccagtcccaagcctgagcctgagcccgcccctgtaggtcgcgcgccccaggctctggctggctctctgcgcctgtgggagccgtcatagatgggggaccaatatcgatgacaaggagctcaccaagagagaacatagggcataggaggtgccgggactctggatgatactcaaaagaagcgaggctgcgcctatgacagaagcacaagcatgtcacgtggaagacggtctgccggacaatacaatcacaagacatgtgtgcagggttatgacccaacagcaaagcccaggaggatcctggcccgggatgggcctaaccgcacgtcacgccaccggcctacacacccacagagtgggtccaaggtttagccggcagactctaacaggaggagcttcatccaatcacatgctgatggatcggtggcctatcctcatgacttccatggaccctacggatatccaaggacgggcaccgaaggaacgaccccatcttgggttgacaacactgatacctggggacatccgatgctgagcgagcccgtaggtatcaatccactggctgcttcatccatagctaca

SEQ ID NO: 588597 - DNA, 1860 bp, Homo sapiens
gggctggacgcgacccagagcctccgccacccgcttctgccactcaatggaggacggtctgctggagatcatgaccaaggacggcggcgacatgccggcgcccctggaggtgtccaccgtgccggcagtgggggacgtgatctccggggagtacaacggcggcatgaaggaactgatggagcacctgaaagcccagctgcaagccctgtttgaggacgtgagggccatgaggggggccctggacgagcaggcctcgcacatccaggtgctctcggacgacgtgtgcgccaaccagcgagccatcgtctccatgtgccagattatgaccactgcgccccgccaggcggcttgggcgtggtcggcggcaaggggagcttccagagcgacccccaagagccggagactccttcgcctgggatcggggacagcggcttgctgggtcgcgatcccgaggacgaggaggacgaggaagaagagaaggagatgcccagccccgccacaccctccagtcactgtgagcgccccgaaagcccctgtgctggtctccttgggggggacgggccacttgtggagcccctcgacatgcccgacattaccctgctgcaactggagggcgaggcctccctgtgaggggactccgtggggcactaccttcccgggctgtctttgggtttccgagtgcatgacgcgagggggactgaacggcgcggtgcggcatgcttcacttggacagctgctcttgtgggtcaggcagagagagactccctcgaggaaggatttgtagggtgaaggactttgggagcatcgagaattctttctgcccaactaagcgaattatagcgaactgcggaaaggtgaggctccgggagaggaagcgcccatctctggactcccatccatccctatcctgtcctttcccccttcccagacaacaggagaacccgtgaattgtgtaaataaaattctgctttttctattctgaaaaaggacttacctaggaccatggcaaataatctctaacaatttacctggaaattaaggaattgggggtattttgttctggcaacaggaaatttacccttctgctgaaatccaagatattcagtgctctgcagaagcctctccccctcacagatctctgcggctgctgattggtaaaggaagcttgaggagggaactgcagccctaggaatctgggtgaatggggttccaagggcccctgggctgggaggagctggctatgaatgtgcatgaagacataatagctcaacctctaggattttgcatgcagagcggatcctgccttgtcactgacttcatctgggattgcttttccactccctggggcttagagaacaaagagcccggttcacaggcagagactcgggggtgctcagcagcagcccagatttaggggacatttgagggactcttggggccgcagccaaaaactgtctctcctggctacacctgcttaacttcagttcctttttctgtcaatatgtccttgcccactgcctctcggtgttgccttcataatgtcttgtgtgtgttatgtgtgtctacttgtgtagtagtgtgtgagccctcaggggcagggcttgtggctctggtgttaggttcaggggcttcagacccttctacgagctccaagctatcaatggcgcttttctctccctcttcccccaaccagggcatggagcatgtggctgtcctgaggttcttttactgatgtgccgcccttccacctcctcaagtggtgactttgtgtgccctccccctcctttgtgtattccttctcaatgctttccttggtgttaaccttaataaaaaggcgtcatctccccttgaaaaaaaaaa

SEQ ID NO: 588598 - DNA, 121 bp, Homo sapiens
ggctggaccacatgatgctcacgctcgaactgatgagagccaggaagcggcacatctggaaggtcgtccggctcggcttttcgctgagcattcccttgatctcatcagttctgagcggtgg

SEQ ID NO: 588599 - DNA, 749 bp, Homo sapiens
  misc_feature (38)..(38): n is a, c, g, or t
  misc_feature (48)..(48): n is a, c, g, or t
  misc_feature (60)..(60): n is a, c, g, or t
  misc_feature (81)..(81): n is a, c, g, or t
  misc_feature (90)..(90): n is a, c, g, or t
  misc_feature (95)..(95): n is a, c, g, or t
  misc_feature (101)..(101): n is a, c, g, or t
  misc_feature (104)..(104): n is a, c, g, or t
  misc_feature (149)..(149): n is a, c, g, or t
  misc_feature (159)..(159): n is a, c, g, or t
  misc_feature (194)..(194): n is a, c, g, or t
  misc_feature (204)..(204): n is a, c, g, or t
  misc_feature (224)..(225): n is a, c, g, or t
  misc_feature (276)..(276): n is a, c, g, or t
  misc_feature (283)..(283): n is a, c, g, or t
  misc_feature (285)..(285): n is a, c, g, or t
  misc_feature (307)..(307): n is a, c, g, or t
  misc_feature (316)..(316): n is a, c, g, or t
  misc_feature (320)..(320): n is a, c, g, or t
  misc_feature (403)..(403): n is a, c, g, or t
  misc_feature (406)..(406): n is a, c, g, or t
  misc_feature (417)..(418): n is a, c, g, or t
  misc_feature (420)..(420): n is a, c, g, or t
  misc_feature (550)..(550): n is a, c, g, or t
  misc_feature (553)..(553): n is a, c, g, or t
  misc_feature (566)..(566): n is a, c, g, or t
  misc_feature (581)..(581): n is a, c, g, or t
  misc_feature (584)..(584): n is a, c, g, or t
  misc_feature (668)..(668): n is a, c, g, or t
  misc_feature (716)..(716): n is a, c, g, or t
gtgaacccgccagcagaggtgagcacgagcctgaaganataccagcanttcaccctgganaaagcctacctgcgcgagganttcttctgngcctncacccntgncgcggggacttcatgcgttccgcttcttccaacctctaagactgnagcggttctncttccgcagtgggaacatcgagcacccggaggacnagctcttcancacgtctgtggaggtgctgnncttcgacaaccctcagtcagacaaggaggccctgcaggagggccgcaccgncaccctncngtaccctccgagccccgacggntacctccanatcngctccttctacaagggagtggcagagggagaggtggacccaccttcggccctctggaagcactgcgcctctcgatccagacgnacncccctgtgtgnntnattctgagcgagatcttcctgaaaaaggccgactaagctgcgggcttctgagggtaccctgtggccagccctgaagcccacatttctgggggtgtcgtcactgccgtccccggagggccagatacggccncgnccaaagggttctncctggcgtcgggctnggnccggcctgggtcgccgtggcccggaggccctaggagctggtgctgccccgcccgcgggccgcggaggaggcaggcggccccaantgtgctgaggccggaacccttcccacccggcctgccccactcaccccnttttagaagagcttttacttgggcgcccgccgt

SEQ ID NO: 588600 - DNA, 375 bp, Homo sapiens
cgcggccgagccgcgggctcagggagtctggggtcggattgagcgcccttccccactgtgggcggccccttggtgggggggccttttccccccctgggggtggggttttcctgacaaatgcctttggccttccgggtggccttcgccccttcccttgcttgccatggaccctggccccaaattgttgcgggtcctgcgcgggccgaggcttcactaccaccccgggccgtgaactacgggtcggggtcaggtgcctccgcccggagaggggcggtcccgcgggccgcaccgcaggcgagggacggggtttcgagcccctgccctgctcagcgccgctcacagctggcagaagaggccacactgtgccctgcgtgg

SEQ ID NO: 588601 - DNA, 766 bp, Homo sapiens
  misc_feature (194)..(194): n is a, c, g, or t
  misc_feature (200)..(201): n is a, c, g, or t
  misc_feature (210)..(210): n is a, c, g, or t
  misc_feature (226)..(226): n is a, c, g, or t
  misc_feature (241)..(241): n is a, c, g, or t
  misc_feature (261)..(261): n is a, c, g, or t
gcccgctactcgaggaagatgacatttgcattttggacttgagcagtgtggagggtactgatgccattaataggaatcatgggaacatgggaatgagaaatgagctccaaaagaaaagatgcattctctttgggacatattgagttggctatctctaaaagatattcatgtgcagatgtctggcagactattanaaatgnnggtttgganctcaaggaaaaagttncaaaaaattggactnggttaagggatggctatttngaagttaaatctatgcttcagtataaatgaagacatattttttttttctataaccactatgaagttcccctccccctccaaattatagtattgtctttggagtgtttgatccacattggcagggactgggatatggagaaaggagtgaaaaaaggagtttgagactacaggaaaagtcattagcaattgcacttagaattgaaaatcatgacagaaagaccggtgcagtggctcatgcctataatcccagaactttgggagcctaaggcaggtgatcgcttgagcccaggagttcaagaccagcctaggcaacatggcaaaatcttgtctttactaaaaatacaaaaaattagccaggcatggttgtgcatgcctgtagtcccagctacttaggaggctgaggtaggagaatcacctgggcctgggaagtcaagcctgcagtgagctttgaatgtgccactggactccagcctgggtgatgggagtcggaccctgtcacaaaaaa

SEQ ID NO: 588602 - DNA, 133 bp, Homo sapiens
agctactatacaccctatacactctatacataggtatacaccagacagacgaaaaggtctgtgcagtaggagaaagagcacaaaagaggtctgggaacttctctgctgcaatgaaagatctgtcaggcaacac

SEQ ID NO: 588603 - DNA, 1035 bp, Homo sapiens
  misc_feature (554)..(554): n is a, c, g, or t
agcgggggtgttggaggtggcggagagccaaggagggaggcgggagcccatcagaggaaaaatccggagagcgtcgtggaaccactgtggtccaagcgtcagtgcacggttcatctccgtatagaggcctgcgctgcgcccaggtgttaacagtccttgttcaatcactgtaaatctggatacgactcagaatgaacaccctagactatacatagcgttcattgcactcttactcgcacggtgcgggcagcgaactagtctggtagcggcagaagatagcgatagggtacgtggcggcgcatcggcgatggattatggtgtcacaacctgtagtggtatcgcagaatgaggtggctacccctactcttgggctcatctgtctcgagagagtgggcctcatgtcgagacttgggcgtgtctgagaggatactctcgacccctgtctcacaagtggccttcaaggagttaagtgagggcgggacagatttgaaccaccgggtaaacgatatatatactggtcagatcgtgaggtctatacatttcagagtatagancaatcaattggaacctatttgaagtgaggggaaaatttactaaaggaacttgtgactagggatgtttatgactagagttatcccgtgaaacataggattggcgcgtgtggtaccgcatagtatggggtatactttcaagtagggagattcgcacccacaggtcaaatcagagagagtcttcgtatgggacgaaacaaacaaagtcagggttgcgaacagttgaagaaaacgctaggtatttctcgagccaaattggtctttcaggctgcggacccccaaaatggcgggggcctcgcggatgattcccagagcaggaaaaaattccttgagatgtccctggaacgagtacgccgagtgggggtacacccatggagtggaaatacggctaattgggggataatagacctacatggtacgctgaatgggctgtggataacgaagcgtgaaaaccaaatagtgaaattcaagacgctatgaaagt

SEQ ID NO: 588604 - DNA, 436 bp, Homo sapiens
  misc_feature (42)..(42): n is a, c, g, or t
cctgctttgaggatccctctactcgcgagtgctgccagtgcntgatgtgtgtgggaagcctgagctccaccgtgccccgactcggggcccacatgaggtagagggcacaggatttatcggggacagaggccaggaggcagcacttgggggcctttggatgggcctgaagagaggcagtggaggaggcaggcgtgtggagattgaggggccagtgccacctcctgaggagggagctgcgggggccacgatgtcaggtgggccgggcgatgttctcaggtgtggatgagtggtggaggtggccgtgggaaacccacagaggacgttcagaggcttctgcagacacaggtgtttgggctcaggagtggtcgaggggtcagctggcatggtaatctgaggggcgggcatgtgtggggtgaggagagggctcccacactgt

SEQ ID NO: 588605 - DNA, 805 bp, Homo sapiens
  misc_feature (285)..(285): n is a, c, g, or t
  misc_feature (336)..(336): n is a, c, g, or t
  misc_feature (338)..(338): n is a, c, g, or t
agagtgcccgcccacagttccgacgaaaaatggcggggtctcctgagttggtggtccttgaccctccatgggacaaggagctcgcggtggcacagagagccaggccttggtctccgccactccccgagaagactttcgggtgcgctgcacctcgaagcgggctgtgaccgaaatgctacaactgtgcggccgcttcgtgcaaaagctcggggacgctctgccgtgaggagattcgggagcccgctctgcgagatgcgcagtggactttttgaatcagctgtgcangagaatatcagcattaatgggcaagcatggaggaagcttcagataattgtntnatggagttcgtgacagtcaaagtacttgaagatcagtttgagtgaatagtcatagtagatatagccacaaatacgttagcagtatcccatgaaagatcctggaatgtgtcttcaattagcataataaggaaaactacgaaattcttgaacgcagtgacctagccctgtgtgtgacttcccacttggaccttaacaatagtgaccctgatgccaagtccctcatatggtaacgatttgaaattgccagaggggaaagcagtaagcaaaggaggatcagtgaaaggccatgaatgtccttgcctagatttacttgaaccaggagaagggattctcccagagtgctcaggatgctgcctggttgtccaggctccagaggattcacctaggaacgtttttccagttgtcctaggaaaccagatgctaagactggtgaactttgtaaccagattgaaaccgagcaaggagga

SEQ ID NO: 588606 - DNA, 433 bp, Homo sapiens
gggcgccgagcactgtacggttacacggttactgttagtcaaccgacttcacaaccttaccctttataaacaacacaaagaaaggcgtcataaacaacagtactattttgtttacaagttctcaacactgcagtgatcgaggctccatactatgtttcctatagctttatgtctaatatggaatctactcattataaatatctgggatataaaaagccctggaatattcattgtaagtaccaataccagggtcagcctacgttgctgaaaatcccaaaatatactcttatatttctgtatgccatccgtatctcagacattttcaaaaacctcacagggaattctaacatactttttcttgaagagatttggattcccgttcttgaacaatattcagttcggtcctaactgcatgacgatctcgtacgtgtca

SEQ ID NO: 588607 - DNA, 151 bp, Homo sapiens
attggtgttgcgcctacgcatagtgttcgcgtttggattagtgggctattttctgctcgggggtggcagcggatgagtaagacggccccagcccctagtctcagccgctactccactcaagcactatagttgtagcaggactcttcttact

SEQ ID NO: 588608 - DNA, 281 bp, Homo sapiens
caaagggtctgaggacaggttggcattttgtcttcctcagcagggctggcggctgcgggggtgacagtggcggtggggcctcctcggaatcctcctcctcctcctctacttcagcctcttcttcctcctcctcctcctcctcctcctcctctgtgggcgaagcgggcactggcggctgctcctccttgggctccgtcaagtcaggggcagcaggtgctggcacggtcggtgggcagtgcctcggaacggtacttgtccctaatggcggaccagacgcggac

SEQ ID NO: 588609 - DNA, 192 bp, Homo sapiens
agtagtgtctgagtactaggagacgaaggccacagcgggatagcggccaagataagccagatccccgggcagtgcaaaggacatagaatttcagcagtaagtgtccaagtcccaggtcaaacttgattctgtcacagcatcgcagcttccatccaaaggccctcaagctcctgcaggctatgcgaacgtggc

SEQ ID NO: 588610 - DNA, 356 bp, Homo sapiens
tggtccccacctcgctgagctcagcctcactcccactcgtaaaaatgtaagatcccaccagaccatgtgatatggtttggctgtgtccccaccaaaatctcattgtgaattcacatgtgttgtgggaggcacccagcgggaggtaattgaatcataggggctggtctttcctgtgctgttgtcatgatagtgaataagtctcacaggatgtgatgatttttaaaaggagagtttccctgcacaagttcccttctcttgtctgccaccatgtgagatgtgcctttcaccttccaccatgattgtgaggcctccctagccacatggaactgtatgtccaataaacctcttccttttgt

SEQ ID NO: 588611 - DNA, 1786 bp, Homo sapiens
  misc_feature (228)..(228): n is a, c, g, or t
  misc_feature (468)..(468): n is a, c, g, or t
  misc_feature (1437)..(1437): n is a, c, g, or t
  misc_feature (1447)..(1447): n is a, c, g, or t
taaaaggccgggttggtgaaccaaattttcttttttcccccttctcagggggaaatatgattatctccttcgagggtccccgagctataggggcaagaggggagtaagagtggtggtagaacaagagggggagggcacaagaagaagagagttaacaccactcttagacacgaggtggaaaaagacgccgatggggtggtggtggttcctgtggagaacacccacacnacacacactgtgggcgaggtgtatataagactttttctctccgcgagggggtgtgcactctacaagagaaagagaaaacaccgagtgtgttttgtggggagagaatttaaagagtggtgggtgtggaggtggtgcctataaatttacaccatctccccatatttttttatatcatatatatatctccacacacacatcacacctctgagagggggtttataaaagaaagtctcagagggngtctcacccttcgtggggcgggagaagcgggtgtgtgagtatcacactatgttgtggcggtctctttttagagacaaggagctataagagctccgggggagatcacggcgggcgtgagaattatacgagggtctccgagggaacaactctcgcgtggagaaacacacacgcgcgagaatgcgccgagagaggggggataattttgcgcgtgagagagagtgggggtatgtggagcgagggggaaatagcgcgtggggagagtttgtgtgggggcacaacgcgcgagggctctctacagcggagagtgggcgggggacaacagatgaaaaatctccacgagaagccagatagacggtgtggtgggtggcaacagcacaaggcgcccgtgtgggccaagagaatgtgtgttccacaaacactctgcgggcaggaaaccaccggcgggtggctccacaggccaaacctcaacgggaggtgggaccaactccgcgagagaagcgggcggtggtgttgagagtgcgcacccccaagggggggggctgtgtgggggggggggcgcactactaataaccgcgggggggagccataaacaacccaacgcacggacaacggttctgtagacaccctgttggaacaccatcttccccccctgtttccacaagaggtaggccaaaattcccccacattttatcaaaactacgacccccttaaagatgagagaggtccccctggagcggagaggagaaaaggcgaggtgggtctaaacccctccctccaagcgcgggggcaaacccttataaaaaaaagcgcgcggaggaagggtcccccccacaaatactacaaacgtcctcgagagaggacggcgaaggacggcgagagcgcggggaggagggctccccctcgacgcacgcgcgagggagagaggagccggagaccccaacagaaacaaatcccactccctcggttggnagagagtctnctgtctggtgttggataaagacaccccacctgtcgtagtgtgaaagaaccacctcgctgaggaggaaaaagaggggtggtgcgcccctcctcgtgcggggggccaaacaaacaatcagaggcagggccgagacgtgtagcgcgagcaattagtgcaacacgcccctacgcgagagaaggggtggatccccaaccacaaagagacggcagggaggcgggacaaccacaaaaagaggcaaacaacgaggagggagtggactaaaacaaaagaagccctcacacgccattattggcagtggccacaagacgatcacaaatagtgcaccaacaagccacgccg

SEQ ID NO: 588612 - DNA, 221 bp, Homo sapiens
tgattacaggatcctaagcgttgtcagtgcagcggtgtgatctcgtgctcactgcaaccttcacctctggggcttgagcaattctcctgcctcagcctcccaagtagccgggactaggcacttgtgctgccacacctggttaatttttttttttttttttttggtattttaagggaaagggggttccatcatgtggcccggggtggtctcaaatggctgag

SEQ ID NO: 588613 - DNA, 1642 bp, Homo sapiens
  misc_feature (566)..(566): n is a, c, g, or t
  misc_feature (1004)..(1004): n is a, c, g, or t
  misc_feature (1059)..(1059): n is a, c, g, or t
  misc_feature (1141)..(1141): n is a, c, g, or t
cctcccttcccacacgccgcgtctgagtaggtgtgttaggttgctcgtatgcctctggtcggtggaccttcaccctgtgttggtctccttaatgtctccgggtccgctcctctctggttttactcttgaccccggggtgcgttacatcttttctccaccgggggcccgctgttcgtccttaggccccttttttgggcgcccaactagtataggccacagggctggtccccacaacgacccggctgtgtgttccccggtctcccgggattttccccgcggggattatttctgttggcaacacccacggcggtttcccccaccacgggttctccggacaacatgagccaaaatgtggcttccggccccccctattatgacgcgctgggtgagccgacagccacccatttcctggtatatcctgcgtgaaggtcgacccaacggtgatgtttcctggaaaggacccattttgtttttttgaagaggtttagaatctcttccaaagcccccgcattgtgtacacgaggagttttttcctaaaaggcgccctctttaccgcgccccacccnacgagaacccacgaaaaagaggtataggcgttgtagtaaagggcaaagattgtgtaatactccacgcgaagggggggataccgcaggatcctgttttaagagggtttttttcgccacagagaaaacaatatgttgtggtgggaggaaagccccccacgaaaatggggattcccccgcctgggcccctcaaacctattgggtggggaatatgcgacgaaatattctcttcacagaaagattttttttcgcctcaggattttcttttttcttgaggagaattagacacaacaggttctcacgcgtgttgttttttttgggtttcaacagatccgccctgtgtccctggtctaaaggcacattggggagttctacacacgcccgcccccgttaaaaaatgtgttggggtaaaagtgtttgggtccacagaagcgcacaggngcgccacaatatatctttctgtagacgttctctcacacagtatattgtagagggnggagaaaatataggaaaacgccacaagccacgccacgcttttttatagccccacggggggtttcacaatgagatatagaggntgtgagaggtataaatttataagaggcccctctccacgcggctcgtggagattcacccaccatctgtgagagaccactctaataacactaaatattggttttgtgtgatatatataagcccacatttgtagaattttgtataaaacaatgttcacataacacatgcacacatggagaataataagaataatggtaataatacaccactaatataataataataatgctataaagtatatataaagaggtaaatatagtataatgagcacaataaacacaaacccctcgtgtggcctaccaccccacccttatttgcctcttcctcttgagggtatccgctgtgcggtgtttcctgagaacctaattcttctaatccctcgttctgaataagagaggggaacccctgtactgaaactttgtgttgaccatagcctttttgtctttcatcactttatctccaagtatgtatccttaaagaataataaatgggatttaactgga

SEQ ID NO: 588614 - DNA, 480 bp, Homo sapiens
  misc_feature (322)..(322): n is a, c, g, or t
  misc_feature (354)..(354): n is a, c, g, or t
  misc_feature (372)..(372): n is a, c, g, or t
  misc_feature (440)..(440): n is a, c, g, or t
  misc_feature (460)..(460): n is a, c, g, or t
cagtgccgtcaataaatcatcgtgaatacattgttgagcctgttggagtgcatttgctgatacgtcggttggtgctgacacattcgcctcgaataacaataggataaattaatctggtgctcagtttgcctgagccgatcatttgaaatgatctgttggcatgatactgctttctgcccgctttctctatgccgaaagcacaaacaaggcacagtattctattaatttttgcagacgaggtgataagaatgacttttctactatttcaagcaaccattacacaagcaatcaagctctaaaattcactgctcatgctcttggntatttttagccttcttatcacagacctagagntgacataaaaaaagcctntacagaaagagctttttacatagcgctactccagctttccgctggaatacgccccccaacctttcatnaacacgccggatacacaggncccaagaagaaggggatctt

SEQ ID NO: 588615 - DNA, 223 bp, Homo sapiens
cgaggatcccctaggtggaagcgagtcggggcagccagaatttatgctgccatgaaaagcaggtacagtgccccttttcagacagttttgattcgctctagacttttttttttttaatagggagggaaaaaattggatcattttcttttttctacatgcgcttaagactaaaacacaggttgggattaagttaattggctacctttttccgcgttccacctag

SEQ ID NO: 588616 - DNA, 374 bp, Homo sapiens
aattaggggtaatgaaaaagcaacttcaatagagatcgacgggaaggaatccttatggcaggctacaatctactactaagagtggagtaaatggagggatcaaagggagagattacacttgtgtctctaagggcaaagaaaatgcacaacagaactgagtaaaagtaggacatgcagaactgtaacaacgaaggtaaagaaaccagaagaagtatcacccagaccaaatttcataaagcagagcggaaatatctgacatttagagagacaacccctgtgacaaggaatcgaaacccgcacgaaatagcaatggggagaaagctacctaccttccctcattaaaaacattccattggtgcttgcggcagtgcagg

SEQ ID NO: 588617 - DNA, 961 bp, Homo sapiens
ggcggtgtggtcgttcgttgtggctggtgtggttccctgcgctcgtcgactgcgtgcgtcttcctgcgggtcagcggtaagcggcgcggtggtcggagcaagtggactagaacttcggcgtcgggtggaaagaatagatggaccgagccaaggtgactgctcgtaagtccaccggtgggaaagccccccgtaaatagctggtcacgaaagccgccaggaacagcgctccgctctaccgtgcgggtgtgaaggaatgcctcatcgcgtacatgggcccggtgcaaccgtggacgcattctgatgaggattcgtcgtgtgatcaccaagtcgaacgagcgtgcgtcatccggaagacgtgaccttccaaaggttggtgagggagagtcgccgcaaggtattcaaaattcgtatctgaggtttcagagcgcaggccatcgtgtgcaggctgcagagagggctagcgaagcgtacctggatgggtctgtacgaagataccaacctgtgtgccatccacgctaagagagtcaccatcatgcccaaagacatccagttgggtcgccggatacggggagagagagcttaagtgaaggcagtttatatggggttggtagtaaattctggtacatactttgggttgaagttgtgagtttgggggtaagagaattgttctatcatatgttggctttgtgacttaaagtcatcccatgcttgcaagtcagatgagtgcgacacgtgatgtcccagacttcagtgatgtgagcactgtggtcacgacgtgccagttgccatatgcgacaggcgtgggtgatacagcctggtcatgaacaagtggcggcaagacagtgggggctcaggccaaacgtaagggccggcccggctacagggtctgcaaaaaacaaaaaacagcgctttttgggacaaaacggagcggtcaccgcacggacgggcatttaccccacga

SEQ ID NO: 588618 - DNA, 220 bp, Homo sapiens
tacatcagctcggtcacccatgacagctgcatcttcgtcagacagatccggacatgcctcaatcttgtgtccattgcatgatgtcatgcgccctgcagtggtgctcaccaccaacaagctcgaagctgaccattggctttggggcggacgacgatcggattgttgagaccgccgttggcctggatcgcgtcatccagaaagagtctgaaagcggtctgga

SEQ ID NO: 588619 - DNA, 762 bp, Homo sapiens
  misc_feature (6)..(6): n is a, c, g, or t
  misc_feature (97)..(97): n is a, c, g, or t
  misc_feature (131)..(131): n is a, c, g, or t
  misc_feature (179)..(179): n is a, c, g, or t
  misc_feature (315)..(315): n is a, c, g, or t
  misc_feature (331)..(331): n is a, c, g, or t
  misc_feature (453)..(453): n is a, c, g, or t
  misc_feature (500)..(500): n is a, c, g, or t
  misc_feature (560)..(560): n is a, c, g, or t
  misc_feature (590)..(590): n is a, c, g, or t
  misc_feature (688)..(688): n is a, c, g, or t
  misc_feature (725)..(725): n is a, c, g, or t
ggggcnatctcacagcaatataaggcgtgggtgggcaggttagtctttttagattattttgccttacagagaaactactagactctgctgaaaaganccctgtctctcttctcccatttcttccataaganaggctccttattctctctctcactctaatgttacatatcccaaatggnagggcagttcatgctcattccccccacccaattctacaagtatctctctcttcttaagggggaggccagacaggggaaggggggcttggggaggtcctttgaggcgaaactgtggggtccttggggtgtgtgtgtnggggcgggtgtctgcngcggtggccgggggggcggggcgcgcttggctgggctcggggttaagagttctgtcttacccgtctggcttcttccttcttcccgccgccggccctcccctcccctttttgtttttctcccncctccttgctgctccttccttggtctttgtctcgtttgtctctgtgnctgcctgtgcgtttgatgttttttggcatagccttcttttttgtttggtctctgttgcgntttgtttctgcctctcccttctctgtggcnttcccctcccacccccgctctggcctagacaataagttaatgctagacaccacaaaaagggcagacatggcagtgcagttttaatatacatatatgtngaatatatatgtacacacagttagcacggtcagggtngggaggggcatcttggggtaggcaggaggctggggtc

SEQ ID NO: 588620 - DNA, 490 bp, Homo sapiens
ggcagggctgcctgtctccccagcgtggcagccgggggcccgggaggaaactgcctggcctcaaacccccagacccagcccttgcctggccccacctgagctcaccccaggatttcactctgtcacccgggagtgcggtgacatgatcatagctcaccacagcctccaccacctggactccagcaatcctcctgcctaagcctcctgagtagctgagactacagaagacatcatttaagaacatgaaaaggccagctgcaggctgggagaaagtatttgcagtgtgtgcgtctgacgaaggagctatgtctagaatacacaaagacctcctccagcccagtgataagaagacagcccaatttctgtaaatgggcagattttgagcagacatttcacgaaagaagatctgcagtcaatacagacatgaagagatgcttcacgtcgtccgtcatcaggaaatgcaattacaaccacggcgagatacaactac

SEQ ID NO: 588621 - DNA, 399 bp, Homo sapiens
  misc_feature (36)..(36): n is a, c, g, or t
  misc_feature (276)..(276): n is a, c, g, or t
  misc_feature (324)..(324): n is a, c, g, or t
ccaaacacaacacttgcctaaattttgtgaattaanatggttgttggctctgcacccaaccttcatgaagccccccaggggtcagggcaagccctaggcttaatcgaggtcctacgttcctcgtcctcctggctgtcaggccccagccagaacgctgtcctttagggaagtcggagtggcggggtcccctcttcaccctcccccatctccactttagatgcaaagtggacatatggctcatctccatctttgggggaggttctgtctaaagtcctnccaaagattcagattgtatgacaaattacgttctagactaccacgggnaaggaaggggccagggatttgcatcattacccccagacaacagcttcattaggctgaaagggaaggtttgacgcg

SEQ ID NO: 588622 - DNA, 859 bp, Homo sapiens
agcggggtcggacctctggcgctaccatggcgtttggcaagagtcaccgggatccctacgcgacctccgtgggccacctcataggccaaaagatgcagtgaaagcatttgcacagcaaacaggcatttcccacacacacactcaccaatccatcacacagcaaatcccaacttcaccattgtccactttcattgcaccatgttgttgtgccagcacactgtaggtcaccaagttatcccagtcatctcgcattagtcgcacagcacaggcacattctgtctcacacagcagccacatttcagttgacaggccgttcactggccaatcccacagcaatcaccacacttgcacaatctcaggccaccatttccagacatcagcaatcatttgcaaatttcaaattcaagcaacttggagtcccacaagagggcatatcacccacagtgcaagggttcgtagtgcatcggttcacatgcagccaaaagtccaaacacaagcaacaagttattcacccctctaggaacaccgtcggggcttacacaggcaacacaggtggcgaggtatccacaggactgcgttcacgttccaccacagtccgcaggcaacaggccaaagcactgaggcctttcgcacaacacaccaggcctacagatggcaacaccaaaggaaacgaaaagttgggccgattccacaaaacacactcccatgcaccacgttccagacgagaactattcgacagtttccccgtaaaagacaaaactttacagtggggatttcaaccccaagtttaaaccagttagggcacatagacccgaaaagggagagtgcgtatctcgatccaattgctccccttgggcat

SEQ ID NO: 588623 - DNA, 972 bp, Homo sapiens
  misc_feature (403)..(403): n is a, c, g, or t
ggggtgatacagctgtaccatctggaagcagcctgatattctggcatctgtcggagaagatgatgcagggctatctagaccccttctggtctaggatctgcgaaccgtgcgagcaagagagcagtggctggctaaatcccacgtcctgcacgtcggagatcgtttccctgcgtattcgcaggaacagacgcgcaagcgtgttagtatctatgctttagacctgtccgatagaaacatctacaacattctatgagcactatctggctttcatcatgtataggacagggttgacagttgtaacgaacaggagcactatcaaccacggaggacctggtcaattacgcagatgacgccgaggattatgtagcacaagacggcggcaacttgattcctagtataactnggtatgtgggcgctgtatcggcaccacatgccacgtgtacagatgaccgacttccgacatatagttgtggtatctaggacccaactacgacgcacaccgtcacagctctcgtatagtagatattcgtggaaagataggacttatcgcgcgtcgccgatggcagatctggatcgaccacaatgcgttagtaggaccgtgtcagctgcatctaggcccgtaagtcgacccctttcgtcaggaacgctgactagtgttcattagctggccagggaggatgaagtagtcgtactaactgtgtaacacagccataggatgaacggtagtggcccttgactatcgccgtttcgaagggccatctaaggctcattagcaccacttggttgtatgagggctaacctatattcagtggtccttccccgtgaacccgcgacaggttctcgtcccaaggtcatgagttttaccaggcaggagattcaccagaagctcctgacaaacgcaagattctaaaaccatctactgacctgttgcaatcaagttccataagcctatagcaccgtctttcgagcgag

SEQ ID NO: 588624 - DNA, 120 bp, Homo sapiens
tgctgggattacaggcatgagccactgtgcccagcctgcaataatattttggataggatacagtaaggggataggatacaggtagggagatctccctacgtgtatcctacaccgtctcat

SEQ ID NO: 588625 - DNA, 693 bp, Homo sapiens
  misc_feature (220)..(220): n is a, c, g, or t
  misc_feature (336)..(336): n is a, c, g, or t
  misc_feature (653)..(653): n is a, c, g, or t
taggtgagagttgtgacggtgtcagagacagactgtctcgggccctgtgaaccatcaggaagggttctaggggaggctcatggttgtcagagggtcttcccagacacccgagcacccacccgcttcgtggatgatgaggagctagcgtatgtgattcagcggtaccgggaggtgcacgacatgcttcacaccctgctggggatgcccaccaacattctgngtgagtgcccccaaccctgatggcctgtctccctggggtggcttcagggccagggcagggcttgcctatctccaccaccctctgcatcacctggcttggtgcctcaatttctgctntacctgaacatcttagtagcatctttgccacatgtgccccttttttcttccactgtccctcagggctcctgcactaatggagcagcagagcccatctttaaggctcctcgtgtctttttaggctttagcttgcttcctgctcttgaacctcagtagcttcctaagggctgcaggaaccattctggagtgtttaagctcgcttatggggtcatggggtcctcttgggcctgagcccaagcgttcctttcatatcctaattccttttgtgtactcttgggctcttttctggacttcaaggcaagtggccacaggcccanacaaggcacgaattgcacacagttgaccccagagagttgg

SEQ ID NO: 588626 - DNA, 410 bp, Homo sapiens
  misc_feature (220)..(220): n is a, c, g, or t
taggtgagagttgtgacggtgtcagagacagactgtctcgggccctgtgaaccatcaggaagggttctaggggaggctcatggttgtcagagggtcttcccagacacccgagcacccacccgcttcgtggatgatgaggagctagcgtatgtgattcagcggtaccgggaggtgcacgacatgcttcacaccctgctggggatgcccaccaacattctgngtgagtgcccccaaccctgatggcctgtcttccatgcacgtccaaggcttggcctgatctcctgaaccagcggggcctgtcctacctacatcatcccctgctgtcctgggaggcatagggcttccttgactacctttgttcctattctttgaacactgacccttggacaacagtcatcattaatttgtca

SEQ ID NO: 588627 - DNA, 593 bp, Homo sapiens
ggacgcgtgggtcgattcagaaatgctgaggtagggaaacctaaaaccctcactggatgtacatgtgcaaggagtatggtgataatgtttgttaaaaggcatagcagatcgttacaacacggactggacacagttgcctgagcataatgatagcagactcacacatacgggcaccgactctaggtacaacgaaagcaagagataagacaggtaagacgaagagagaccagtacgaaggataggtcttataagacaggcccgtgcacttttattgacatgatacgacaatattataatattacttatcatacgagaagagtgataagaacgaaatccagtgtagtgaaaggggataggcccacacacggtgagacgaatagtaaaccagaaaacaaataaagacaaaatgaatggaggagagcagagagagccagcacagcggaagagagaacatagaaagaaaacaaagaagcagaggtagagcagcgagaaaaaacacaagcaaaaaaaagcagccacacaacaacatacgcgaaacagggtcatacaacattccgagagcatacaacacatatgacacaaacaagaccacc

SEQ ID NO: 588628 - DNA, 277 bp, Homo sapiens
agatgccccagaccggacggaagtggagagccggagctcaggcctcgagtctagtgaggcgcgtaacaaattcgcaggagccagatccatcttatctgacatgttctttgagcagcacgtggatccgccatattagaccaggtctcagctgaactagctctcaggcatctatgccttcagctgttcacacctctttggggacatggatggagctcacggagcacgaagtgtatttctggggaacgggctgcctacgaatgtaacacgcccaatttaa

SEQ ID NO: 588629 - DNA, 365 bp, Homo sapiens
  misc_feature (134)..(134): n is a, c, g, or t
gtgtgtttctcacaacaaagattccattgacagacctgaatgctcagaatgtaaaaatatttgtcaaccttgcattaattgttcttaccatctaataggggtagaacttatgatatcaaccaacatggcttatnctatttctaaccattgaaaaaaaaacgcgtgccaccatgagaccaccaggaccaccaaatgctttggcaattccagctaaagaaagctcacactggaatatcccaaagttactctccacagtaggcatccatctaaaaagactggaaacatgtgtagggcttcaaacacacttcagtgtctatattcttgaatgggcggctcataaatgaaatatttaaaaaagtcttttc

SEQ ID NO: 588630 - DNA, 141 bp, Homo sapiens
atccataccatatatgctccgtgcagtgtggcgcagtccagctataatcacttatgacgccggtgcggctaagcgatgattatggtagcggaggtgaactatgctcgtgtgtctttcgactattcctactgtcaatatatg

SEQ ID NO: 588631 - DNA, 664 bp, Homo sapiens
gagaattatcaggcgattatagttgatacatatgcaacgaagctttttgtctctgatctctgttctgatagcgtctacgcagtatacatattagtggtcatagttgctaccatacatgtgaatatagggtttcatgctggttcccagatattaatcgtttggctacgtacaatggaactttaagtcatatatacatacatatatatatatatatatatataattctaaggggggaaatgttatattttctgtgtctataagagatgaatacagtggatactttctctattggtaatgattgagttcacctctttcagaagacattttctttctcttctgagtaattgacaataaaatctggcccttgtgaaaccctggaaatcttaagtctgttgaaataccaggttaaacacattccaagagatctgtcaaactcaaattcttgtgtatacttctgagagtgcctgagaaaaagacttcattatctcactgaagaaaatatgctttatctttggcaaacttcgtgtcccacatggttagctttacttatttgtcgcaatgcaatgttcatgaagcctgatatgagaaccatctccagaaagaaccaagtagggtccctttgacctttgcctggcttttctgaaccattgtggactcttaccac

SEQ ID NO: 588632 - DNA, 169 bp, Homo sapiens
  misc_feature (38)..(38): n is a, c, g, or t
  misc_feature (58)..(58): n is a, c, g, or t
cataaagagctcttacaactcaataaaaggcaagtaanttaaaaataggcaaaagaantgctggatggtatggtagttctatttttagtttttaccctaactactctgacttgatcatttaacattctgtgtatgtaacaaaatatcacatgcataaatattatgtatc

SEQ ID NO: 588633 - DNA, 151 bp, Homo sapiens
aaattttggccccctggttaaaagaatcatttcccttgcccttaattacttgaaaaacatcatttaattcggttcaattgaaataaagtaagtttttactaaggtattgccccaccaaaatcaataaatttaaatttttttccattaaaaa

SEQ ID NO: 588634 - DNA, 398 bp, Homo sapiens
tttctttgtttttgttttttatggcaactggaaagtatttactatgggattcaattctttatgatagaaagacagacataaatgaatcccatagtaaatatgtgatttgaaccatggttgacttacaagtgtcactacagctttttagaaaacatagcctaatatatgttaagcaaggccccggggtgagccagtgggcttgcggttttaatgtaggagctggaagaaggccgtccatcctgtctcttgggcggacagtgtactttcctaatagggaagggaagcacaatggaaatacccctgaaccgttttattgcagtaatttttttcatatctgaaactattatttaatattttgaataagattttaaaaaataaacggcaaagatataaatcta

SEQ ID NO: 588635 - DNA, 198 bp, Homo sapiens
cgaggagacacacttacaacttcaaggacctacacttcaagatgttcgaagtgggtggatcagcggctctgagacggaagaagtggatccacatgcttggagggcgtcacagacatcatctactgcgtagccttgagcgcctatgacttggtgctagctgagcgacgaggacgatgaaccgcatgcctgacgagcatg

SEQ ID NO: 588636 - DNA, 296 bp, Homo sapiens
cactatcaggggggtgttgaagtcttccattatgtagttatctaagtctcttgtaggtctctaagaacttgttttcctaatctagatgctccaatgttgggtgcatgtatctttaggatagttaagtcttctggatgaattgaaccctttatcattatgtaatgcccttctttgtcctttttgaccattgttatagcctgttgtatctaatataagactagcaacctttgttcttttttgttttccatttgcttgataaatcttgctccttacctttactttgcacctagtatgtt

SEQ ID NO: 588637 - DNA, 957 bp, Homo sapiens
ttttcatggttcccatgctgccttttgtgggcctcgttttttgccattatattctccgccccgcatatccgttttccttcgcgggttttccctcgggcacaaaccacggtccctggcgcccccccccgtttagcgtcttgttgccacccggccccaagtcttgttttcccgtgttcgtggtgcccgaactgcctctttttgcccggggccgcaaatggacaacgggtgtagggttcccgacttcggcgcacacttggtttcgcataatatgccgccctgcctctcttgaacccctgctggtgcgcccgccattggggcccacacagccctcgctggtgcaaacttggtgcgcgcaaagagctctctcaaaatttcccgcgtgggtgaacaaaccccccttccaatgtcaatccggctcacacaaaaaggctgcttccccatgcccggggtggaacacgcggtcaccacacacccagccaccaggagcagcctcctctggtggaaccccccacgggccccgatatgggcgcgggaggtccacaccactcccggcactactgtgaatacagagtcctcactgcccacccactatgtgcacgcacacacaacggaacacacgtctacttagggcgcgcccgcccctcggcgcaaccattccagaagtacaccgtgcctccagagagcaagtctccacatcactcatagacacggggctgctcaaccagatgccaccatgctgcagtgagattctcagacaacagggcggcgtattgcagaaggcgtcgatcacccacgagaacacgtcggggacgaaagcagaaacccccgcggtctggccccctttgggaacaatacgcggggccccccgcctccgatgagagggcggtcccaagtcgacgcccccccccttaaatggccacccacgaaatgtttaattcccttggttcaaaaaaaaca

SEQ ID NO: 588638 - DNA, 231 bp, Homo sapiens
gttactctaacaaggtattcttacgtccttttttatgaaataggaaagtaaaacgaaagaactatttctgtgtgtttttaaaactagccttttctaatattgatatctaattaaagttagataatatgtaatatgctttggaacaataatctaaccagaaaatatggtataataaattaccaagaaatcattacatttattagaccggttttgaggtgattgtgccccgcg

SEQ ID NO: 588639 - DNA, 385 bp, Homo sapiens
attctgtgggctgatgaagctcgctttatgtgccaggtgccatgttggtccctcattcattcattcattcattcattctgtgggctggtgaagctcactttatgtgccaggtgccatgttggtccctcattcattcattcattcattctgtgggctggtgaagctcactttatgtgccaggtgccatgttggtccctcattcattcattcattcattcattctgtgggctggtgaagctcactttatgtgtcaggtgccatgttggtccctcattcattcattcattcattctgtgggctgatgaagctcactttatgtgcgaggtgccatgttggtcccacattcgtcgacgcggccgcgaatttagtagtagtaggcggccgc

SEQ ID NO: 588640 - DNA, 187 bp, Homo sapiens
tagctgggtttgggtctaatatgaataaggactgatacgaaaacagtttatggtgggtggactaaagtttaacttctgactgtccttgtgtgtattagaccttctaaaatacagagctatctctgggcccccgggtccccaccattgtattgggctaggcaggattgacggtcctccggcggctgtc

SEQ ID NO: 588641 - DNA, 139 bp, Homo sapiens
atgcaatagagaatcctggcaaccagaaagaagggaagtaagaggaaagcagtgtcaagttacagaacggccaaacatactaaacttaatgaagaagctattatacatcatgattagaaagtaattggtgggagcaata

SEQ ID NO: 588642 - DNA, 197 bp, Homo sapiens
gtagaggatccggacgagcatcttacacattctcaaaaaaaaaaaaaattactcttctcccgggtaatggggtagtcctggacggtaagatatttttttcccagggggtcaaagggtccctacagtatctgatggcgagtgggaaaaataggggacagaaatcaggtatgggcagttttcccatttccattggtgtg

SEQ ID NO: 588643 - DNA, 151 bp, Homo sapiens
atcaaccggaggtgaaatgaaataccgtcaacctgtgcatgagtttgtgtgaactgaatgtgtgtgcatacacataagcatgtgtgcgagcgcaaatgtggcgtctccacagcatgcgcaatccatgagtctgtttctaacgcgcgcgcgc

SEQ ID NO: 588644 - DNA, 670 bp, Homo sapiens
  misc_feature (595)..(595): n is a, c, g, or t
gcgtgccgcatgtattggacacagaatggcacgttcagtgtgcgcgcaggcatcgggtgggcctcaggtgagaaagcgtgagacttcaagtccgggagacgagtgactggtctgtcattgtacaataacttcactctctggggtcaacttaactagctgtaaggcacagtcagtatctaaactgatgttcctggcggtcgatgaagatcatgtagtactgtttatggtacagatacggagttcatgctgaatatcactgtcctgtacgttcggtaattgaaagaactgcgtacatagctgtatgctagctactgtgataagactggatgaaatggcttctcatacagacaatgccctaacttacattgactgattcgatccgagacacttgcactgtccggagttcagtgtgtcatgactgaggacttgtgaaagcctaggctatagagcctagtaggagacactagcgggtagctgtacatgggacatcgtatcatacacgtgtgaacacgatctgcgtgcagcatacacactgtggcacacacggacgcaacagctatatcagtgcttactgagacgtgcactagtctacgtntcaatagtgtgtttgcaccagtttcacaccgcttgactatgcacggtttctaccaggggctatattcttaggcct

SEQ ID NO: 588645 - DNA, 283 bp, Homo sapiens
  misc_feature (171)..(171): n is a, c, g, or t
ttacacgcttactcagctgcccgctgaaattgatcaggacacggctaaatggagttcgcccttgcagctcccaaaggtgcgtattggatactgcacgccttttcgcgccaaaagtatgaaggccgagagcgctgcataaatgtgtctaactttaacgccgagcatctaaanccacaccgttgatgacaccggcgtagcgccgtcatcgttttcggcgcagatagagcgtaaaggtcaattcaaatgagaatgacagtgaagtggatggatgatgtgctggaga

SEQ ID NO: 588646 - DNA, 205 bp, Homo sapiens
  misc_feature (13)..(13): n is a, c, g, or t
  misc_feature (52)..(52): n is a, c, g, or t
  misc_feature (77)..(77): n is a, c, g, or t
  misc_feature (185)..(185): n is a, c, g, or t
  misc_feature (197)..(197): n is a, c, g, or t
ggggcgagactgnggcctggagactcccctgggaggcaacagcggggtctgnagacacccttctccagctggagctnggactgttcagtcactgggagaagggatgtgggtctgaagagcttggttgcagaaacttcggggtctacaaaggccggcgggactgagccaaaagagcttgtttgctngggaggcggganatgcatcc

SEQ ID NO: 588647 - DNA, 172 bp, Homo sapiens
cattcatagtcatcattaagtaatcatatggacgtatagacaataatactaggaatagccccctttcacttctgagtcccagaggttaccccagggaaccctcttacattcgggctggattcttctcacatgacaaaaactagcccccatctcaatcatataccaaatctct

SEQ ID NO: 588648 - DNA, 403 bp, Homo sapiens
  misc_feature (285)..(285): n is a, c, g, or t
tctttcttgccaacgatcggataattttgtattttagcagagacaaagttctacatgttggccaggctgaactcaaactcctgactcaagtgatccaccgcccggctcccaaagtgtgggattacagggtgtgagcaccgtgcccagccctgtccactttttttaactggggaaaattttacattcaatttccattaaaggaggcggaaagacccagaatctggaatcagagagatgaaataattcaagtcatgttttacatgtataccattagatgctatgatngtaaccctaccaatcctcccaaaatgaacaggatcacaaacattctgcttttcctaatggaatctatatataccctcagcaacacattttaaaaactactctttcatttggggtatcc

SEQ ID NO: 588649 - DNA, 787 bp, Homo sapiens
  misc_feature (91)..(91): n is a, c, g, or t
  misc_feature (327)..(327): n is a, c, g, or t
gggctgagcttgtacatcctacagaaagagatctaatgagaagtgttctctaatactatgtgtcccatctcgccggatgtcgtctattgtnatatcgaccaggtagctctcaggcggttcatcgaggattgtgccttgttgtactatttctcgagacaagatgtagcatgcatggccaaggatagctgaacatgaacgctgccacgtggaatgcgagctgtgatggcccgtaggcgatcagcgacgttgatttctctctatatagcatacaccaaggacctatcattaacgccataccatcccaaggaacttgtacactgcgtggangactctatccttaatggcagcgtctcgcgcgatctgggatttactattggacaagaggatatgatgcggggctatgatgattcggagactactatagtcagatccatacacgaggaggacggtgggatgagcggaggaaggagtggatgatgctgcccagaggatcagtggattcatgcattttgtagcaaatggcggtcaccgttctcctttactataagtcgttggaagtgattacagcattcagcgtttgcccagattctccctatcgatactcaccttcgctcgcatatttagacgccgtgaacgagcttttcttgataaatcctgactctagagctggggactattgccaggtagggcaatatctcatcattttgttgtccttgtttacctataagtgaacagtgtcctaggtgaacgtcagtgtgattttttagaacctgttaacgacttgact

SEQ ID NO: 588650 - DNA, 888 bp, Homo sapiens
  misc_feature (58)..(58): n is a, c, g, or t
  misc_feature (82)..(82): n is a, c, g, or t
  misc_feature (133)..(134): n is a, c, g, or t
  misc_feature (136)..(137): n is a, c, g, or t
  misc_feature (139)..(142): n is a, c, g, or t
  misc_feature (144)..(145): n is a, c, g, or t
  misc_feature (200)..(200): n is a, c, g, or t
  misc_feature (333)..(333): n is a, c, g, or t
  misc_feature (372)..(372): n is a, c, g, or t
  misc_feature (392)..(393): n is a, c, g, or t
  misc_feature (428)..(428): n is a, c, g, or t
  misc_feature (469)..(469): n is a, c, g, or t
  misc_feature (493)..(494): n is a, c, g, or t
  misc_feature (500)..(500): n is a, c, g, or t
  misc_feature (521)..(521): n is a, c, g, or t
  misc_feature (528)..(528): n is a, c, g, or t
  misc_feature (539)..(539): n is a, c, g, or t
  misc_feature (541)..(541): n is a, c, g, or t
  misc_feature (548)..(548): n is a, c, g, or t
  misc_feature (551)..(552): n is a, c, g, or t
  misc_feature (557)..(557): n is a, c, g, or t
  misc_feature (560)..(560): n is a, c, g, or t
  misc_feature (566)..(566): n is a, c, g, or t
  misc_feature (568)..(568): n is a, c, g, or t
  misc_feature (570)..(570): n is a, c, g, or t
  misc_feature (572)..(572): n is a, c, g, or t
  misc_feature (575)..(575): n is a, c, g, or t
  misc_feature (578)..(580): n is a, c, g, or t
  misc_feature (587)..(587): n is a, c, g, or t
  misc_feature (591)..(591): n is a, c, g, or t
  misc_feature (595)..(595): n is a, c, g, or t
  misc_feature (601)..(601): n is a, c, g, or t
  misc_feature (603)..(603): n is a, c, g, or t
  misc_feature (606)..(606): n is a, c, g, or t
  misc_feature (613)..(613): n is a, c, g, or t
  misc_feature (623)..(623): n is a, c, g, or t
  misc_feature (626)..(626): n is a, c, g, or t
  misc_feature (631)..(631): n is a, c, g, or t
  misc_feature (633)..(633): n is a, c, g, or t
  misc_feature (636)..(636): n is a, c, g, or t
  misc_feature (651)..(651): n is a, c, g, or t
  misc_feature (653)..(653): n is a, c, g, or t
  misc_feature (667)..(667): n is a, c, g, or t
  misc_feature (690)..(690): n is a, c, g, or t
  misc_feature (697)..(697): n is a, c, g, or t
  misc_feature (705)..(706): n is a, c, g, or t
  misc_feature (710)..(711): n is a, c, g, or t
  misc_feature (713)..(713): n is a, c, g, or t
  misc_feature (715)..(715): n is a, c, g, or t
  misc_feature (722)..(723): n is a, c, g, or t
  misc_feature (729)..(729): n is a, c, g, or t
  misc_feature (733)..(733): n is a, c, g, or t
  misc_feature (737)..(738): n is a, c, g, or t
  misc_feature (750)..(750): n is a, c, g, or t
  misc_feature (759)..(759): n is a, c, g, or t
  misc_feature (770)..(770): n is a, c, g, or t
  misc_feature (810)..(810): n is a, c, g, or t
  misc_feature (886)..(886): n is a, c, g, or t
agtagaaaaatacccagaaacaattaaaattataagactatttttaaattcataaaantggtactgttctgggtgtgactanatttccattttttggtgtctcatgtgatacagactcaggaggacttacatnncnngnnnngnngggagctgttttcctaatttgttactatttaaaaatggttaagggtggccacatnttgggggcttctcctttaatgtaaagtcccttttggaatatcacttaaaatctgggacaggtcaaatcagctgctactctacacgaccgtctgcagtacaggcgtggtgagaagacctatacctcactcggcngagtctcacctatgctgttcgcagcaacgcatcggccgnaggacagagcgccatggccnntgcccaccagggcagccgcctcgcaccacaaccangggcctcacagcgcgcaatcaaaggtctggggctcattctncgctgcggtcgttggggggggcgnnaaaacngggcaattttctgtttggggnttttttntgtgttgttgntnttgcgtntgnntttgngcnagattnangngnagngtnnntgtggantgtnaagngggtgnanttnatatttntctcctggtnccnatttngnaanagcacagagtaaatnanaatttataaaaggnatcgcatcttcgctctgcttccnccccacngggggcgnngctnnangngagatgnngcactncttnacannctggggtggcangagaaaggncttgtcccgcncttcgccggacatctgcacctgtgcaaaatatagctttancttctgcccattgaagtctgtttcgtggagtctattcgcgctcttgctgcgcttcaggtttgcatccgggaattcngg

SEQ ID NO: 588651 - DNA, 1129 bp, Homo sapiens
cccacgcgtccgctctgcagcagccggcccccgccctatggccctacggccccctcaccagtgccctcgtgggcacacccctctgcctgggccccctgagaccacccaatgatggcttgccagcccaagtgagctcgcggctcctagtgcccccgctgggctccagtggctgcacgtgaagtgccccactctgtgaagagccagcagcaccgccgagagctgggcctaggccaggggttgggcctgaaagagaaggaagaggcagtggtggcggcggcggctgggctggaggaggctagcgcggctgtggccgtgggggcaggaggtgccccagctggccctgcagtcattgggcccagcctgccgctggccctggccgatgccattgcccgagcctgagcccctgaccctcccgttggaggtcgtccgacggctcctgccccacgcatgcggcattccatgaacctcctgtcccatgcgtcctcgagacccggacacactcgagccagagacacccaccaggcctcatggctctagaaggtacccagagccccatgagagtgaatgacaacgaagcacaggggaagccacgagaactagaaacggagcatacgcacagcaggaagggcagccacactgggcaggacccaagactagctgaacatgggatgcaagactgactccggatcatctgagacgatctgcgcagatgaggaaaccgaagacatcaagggaaacgcgccttcagcccgcaataccaataccttcctcaaggacaaggacgatccgcgacgagcgaccaggcaagaccacggaaacaggaacgaggcatcacgaaccagagaaaagagggcgcaagcgctaccaggacgggacagcatgaggtaagccccaagcaagaacgcagacaccgatgcagaccggaaacaggagcggcccgagagaacagaaacaaaggaaccaggcgggagcaggcgatggccagcccagaccaccgcggacgagcgcaacagaggaacacgagcgcccacgccgacagcgaacaagaccacaaaaacaacccgcaccacgcggagcaggcagcgaagagcaggcgagaagagaacagccgacacatcacgggaggacg

SEQ ID NO: 588652 - DNA, 135 bp, Homo sapiens
catcacgtatactactaagagagcgtaacctcgacagcagcttcttcgagcccgccggaggaggagaccccattctataccaacacctattctgattgttcggtcaccctgaagtcatattcttatcctaccagg

SEQ ID NO: 588653 - DNA, 1184 bp, Homo sapiens
gagcaagatctggacaccacaccttctacaacgagctgctgcgtggcccctggaggagcacccagatgctgctgaacgaggaccccctgaaccccaaggccaacagacgagaatgatgactcatgattatgttatgagacctatcaacaacccctggaccatgtactgtggccatccagtgccgtgcctgtaccctctacgcctactggtgacgcaccaatggcattgtcatggactctggagacgtgggtcacccacacggtgcccatctacgagggcataagcacctcccccacgccatcctagcgtctggacctgtgctggccagggaccatgaacgagctacctacatgaatgatcctcactgagccgaggactacacgcttcaccaccacggacctgagcgggaaatcgtgcgcgagcatcaaggagaagctgctgcatacgctcgaccatggactatcgagacaggagactggacaccgccgcatacctcctactatctctggagaagagctacgagtctgcccgaatgagccatggtcaatacaccaatctgagccaatgagcggcacccggtagtccggatggcagcatgaaccaaaacattcctatcctggagctacttggaatctatgacggcatccacgatcacacaccttcaaactccatccactgaccagtgtgacagtagagaacatccgccaaagacccggcgaccgcccaaacacgagagccacgacggccgcgcgccacacacgaccaccgggccacatcgccgcacacggacggcccgacaacggagataccaccggccctggaagcccaagcaccaaaagcacaactcacggacccatcgacacgcaccagaggagaaagaacctccagaagaggatagagtaggctcaaccatgggcgcaaaagagccaaccaatacgcacgcaaggacgcaggcaccaagcacaagcacagcgaaggaccacaccgacaacggcgggcccaccaaagagaccacgcgccaacacgccgacctcgaacggcaccacaacagcacgacgaaccacacacgcggcacagggcagcacgccgaccgacacacacgacgcccgcgcgaacaccgccaccacaagccggcccagggaaggcaagaccgacaacgccaacgcacgcaaccccagcatcct

SEQ ID NO: 588654 - DNA, 146 bp, Homo sapiens
attcgcggccgcgtcgacagacgagatatgacacctaaggaattcccctgcttcagctcctaactcaatcaacccgaaatactcctccgggaagtgccccaccgtcaccactgctggcttgacagaggctccatactcggcctggc

SEQ ID NO: 588655 - DNA, 338 bp, Homo sapiens
  misc_feature (239)..(239): n is a, c, g, or t
attcggcacgaggctccagactccacccaagaaagagactttcattcctccctcaaacctttgggcagtgttttttgttgctactttagtagaacctacggaaacaattcacagtttacagcagtccctgcagcaagatcccacacatgtggcagaactgggcagactcctgctcatcattcctacttggggctccccacacaggagcgggggcaggaagaaggctcagcaatcacttntacagaacctcctcctacaggacttttacccatcaccccaaattttgggtacacagcttgaccaatatttatctgttcaataaatactatttgaggtta

SEQ ID NO: 588656 - DNA, 1548 bp, Homo sapiens
  misc_feature (1059)..(1059): n is a, c, g, or t
ggtctttgctgcgtatcgcgacgctacggtcagtgccggaggacctccatcaggcatgtcgaagccccatatgctgaagcctgggatctgccttcattcagacccagcagcttgctacgcagcctatggcgtgtacatcaattccctgtgtagcatcatgtgcctgcctggtacttttgattcacacacccattcacagcccggaatcactggactatcactctgtaccatatgcggccccacggcattccccggactccatgctggcaagacggcttcgtaacgtgacgtaattgaattcaccgctccttggcacactagtaaactgtagagcctccgcttcgtgtacaacatctccttcctaccacttgaggagaccttccacttgaatgtttaaccctaacttgagcgcgcagcacctccattacgacacgtaaagtcgctgggtctgtcaacctacggacaccttacccgtgcatagaagtcctatgtgggctgtacgtcgaatccccaccagttcccattcattatcaccgggccccctggtatatgccgtggtggggcccttcgtcaggaagccaacgttaaaaacgcgcaacccattgaaagtacttcccagtaaatcgtaggggtcctacactcctaaaggggcggctacagactgtgcctacctttgactacgaacggcgattgtgaacgtcctagtaaaggataggggggtacgcctctatcatacctcctacatacactaacaacccgtcttagtgcaattaaaaccgccccttaggcaaattcgggcacatccattgtaggtttgaacctgcacgtaagaccaatttccctttggttaagcgccctttggtggagcttacacctagagcgtaaaatccgaattctttggactacatgcggctggcggtcgtgaacaacgtaggaggggccaccgacaaaccggaatcattaaccgctttgtgcattagcaatttgtgggggcccttcaaatttagtccctgaccttcccccagggggtagggaaaagtcccatcccaagaggcggtntgccacagcaactttcgcccctagggagctgcacccgggaaggggctcgcccaatatacaatagcggctgagagtatacccttatggctgaggccaacgccaaaatgtacaaggcgggataggtagtctaaactctctttcccttggggagaggctcggcatgtttaggccgaacccttttgcccacctggccatgggctgtgtttcgtgaaagccaacagcggaatattgttacccggaggggaatctctcgcacacccgtgtataggcgggggttatcaccagcaccaggcggaagttgtttggggatcaaagcagcgagaggtaaaccgcgcgaggatcatctatagacaccctctcccccagagaggagacatccataggaataggtatccctcacaagcagacgtgtttcgcagcagcgagtatcgacgcgagaagcaaagcagccggcgacgcagtaagtaacgcctccgcgatagatttaga

SEQ ID NO: 588657 - DNA, 143 bp, Homo sapiens
tctggacacgcatgggctggggctacaggcggcatcccaacggatacctggtcctagagctcagcgtgcaagaggccctctcggggacgtcctgcctcctaggacctagacctgttctcaccgtcctggcactgctcctagcc

SEQ ID NO: 588658 - DNA, 472 bp, Homo sapiens
tctctctcccctaccacctatctcttcactgccttgctgcaggcaaagagagggtggagggagggccagcaagtgaggattttgatggttaacccttggtaatccagccaatttccagactgccaaagccatatgtgtttatataaggaggaatggttaccttcctctggttagcagcagtcttcaaaagggttaatgagctcacatacaagagatggtggatcttgtggcccagaagtaccacgtctttgtgtgtgggacaagcgaggtgcctttcaagttgccaggtgaataaacgatgtgtacataaagattccaggatgaggagatgggcacagagaagtaatgggtcgctataactttttagatgactgtggaagcgtctcagttgtagaggtaattggcttggggtatagttgtgtgggtaaaataggtggcaatctggggataaagattgcaagacacttgggac

SEQ ID NO: 588659 - DNA, 143 bp, Homo sapiens
cttctgctcgaattcaagcttctaacgatgtacggggacatgttagccagaattacttgaactcctgacctcaagcagtccacctgcctcggcctctcaatgtacaaaataatcttttaaagtgctatctgaaatacaaaaaa

SEQ ID NO: 588660 - DNA, 188 bp, Homo sapiens
agttgataccctgggatgggagtctctactctcagacagagtttcatggttgaaacaagctctgctggcttcttattaggatgaacctgtcccttgtagcttcatcctgatcctttgctgccaccacgctgcataggaccatgggttgcttctgacagcttgggtagagattgcgcgacagatctgcg

SEQ ID NO: 588661 - DNA, 505 bp, Homo sapiens
tcagagcttgtccagaggaccacgttcaagttttgagattgatttaacaagcagaattgagcagattgcttgcgctgttggcctttgccctcacgatgtccccatgcgttttgttgagagcttcacctccagctgcgggagaattttggggacaagatgttgcgcattgcagaagggtgacccacaagttctatgaagaacttttcagtttactcttgccccaagtttccttgtcgcctgtattgcccaactatgatattgtgcaccccaagtaccacaaagagcgcttcgtgcagcagctgaaggtgtgtgctgatgaagtacagcagcaggcccagttttcaaccatccgcagtttcctgaagctctacaccaccatgcctgtggccaagctggttggtttcctggacctcacagagcaggagttcgggatccagcttcttgtcttcaaacacaagctgaagaacctcgtgtggaccagcggtatctcagccctggatggtga

SEQ ID NO: 588662 - DNA, 257 bp, Homo sapiens
  misc_feature (226)..(226): n is a, c, g, or t
tacaggatcttatagctcgcactcttcccgccaggcaagtgtaaaaacaaaattttggccaggcgcagtggctcactcttgcatcccagcactctgggagaccaaggcgggtggatcacctgagatcaggagttcaagaccagcccgaccaagcatggtgaaacccccgtctctactaacaaaaaaataaaattacctgggcattggtggtgcctgtgcctgtgantacctggccacttctggaaggcttaaggtgg

SEQ ID NO: 588663 - DNA, 87 bp, Homo sapiens
atattgtcttgtaatgttgcataatgttccctttttaaagtgtgcccttatttctaaacagtaaagtggtttaatttctatcccaaa

SEQ ID NO: 588664 - DNA, 1061 bp, Homo sapiens
tggggtaatttccactttttccctttaaacattttttaaaacatttacaaacatctaaaaactacaacacgtcacagctacaggggggtgaggggagggcaccaaagaaaagcagccacacagagtagggggggagggggcagcctaacctacagaggctatgggggtggaggggtaacacgggggaacacggaggcttcatagtcccgtgcattaggggtccctcactcacggcccaacctctccccactcagaggagctgccaggagggccccgtgtttccgtgcctcgtgccccagctcttggtgcttttggatctgcgtggtttgaccaaatgccgggtttctttccctccctgtgttcccctcccgtgtgaggggacaggtagggaggcatggagaggggcaggaagagcagggccccgggtgaagctcgagccggagtagaaaggggccacaggggcatggggacggccgtctgcacggtagacggcggcaacggagcatggcccctgtgacgcgattgcccaacaaaatctccaaaaaacgaggggagaactcatataaacccaagagactggaccaaagggcgtatcactacaactacgcccaggggtacaaacacgagagcagaaaccaagacaaacacgagaggcaggacaaccatgtgacgaagcgccaagggtaaggcagtcagtagcaacacacggcggaaaaatcgtagacaccgaaaggacagaaagtcaagagagagaaccgagaacaataagaggtaaatcgcccacgcgcgaacaccacccagaacgaaccgaatgtgcaaaaagcccacgagatatatagcacgaaaggaaaaaccacagacaaaagactcacacccacagaacgaccccagaacggagagacatgacaccaaacaaaaaagtaaaacacacttacaatcaacacacaaaagaaacactagcaggaggaacgaaatgacaagaaacaaccctcagcgacacacaataaatagacgcccacaaacgacactagcgacagaaaacgaagccaaaccggcatcag

SEQ ID NO: 588665 - DNA, 522 bp, Homo sapiens
ctgttcccttgatgtagtattctccccctttcctgtgagctgagctgtagtgattgctatctctcttctgggtctaacctccacagcacatctacccggcttcaagctggcagtgggggttgtctgcacagtgtcctgtgatgtgaaccatctgtgggtctctcagccgtggataccagcacctgttctggtgggggtggcaggggggtgaaaagggctctgtgagggttcttagctttggtggtttaatgttctatttttgtgctggttggcctcctgatgggaggtggtgctttccagagagcatcagctgtggtagtatggggaggaacaggtggtgggcagggccccagaactcccaagagtatatgctctttgtcttcaggtaccagagtggatagggaaggcccatcaggtgggggcagggctaggcatgtctgagctcagactctccttggttgggtcttgctgtggttgctgtgggggatgggggtgaggtcccaggtcaatggagtggggaac

SEQ ID NO: 588666 - DNA, 124 bp, Homo sapiens
cggtccgtgtacagcggatctggggcaccatctggtctcttgtatcaaggtcagagctggattctcaaaaaacaaaaaaacacacaaaacacaaaatttggggaacctttagacaccaaatggg

SEQ ID NO: 588667 - DNA, 412 bp, Homo sapiens
atgcgagtactaagcaggtaggtcagatagggaagaacctccgagtctcctggtgcccaggtcatacccaagaagctggagaatagcacaagcagcatcactgatgaaggctgactcccagatatcactccataattttggaattcaaaaactgcctcttggccaggcgtggtagctcacgcctgtaatcccagcactttgggaggccgaggtgagcggatcacctgaggtcaggagttttgagaccagcctggccaacatggtaaaatcccgtctctactaaaattataaaaattagccgggcatgatggtgggcacctgtaatcccagctacttgggaggctgaggcaggagaatcacttgaacccaggaggcagaggttgcagtgagccaagattgcacactgcactcc

SEQ ID NO: 588668 - DNA, 1134 bp, Homo sapiens
gttttcatgaacgaggcctattcaagtggtggctttggcacaaaaaacgtattatctttaaacgcctctacgtttaactaccttgagattccagcgatagcgagcgtaaagactggactgtagtagttcgtggcaagtaaaggctgatgactcctctttaatcctacagatctagatgactcatgacgattgtatattgaccgaacatagcacatgatgagatatcaaggtaattacacatagcatgctctgacaacaaaatacgtaatctgtttcacctgtaactgtttaagccaataaacttttcagaatttatgtaatgtggggcttatatgtagcactttacgtgttcatgctgcttatcgtataatgctactgaaaaaaatgaattccaagattctcaactatgctaatttcaaaacatggtctatggtttagactataggaatacaaaatttcctatttagggagaataagaactctttctgtcatttagggctatgaataaactttctggtcttacgagaccagccattgacataggtcagaatcagaaaacaggtaaacctcactcacacattgggactcatttgaacaaacaatctaggccaacaatactgacaaagcctatgtgtcattaataggaacgtatcacgtacaggtaatgcactccaggaacgtgactaaccacagaccaacgagcacatccagcagaatgtaacaacacaggcaaacaagggaggcaggccatggcccaaaagcgcgaggaacgccatccgaaacaggaggagctccaaaaaatagtcgaaactggcaaaagagaaagcggagaaactcaacgcctagacaaaagaacaagaacgacaacaacaaacaaaaagcagggagcgctcaaagaaaatgcacgaggggcccacataatacggactcaaactaatagaagaaagaggcagccgaaaaagcagcgaaaaacgaagacgcacgcctcgcatttatacagaagaaaagaacacaacacgaatgccaacaagtgcagcgcccacatcaggcggcgaccaagagccaaacacccacgaaaaccacaggcaaaagcaagagagcaagaccaagcgctaccatcacatactacgcatg

SEQ ID NO: 588669 - DNA, 166 bp, Homo sapiens
gaccagcgtgccgcgcgtcatgccggagatgatgcggttgcgccgcgggaaattgggcttgagaggaggtgtgccgagcgggtactcactcacgatcagcccctcgtcggccaggcggtgcgcgagcgccaggtgtcgcttcggatagacgcggtcgaggccaatg

SEQ ID NO: 588670 - DNA, 253 bp, Homo sapiens
ttaacaattcacatcctcccaccttcttctttccggaagaaaggcagttggcagcgacaaaagggcggtggcgtggggatcatccaccatctccaggtttaacacccaggctacccagggttgggcagtcaggcctctaggcgtgatgctctcagaggcaatagaggaaaagtaaagggagggtctcatttcacggacaaggaagccttcttaaccttcttccccagtaccaacaattccttacacggccaat

SEQ ID NO: 588671 - DNA, 1018 bp, Homo sapiens
cgagtattcttaaaccacgcctatcaactgtacacaatgtggagcaggagcgaagtttctcccaattgttttcctaactcgcttcgaggcttactacagacgtggtcgtgttggtactgtcgaactgctctgaccaaataccctgcgaccaatcaacccctggtgcgggcgttaatgctcactagttctcgacgaacgctgattgagatatgtctgatgagctacgggcgagccatggcaatgtcacactgtcacgatgaatcgtcaattaccacgtcaatatttgctgcaagtttcggcgcacgactgttcacgcgcgtctaagtctctcctggctttatattgacctgtctccttctactcaggccagaatctatctgtttctaccacaccaggcaagtagcccatacaatgctagaccctagcaggctatgtcctctaccgcaggtacctagcatgtcagtggctacgagatacatgtgttgaagatggctctagtagtgagtctgtacatcacctaattgactgctttggcacaggcgtgatatacagagactatagaccgcagacactgccttggagttagctactgcagagtgtcttggcttgagagaataacctcatagtatgcaatcagtgagcatgatgacctgtggaaagagacatagatggactcacacttgataaatcatggggcacacgatatgttcccacccaacaaagtgtgataagtgatatgtgcagccagtagccagccttccttcaatcaaggtttccaggcagagcaaataccctagagattctctgtgatataggaaagtttggatctaggaagctggaagtattagcagggatgtctgtcaatcccactagggactacagtgctgcctggaaataggtctgtccactcctggtcattggtggatgttaaacccagattcctttacaactgctgcctgctaagggaaaacatgctcctcattatcatcgactattatgtatacccgcgggtccccta

SEQ ID NO: 588672 - DNA, 140 bp, Homo sapiens
tacactaggtcccttttcttgtgcactgcactgtccagaactggagatggcgaactacagggcgaggacatcaggagggcaccccgaggcccaggtgtcccccctaggttccctcagtcctcgggtgggattgccccggg

SEQ ID NO: 588673 - DNA, 764 bp, Homo sapiens
tctcgagttttattgtaatgttgttaatcatttgatattatttgggtattatctaatttaactgaatttagattattatattatattattattctttctttgaggcagggtctcactctgtaacccaggctggagtgcaatggtgcaacctcaacctccgtgggctcaagccatcctcccacctcagcctcccaagtaaccgggataacaggtgcacgaccaccatggcccagcgttaatttgtggtattatttgtaaagacatgggtttacgccgtgttctcccagaacggggtcttgaacatccgttgggctcaaggaatctgcctgccttggccccccaaagtgctgggactatgggcgtgagcccaccccacctagtaatttaagagtgttggcccacattttctgcctacacaaggatatacaaacacaatctataaataacaccgtgtgaagtaggtcagagcatttccaagaacactcatcatgtttaagttccacaataaccctgcatggtttcactggacagatgacgcaaactgaggctggcagggggagacaatgtaccaacccaaggccacacggaactagtgaacgcccaaatccaaagcctgtgactggtgtcactgtgcacagggttggaactccagaccgaagcctgatttttaaagaagacaggccccaaattggggtatctcatctctaatgatggggacaagtggccctaattcattctccgactccccaggacctcatggagag

SEQ ID NO: 588674 - DNA, 750 bp, Homo sapiens
gctgctgttcagtgtatcccgacggcagtgcatccgtggatcatggtctcgcgttgccagtgtatgaggcgaggcggcgttgagtgccctgtcgtgtatccgtcttctgtatgccggtgtcttccagggtagggacttttggctgctctgatagtggacagagtgggccgtgtggaggtctttttactcttccctttgtggctgggtcgtccagcaggggcgtgtactacctcatggccctcacgccgcaaaacatccagcactgtgtagttgcccatgaaatgaccagctccaaaggcaaagaagaagcctttgtcagggaactcctccaaaagggccttcacccgcttccctattctctcactccgcttgtagatcagctcccggcgtaagtagctgtcaatctcctgagcagtgatgcgctcctgggagctgtcatggctgaggatgacggagctgaggtccccgcagttatagtgtttgatgagatcctccgtcgtgtaggggatctgaagactgcctgctcgcagggctttcctgctgcaggagggtctggttcaaagcaaagatgacctgtgaaaagttcaacccattcaatggatggcactgctcttccaccttttccactgccccagtctgtttcctcagccgctcaggctcctggggcacggcacaggtctaagacaggcactccacggaacttactgtccacttcagtcaaggagttgaccatgagcatcaaccagaaag

SEQ ID NO: 588675 - DNA, 1242 bp, Homo sapiens
ggcacgagggaaacaccttgtgttcaccacagcacatccctggaagaaactggggacgcttttctctgctctctgtgctcccactcatggtgtgcttcatgggaagcagattctgtgagctttgcaaggactgtatgcaaaatgaatttcgtctgtgttatgatgaaagcgcaccatgctaacttctttcttttttacccgtaggaagtgagaggagccctggaaaggagcgagccactcttgcttcagtgtccagaggccaccaccacagagctgagtctgtgccgcatcacgggaatgaaggagatgctaagaaaattcagcacggagataacgctggacccagccacagctaatgcctatctcgtgttgtcggaggatctgaagagtgtgaaatatgggggaagcagacagcagctacccgacaacccggaaagatttgaccagtctgcgactgtgctgggtactcagatcttcaccagtgggagacactactgggaggtggaggtgggaaacaagaccgagtgggaagtgggcatctgcaaggactctgtgagcagaaaggggaatctccccaagccacctggggacctgttctcactaataggtttaaaaatcggagatgattacagcctctgggtctcgtcacctttgaaaggtcagcacgtcagagagcctgtgtgtaaggttggtgtcttcctggactatgaatctggacatatagcattctacaacgggacggatgaatccctcatctacagcttcccgcaggcttctttccaagaggccctcaggcctatcttttccccctgcctcccaaatgaggggacaaacacagaccctctcaccatctgctcactgaacagccacgtctgaggggcgtgccctgagccgtcacagcgggcgatgtctgagaccaagacacaactattaagacgatgaaggcatcgacagtattaatgtcaggtgatctgaaataaactcccgtaaccccaccccacccccaagagtttccattaacttgatcccattatgaacagccacattacacaatcaacttcaaccccaatagaagagagctgatcatattctgtgtctttaagtaaatgtattctctgggctaccccatgtgtgtgctggtcactcaaatattgagcccctattaccatgaatcctactgccataggccagattttataaatatatgtcactttttcaagtgtatttaattatttgactctt

SEQ ID NO: 588676 - DNA, 125 bp, Homo sapiens
ctcgagctggtaccgacagatcctaaccagtatactcaccagagacaaccactctgtatcagaccgcctggatggtggggccagtagcgacctcggggagcagagtctcagacactactcggaac

SEQ ID NO: 588677 - DNA, 448 bp, Homo sapiens
cacccggcgcacttctgcaccctggtgttgactgagctccaagttggcgtcactgttgttgcttagcgactctgggtgctgctgctgtacagcgttccgagaggcattcacaataggtgtcccttatggccaggtctgggctgtggaagatctgagagactgaggtgacacctttggtcgtgaagcccttcagcggtcctggtgcacactggtcaagtccttcgcgtaagagaggatgctctccaggtttgttttggtgttctcccctgtccccagcaggacctgggctaaggaggctggcgactgctaaatggggaaaaggccatggttgtgtctccaccttcttcattgctcagaaggcctgatatagcttcagggagaaatctaccaaagcatcccccaacacggtctctgttgaatgactctcccagtcagagcagagagtaac

SEQ ID NO: 588678 - DNA, 406 bp, Homo sapiens
atcattatggaaaagaatgctgacaacggaagccatacctgagcccagatcgataactgaattatatgtgcccatcagtaagctccacacacatgaaatctctcaggtctcgtgtggaaagatacatcagaagagcactcgaataaaatgtactgaacttgaccatgacagtggagatataggggtaccagcgaatgggacggatgaccaatgcaataaccttctccatcaaatagactagtcccctcactaatcttccacctaagggattgacagagcatcctatagcagtcacctaactttttctcggaacttccacaaaagctataggtttgatgtacaagtatgttctcccatgcagacggtgaatgtaatcacacgtacagcatcagccttctttatttcc

SEQ ID NO: 588679 - DNA, 1152 bp, Homo sapiens
ggcacgagggaaacaccttgtgttcaccacagcacatccctggaagaaactggggacgcttttctctgctctctgtgctcccactcatggtgtgcttcatgggaagcagattctgaagtgagaggagccctggaaaggagcgagccactcttgcttcagtgtccagaggccaccaccacagagctgagtctgtgccgcatcacgggaatgaaggagatgctaagaaaattcagcacggagataacgctggacccagccacagctaatgcctatctcgtgttgtcggaggatctgaagagtgtgaaatatgggggaagcagacagcagctacccgacaacccggaaagatttgaccagtctgcgactgtgctgggtactcagatcttcaccagtgggagacactactgggaggtggaggtgggaaacaagaccgagtgggaagtgggcatctgcaaggactctgtgagcagaaaggggaatctccccaagccacctggggacctgttctcactaataggtttaaaaatcggagatgattacagcctctgggtctcgtcacctttgaaaggtcagcacgtcagagagcctgtgtgtaaggttggtgtcttcctggactatgaatctggacatatagcattctacaacgggacggatgaatccctcatctacagcttcccgcaggcttctttccaagaggccctcaggcctatcttttccccctgcctcccaaatgaggggacaaacacagaccctctcaccatctgctcactgaacagccacgtctgaggggcgtgccctgagccgtcacagcgggcgatgtctgagaccaagacacaactattaagacgatgaaggcatcgacagtattaatgtcaggtgatctgaaataaactcccgtaaccccaccccacccccaagagtttccattaacttgatcccattatgaacagccacattacacaatcaacttcaaccccaatagaagagagctgatcatattctgtgtctttaagtaaatgtattctctgggctaccccatgtgtgtgctggtcactcaaatattgagcccctattaccatgaatcctactgccataggccagattttataaatatatgtcactttttcaagtgtatttaattatttgactctt

SEQ ID NO: 588680 - DNA, 939 bp, Homo sapiens
  misc_feature (18)..(18): n is a, c, g, or t
  misc_feature (26)..(26): n is a, c, g, or t
  misc_feature (85)..(85): n is a, c, g, or t
gatcctttgcatctttanttcaaaangtgtaaactttctttgtcaatctatggcatgcccatatatgaaggagatgggtgggtcnaaaagggatatcaaatgaagtgataggggtcacaatggggaaatgaagtgtgctaacattgccaaatagtgtgccactagaaatggtgtaaaggctgtcttttttttttttttaaagaaaagttattaccatgtttttggtgaggcaggtttacaacactacaagtctggagtttaagaaggaaagaggaaaaaagaaaaaacaccaatacccagatttaaaaaaaaaaaaaacgatcattagtctttaggagtttcatttaaaaccattaggaacctttcactttatctcatgtttagctgtaccagtcagggatttaagtgaactacaagtggtataggcttaatgggtaatggcgggttatgaccttaataaaggtgtactttgttttaccagcggggtgttttacctggtgacttttgtttaaaccaattcttgatttccagaagcacttgaagtttgcaattttccaccctgcccatttttgtaacactgcagtcatctgggacctttaaaacacaatttttaaactcaacaagctgtgatagtgaatggtcactggtaaaacgcggatatgttcgatacacgaaaatatggcttctttgcacggccctttgagaaattaggggaaacaaactttccagtccgggtttggtgaaccttgggctacacggtggcaaatcggaaatgtgccctgtgcttcgaggaggtgttgtgcacagttgttaaccggtaggggctactgtggccaaggcatgtggtttgtctaccacacaacaaactgaattaccaagagcacagcacacactatacatcagatccctgcttctctattcttttcctcttccttcttg

SEQ ID NO: 588681 - DNA, 728 bp, Homo sapiens
cttatacatggcctaaaatgtttctacaaattagagtttgtcacttattccatttgtacctaagagaaaaataggctcagttagaaaaggactccctgatctcgggtgatctgtctgtctcggcctcccggggtgctgggattgcaggcatgggccaccgcgcccagcctcaaagtgttctttttaaagaataagaaaacgcacatgggctgggtgtggtggctcatgcctgtggtcgcagcgctttgggaggccggggcaggcagatcgcccggggtcaggagtttgagaccagccggactaacatggcgaaactccatctctactggaaatgcaaagttggccgggcgtggtggtgcacacttgtagtcccagctactctggaggctggggcaggagcattgcttgaacccaggaggcagaggttgcagtgagccgagatggcgccattgcattccagcctgggcaacaaggctgcaactccgtctcaagataacaggacaagaagagaaaagaaaacacatgttactatctccagttaaaacttttttctattatcggcaagatatggtccttacactaatattcaccgctttaaaatgggcctggagggcttggtaatgggttctacacaccattccagctttatttatcccagtctactctttgggcacctaggccactcccaggataagacgctaacatcaggaagtgccatgccaaaaaaa

SEQ ID NO: 588682 - DNA, 413 bp, Homo sapiens
tccaaagttcctattggacttaaatcccaaggtgatagtattaagaggcaggactacctgggaggtgcttaggtcatgagggctctctgccctcatggatgggatcagtgcctgtataaaggggtttgaggtagcaagtctcttccatctcttctgccacatgaggacgtagcatgatacaccatcttgggggcagaaagcaagtccttatcagacactcaatctgtttagcaccttgattctggaacgtcgcaatctctaaaactgcgataaatacatgtctctggtccataagttacccagatctaaggtctttggttatggcagcgtcagtagagctaagataattatccattttctcatcactcatacaggataagtaaaacaaggaggataagaatccatgttccaca

SEQ ID NO: 588683 - DNA, 420 bp, Homo sapiens
gcacgagggctcctctgagtctctgctggggcatgaacacggctgtccacctggtgatgatcatggatacccagtactacacatggcgagatacacgcctatgtggattaccccatctatgacgtgctctagaaggtgggccacgccaaccgccctttgcaagacgaggggcgctgtgtcatcatgtgtcaaggctccaagaaggatattttcaagaaggtcttatatgagacattggcaggagaatctcaactggaccactgtatgcatgaacacttcaatggtgagatcgtgaccaagaccattgagaacaagcaggatgctgtggactaactcaactggacctttctgtaccgccgcatgacacacaaccccaattactacaacttgcaggggatattccatagtcttgtgggaccc

SEQ ID NO: 588684 - DNA, 2037 bp, Homo sapiens
  misc_feature (1584)..(1584): n is a, c, g, or t
  misc_feature (1717)..(1717): n is a, c, g, or t
  misc_feature (2037)..(2037): n is a, c, g, or t
gtctctcatttaggagggtttgcaggtccagagtaaagtcactgaagagtggaagcgaggaaggaacaggatgattagacctcagctgcggaccgcggggctgggacgatgcctcctgccggggctgctgctgctcctggtgcccgtcctctgggccggggctgaaaagctacatacccagccctcctgccccgcggtctgccagcccacgcgctgccccgcgctgcccacctgcgcgctggggaccacgccggtgttcgacctgtgccgctgttgccgcgtctgccccgcggccgagcgtgaagtctgcggcggggcgcagggccaaccgtgcgccccggggctgcagtgcctccagccgctgcgccccgggttccccagcacctgcggttgcccgacgctgggaggggccgtgtgcggcagcgacaggcgcacctaccccagcatgtgcgcgctccgggccgaaaaccgcgccgcgcgccgcctgggcaaggtcccggccgtgcctgtgcagtgggggaactgcggggatacagggaccagaagcgcaggcccgctcaggaggaattacaacttcatcgccgcggtggtggagaaggtggcgccatcggtggttcacgtgcagctgtggggcaggttacttcacggcagcaggcttgttcctgtgtacagtggctctgggttcatagtgtctgaggacgggctcattattaccaatgcccatgttgtcaggaaccagcagtggattgaggtggtgctccagaatggggcccgttatgaagctgttgtcaaggatattgaccttaaattggatcttgcggtgattaagattgaatcaaatgctgaacttcctgtactgatgctgggaagatcatctgaccttcgggctggagagtttgtggtggctttgggcagcccattttctctgcagaacacagctactgcaggaattgtcagcaccaaacagcgagggggcaaagaactggggatgaaggattcagatatggactacgtccagattgatgccacaattaactatgggaattctggtggtcctctggtgaacttggatggtgatgtgattggcgtcaattcattgagggtgactgatggaatctcctttgcaattccttcagatcgagttaggcagttcttggcagaataccatgagcaccagatgaaaggaaaggcgttttcaaataagaaatatctgggtctgcaaatgctgtccctcactgtgccccttagtgaagaattgaaaatgcattatccagatttccctgatgtgagttctggggtttatgtatgtaaagtggttgaaggaacagctgctcaaagctctggattgagagatcacgatgtaattgtcaacataaatgggaaacctattactactacaactgatgttgttaaagctcttgacagtgattccctttccatggctgttcttcggggaaaagataatttgctcctgacagtcatacctgaaacaatcaattaaatatcttgttttaaagtgggattatctaaaaaaaaaaaaaccagttatatcacgtggtttgtattggagatgtgccaaacatngcaagaagtttttggatctttttcttacaaagaaaaatggatggttatcaacccaaatgcccatcaatgacagactggataaagcaaatgtggtacatatacaccatggaatactatgcagccataaaaagcnacagtcctctgcagggacatggatggagctggaaaccattatcctcagcaaactaacgcaggaacagaaaaccaaatactgcatgttctcacttataagtgggagctgaacaatgagaacacatgaacatagggaggggaacaacacacactggggcctggcagtgggtagggtagagggagggagagcattagcaaaaatagctaatgcatgctgggcttaacacccaggtgatgggttgattgataggtgcagcaaaccatcatggcacacatttacctatgaaacaaacctcacatcctgcatatgtacctcagaan

SEQ ID NO: 588685 - DNA, 1521 bp, Homo sapiens
gtctctcatttaggagggtttgcaggtccagagtaaagtcactgaagagtggaagcgaggaaggaacaggatgattagacctcagctgcggaccgcggggctgggacgatgcctcctgccggggctgctgctgctcctggtgcccgtcctctgggccggggctgaaaagctacatacccagccctcctgccccgcggtctgccagcccacgcgctgccccgcgctgcccacctgcgcgctggggaccacgccggtgttcgacctgtgccgctgttgccgcgtctgccccgcggccgagcgtgaagtctgcggcggggcgcagggccaaccgtgcgccccggggctgcagtgcctccagccgctgcgccccgggttccccagcacctgcggttgcccgacgctgggaggggccgtgtgcggcagcgacaggcgcacctaccccagcatgtgcgcgctccgggccgaaaaccgcgccgcgcgccgcctgggcaaggtcccggccgtgcctgtgcagtgggggaactgcggggatacagggaccagaagcgcaggcccgctcaggaggaattacaacttcatcgccgcggtggtggagaaggtggcgccatcggtggttcacgtgcagctgtggggcaggttacttcacggcagcaggcttgttcctgtgtacagtggctctgggttcatagtgtctgaggacgggctcattattaccaatgcccatgttgtcaggaaccagcagtggattgaggtggtgctccagaatggggcccgttatgaagctgttgtcaaggatattgaccttaaattggatcttgcggtgattaagattgaatcaaatgctgaacttcctgtactgatgctgggaagatcatctgaccttcgggctggagagtttgtggtggctttgggcagcccattttctctgcagaacacagctactgcaggaattgtcagcaccaaacagcgagggggcaaagaactggggatgaaggattcagatatggactacgtccagattgatgccacaattaactatgggaattctggtggtcctctggtgaacttggatggtgatgtgattggcgtcaattcattgagggtgactgatggaatctcctttgcaattccttcagatcgagttaggcagttcttggcagaataccatgagcaccagatgaaaggaaaggcgttttcaaataagaaatatctgggtctgcaaatgctgtccctcactgtgccccttagtgaagaattgaaaatgcattatccagatttccctgatgtgagttctggggtttatgtatgtaaagtggttgaaggaacagctgctcaaagctctggattgagagatcacgatgtaattgtcaacataaatgggaaacctattactactacaactgatgttgttaaagctcttgacagtgattccctttccatggctgttcttcggggaaaagataatttgctcctgacagtcatacctgaaacaatcaattaaatatcttgttttaaagtggg

SEQ ID NO: 588686 - DNA, 279 bp, Homo sapiens
cgtacccggtgcatatgtagaacatcagtcttgtagctgtagtcaggacccaccaagccactccattctcttctcagctcccggagtgtgatggttaatattgactgtcagcttgatgaaattgaaggatgcaaagtattgttcctggtgtgactgtgagggtgttgccaaaggagattcacatttgagtcagtgggctgggagaggcagacccaacctcaaatctgggtgggcaccatctaatcagctgccagcatggttggaataaaagcaggcaga

SEQ ID NO: 588687 - DNA, 436 bp, Homo sapiens
acgatgacgagtctcacggactgacctggttctgccatcagctcgctgtgtgatcttgagcaagtcactttcctctctaggccttagtttaccccctgtgtaaaacgagggtttcgtcggcagatgtatgtacaggagttgggtcccagctgttgtctgagatcttggacaagttcttccccaggctgagcctcagtttccatctctgggccatgaagtaattgaggtgctcgttgaggccccggcctgctaaattgaggaggacactgtgtgtgtgtgtgtgtgtgtgtgtacgtaccatgaagtaattgaggtgctcgttgaggccccggactgctaaattgaggaggacactgtgtgtgtgtgtgtgtgtgtgtgtgtgtgtaccatgaagtaatagaggtgctcgttgaggccccggtctgctacatagagg

SEQ ID NO: 588688 - DNA, 354 bp, Homo sapiens
  misc_feature (354)..(354): n is a, c, g, or t
ggcatatgctatattatccacgctggtctagaactcctgacctcaagtgatcctacatctgagcctgacaaagcgcagggattacaggcgtgagccacagacgatggccttaatactctgcttagagacagagtctcactgtgttgccaaggctggtctcaaactactggcctgaagtgattctactgtctcagcctccggagttagcgggattacagacagaagccacaacacccagactcctcttacttttaaatacattctttacgtgattatcctagagtatgaacccagtatgttgcatggtcttggatatgatgttggactacttctgtagcggctttatttatattn

SEQ ID NO: 588689 - DNA, 365 bp, Homo sapiens
  misc_feature (41)..(41): n is a, c, g, or t
  misc_feature (90)..(90): n is a, c, g, or t
  misc_feature (155)..(155): n is a, c, g, or t
  misc_feature (222)..(222): n is a, c, g, or t
  misc_feature (322)..(322): n is a, c, g, or t
  misc_feature (340)..(341): n is a, c, g, or t
  misc_feature (362)..(362): n is a, c, g, or t
gggcacagggcagagttagaaggtatcccaatcctcagggnacgaaataggccctgaagtttaaaggcaggcccaggcacagtggctcanacctgtaatcctagcactttgggaggctgaggtgggtggatcacctgaggtcaggagtttgaganaagcctggtcaacatggtgaaaccctgtctccactaaaaatacaaaaattagccaggcatggtgcanacgcctgtaatccctgctacttgggaatctgaggcagaagaatcacttggaccgggacggggaggttacagtgagccaagatcgtgccactgtgctccancctggctaacagaacaannctccgcctcaaaaaaatttanttt

SEQ ID NO: 588690 - DNA, 1356 bp, Homo sapiens
  misc_feature (1355)..(1355): n is a, c, g, or t
acaaaacaccaaatggcggatgacgccggtgcagcgggggggcccgggggcctggtggccctgtggatggggaaccgcggtggcttccgcggaggtttcggcagtgtgcatcctggggccgcggctcgcggcctgtggcacggcggcccggggcctgaggccgcggagctcgcggaggccaggccgaggataaggagtggatgcccgctcaccaagttgggccgcttgcgtccaaaggaccattgcaaagactccaacagtccctgcgcaagcgacggcatctaactctcgtatcatccccatgcccccattacaggaaatcagaagatcatctgactttcttccccttggcgcgcggcctctctccaagggaatcgacgcgtccaccggaacgaattcaattgcccaagctggcaccgaaaagcgcaggacacccccgttgaccccgggacacaagagaggccaacccacggggtttcaccaggtggcaataactggtacggcactaatcggggggggacctttacaaaagtgaggaccgaacgacttcgagcgctaccttgggcggcatggttaacaccgttggcctccgcacacggcggggagcggggttcgggcgccccacacctgggacccaatttcccctggtagggagaggtggacccgaatttctaattacccctttgtggggcccaaacaggtcatttctattccccatgtaccggttacgccgcccgcggaattgccctgcccagcacgaaagatgggacatacccctttggagagcaggcggaaccagcgacagaggcgaaacttccgaggccaaaaccgggaccgcactcaccacgacagcactcgggacagacgcacttcatggacacacgggggggatgcggaacgaaaaccgtgaggcccacggcgctttgcgatcagaggactttcactctggcttagcccctatgaggaggtccacgcgcagccgccctatcaaaagttaccaccacacttatggccaagacccacccaacaggtgcgagcgcagacaaacctctcaggcgcgaccgagcttacgaggtaccccttcacccacgtgacgacaccgcttggggttcaggcccaccatcatacagtcgacaacgaccggccgttatagggacatcacccacgttccggaccaactccggcgcccttcgagcgatcccactcagcgcgaccgcgccagaccagccgtatcggaccgttaacgcgaacggccaccttcacgataggtgcccactggtgaggagagcaaccatgttgggcacagcattcgtttggacgacgatgcagcactcctgctgtgtggtagcggcaanc

SEQ ID NO: 588691 - DNA, 289 bp, Homo sapiens
  misc_feature (170)..(170): n is a, c, g, or t
gagtgcatggctgatataaggtgtagcatgctagcagccactgaggacaacttgcattgcagctaaaatgactctatgtcggcaggcgtgtgcttacgctataatactagcactttgggaggccaaagcgagcggataggctgaggtcaggagttccagacaagcctggncaacatagcgaaaccccgtctctactaaaaataacaaaatctgctgggtgtggtggtgcactcctgtaatcccagctatcctggaggctgaggcaggagaattgcttgaaccttggagg

SEQ ID NO: 588692 - DNA, 569 bp, Homo sapiens
ggggaacatcacacaccggggcctgttgtggggtgggggcagcggggagggatagcattgggagatataactaatgtaaatgacgagttaatgggtgcagcacaccaagatggcacatgtatagatatgtaacaaaccggcgcgttgtgcatatgtaccctagaacttaaagtataatttaaaaatatatatatacatatataaagtatatccttagcacttgattgtgcgtctggcacacagtgggtcttcaatgaggtttactgaatttaatggagtgaaatcaaatttaactctacaagatataaaatgcctgacaaaatctgaaccactcgtgtgattacttaaagaccatcccacatagaatcagtcacctgtgttcatgttagttaaggaaggctctggtttaattgagccacaagccccttagagagtagaaacacagcaaaggtgcacgctcatcaggagagaacctgggataaagaagtctgattttgcttacactcaaataggaactctaatattaactctctctttctagcaaagtcactccatttctctgagttatc

SEQ ID NO: 588693 - DNA, 156 bp, Homo sapiens
atacttaagttagaaattcgaactatgaccaatacataagagaaggtaataaccctcttctgttctctgtcccagctaatattgactattgcaggtctcctcataatgttcatccatttaaaactccataaagcatcagtatacctgggactgaca

SEQ ID NO: 588694 - DNA, 382 bp, Homo sapiens
  misc_feature (13)..(13): n is a, c, g, or t
gaaagtagttttnagatgtgatgccagtgtgctccagaaagtgtaaggggtctgtttttcatttccatggacatcttccacagcttcacctgacaatgactgttcctatgaagaagccacttgtgttctaagcagaagcaacctctctcttcttctctgtcttttccaggcaggggcagagatgggagagattgagccaaatgagccttctgttggttaatactgtataatgcatggctttgtgcacagcccagtgtggggttacagctttgggatgactgcttataaaagttctgtttggttagtattggcatcgtttttctatatagccataatgcgtatatatacccatagggcctagatctatatcttagggtagtga

SEQ ID NO: 588695 - DNA, 203 bp, Homo sapiens
  misc_feature (1)..(1): n is a, c, g, or t
  misc_feature (28)..(28): n is a, c, g, or t
ntcgtgttgcaactatcgttagtagtancccgctgagctttacaaacccaccaaaggttgggaagaacgacctcaaaagataggaccaaccggctctgggccacttctacatatcccacatagggctattccaacctggagacaaggaatacagagaagagtatgagataatcaaattgctactcagctgataacaatgctaa

SEQ ID NO: 588696 - DNA, 179 bp, Homo sapiens
  misc_feature (9)..(9): n is a, c, g, or t
agtggtaangataggcattttccccttttttagggctgattaatattccattgtataaaataaacttttaaaaaaccaccatttctttatcctttcatctgttgaatggaccaaccaaagggggtttaattttcacatcttgggggggggccttaattgcttggaataatgctgcaatg

SEQ ID NO: 588697 - DNA, 497 bp, Homo sapiens
ctgtgtctaaatatcaaaagatatttgtgaggaggggggaactctgcctgcctccttccctttcttagtgaatctgccctgaactgttttagcacagctttgaaatatctcctggggtccacatttgaataattcaattcagttgtaattgagtgcctactataagctgggtgccatatggccatggcatgatggtgtggaggggatatgtgaagcacacgggcagcagcttaagtgcatgggagcttggctcagccggggatggcaagggggcagcagacccttcctccaaggagggccggcatccagaagcagtcacgagtgccgtgcctcacgcacctgccctgtgccaggcatggccccctgccccgccgtctcttcattcccatgcactctctctaccatgtggagctctctagtttcccacaatttacgagagaaggttccttttctagtcaaatgattattcagatcagactaagcaatggctagactgc

SEQ ID NO: 588698 - DNA, 609 bp, Homo sapiens
aaagtaggctaggtcgaggctgggtgttgggagagggaccagagagcctagcagccacgcgcgcggctagttacatcacaccccgggaggagccgagctgcgcagcggcccagtcaccatcaccgcaacatgagcagcgaggcgagacccagcagccgccgcgccaccccggtcgtccccgccctcagcgccgcgacaccaagcccgggcactactgggcagacggcgcagtggacgcggtggcccgaggcggggcctcacattcgtgcggcgccctgccggcgtggcacacagacaggtcagtcagcagacgcgaagcgttatcgggcgaccaggctaaaacatgggttcaatgtgttaacggaaacgcgattattgcgtttcagtccaaccagggactttgaccaccgcagaggaaagcactgtattcgggtaccagccaatggacgtttggccgatttactagtggcacatgactgttaagcgcccctcagtcgaaatgttacccttttcggacaagattggttagggggaagatctggcgcgtaagcacttggttgagagcgtttcgggcttggtcaggtttggaatcgtgcgaaccaagcgtgg

SEQ ID NO: 588699 - DNA, 947 bp, Homo sapiens
cgcagccagccaagttcgacgcaagcggagcaggctgtgggctgtgggagctacgagcacggaggaacggagcacacgacctctacactggacaccggcgaggcagcactccgcttccgggctggtggacgagcagctctcgctcgacacgtcccccacagggcccagcctcagcagactgccaccaccttccagctgacggacgctgccaacagaacgcgacggctccgcctcacacgctctgctggcgactccactcagctgagccaggccctggcgccttctctcctggtggaccagcaactagccctggggctggacagtggaccctaccagcctgcgggcaaggtggtatggccggctgctgaagacaacagcagctgaggccgactgctaaggacgatagtgtctcgcagctggacagctgcaggcaaggccaggagtgcccaccagccttgccccgctcctccaccatctaggccctgctcctccttcactgcagtgactggatccatctgctggctgctggctgtcgggcctccactgaccttgactgacaagacccttcctggaccctggcacttgacaacaaacgggccacagacccccaactcacctcacagaacagtcactgggttcgggattctcgtcttcccctgccaggacccccccggttctctcagaatcccttcagccccccaactgccctgatccggccaggacgaacacttcgcactggggagccctggccctccaccactacactccggctgcctgcagctgctcacagcatctggaacccaaatccactcggagcacggggccaacaacgccccccagaacccccccacacacccacccacccgcgggcaacgcggcaccgcccacccccggcccccctggaccgccccctcctgccggctgacaccatggcccccccgccaccc

SEQ ID NO: 588700 - DNA, 149 bp, Homo sapiens
cggccacagctttctcggctgcacatggttctcgaggcggcccagggtaggtgtgcatgtcgtgcgtccatctcgccgtgcccagcctgtgagccgtcgttctactgttgtcaaggtcggcgatggagccggatcaggtcggccagcct

SEQ ID NO: 588701 - DNA, 851 bp, Homo sapiens
gttgtgcatatagctatagtttattcatttttaatgctatataatacttgcacaaatataccacaattaaattttccattctgtcatgctgtgtatggaaatgtgcctgtttttgctctttttaaagcaatgaagctattaacattctggtcactatatcctgctgttcgtatatgtgagtcctgaggttacgggtgtgggtgtacaatgttttagtttgtcttttttaaatacggtaaggcagaaattcctgatcatagagaaggtgaacgctcaagttaacttaccaactctcatatacccactagcagttcatgtatgttcctgttggctcagatgtagatgttcactaacatttggtataatcaatcttcttccatacttgggcaacctcgtgggtgtatcctgttaacttatagggatctgagaagcttttcctacgtaccagttaggttgagcccttcccatatccatcatttagcattcagctatggtgaagcactgtgtagagtctctcctattttcttttgtgggtaattaacactcattttctccttgtctaacaacagctcattataattatattttacccaacagagttcactctggtcagcttcaggcaggcatgcacggctggactcaggttgtgaacccctgaccccagggcaagcgatctcctgctcagcccgaagaagacgaatcaaggatgccaaaagccggaaatcgataacgcaaaaggagcccagagcgaagcaaaccggacaaagaactacgcccaagatactaaaagccgtcggagggaaaccgacctgtcccattggcaaccgcaaaagcacatccaggaaaaaaag

SEQ ID NO: 588702 - DNA, 969 bp, Homo sapiens
cggacggagccatcgcggggcgaaccggcgccccgcccccgcccccctaggagcgatgccggaatataagctggtggtggtgggcgcctgggcggtgtgggcaagagtgcgctgaccatccagctgtatccagaaccattttgtggacgaatacgacccactatagatggattcctaccggaagcaaggtggtcattgatggggagacgtgcctgttgtacatcctggataccggcggcaggaggagtacagcgccatgcgggaccagtacatgcgcaccgggaaggtgcgttcctgtggtgtgtttgccatcaacaaacaccattgtctttcgaggacatccaccagtacagggagcagatcagacgggtgaaggactcggtgtgatgtgcccatggtcgctggtggggacccatgtgtgacctgtcctgaacgcagtgtggaatctcggaggctcaggacctcgcccgaaggctacggatcgcctactatcgaagacctcggcccaggaccgcgcagggaagtgaaggatgccctttctacacgttggtgcgtgacgaatccggcaggcacaagcctggggaagctgaaggccctccatgattgagaaggtggccgggtgggattgaggcggaagtgttgtgttctccctgagggccataggaggtcaggacttgggggtcccgaatgccagggaagcacggtgcacaggaacgggggagacaggaaggcggcaaccacgaagggaaagaagcggtcgttgagccaagtaccccgggaccgttggcccaaggggacttggagacctcccaagggggggtggtggccaattgtttagagtcccaaatgcgcgaagccaaggcttagtccctccaggcctgtgggcatcgcgagagggagtccgcccctttcttgggcgcgcaacacacacatcaacacaaaaaaacacggggccttgggggaggaagg

SEQ ID NO: 588703 - DNA, 159 bp, Homo sapiens
  misc_feature (154)..(154): n is a, c, g, or t
  misc_feature (156)..(156): n is a, c, g, or t
atgtgtggctcctccctttaaaaaaagacttgctgcgggctggagagttctgagattggaaatcataatgcattcaggttcttgagaaagtaccgagaaaaatattgtactttcaatgatgatattcaagggacagctgcagtagctctagcangnctt

SEQ ID NO: 588704 - DNA, 329 bp, Homo sapiens
agaatcgagctcggtccgattatgctcctagacggaagagctttatagttttagctcttacatttaggtcttttatgcattttgaattaatttttatatatggtgttacataaaggttcaatttcattcttttgcatggatatccagtttcttcaatgccatttgttgaaaagactatcctttccccactgaatgatcttggcacccttgtcaaaaaacatttggctatgtatgcaaacatttactttctgggctctatattttattccactaggtttctatttctttttgccagtaccagtactggttttggattaactgtagacttt

SEQ ID NO: 588705 - DNA, 287 bp, Homo sapiens
  misc_feature (39)..(39): n is a, c, g, or t
  misc_feature (65)..(65): n is a, c, g, or t
  misc_feature (230)..(230): n is a, c, g, or t
  misc_feature (257)..(257): n is a, c, g, or t
  misc_feature (284)..(284): n is a, c, g, or t
atatggtctacctacattaatagatttttggatgttaanctaaccttacatcccctgggataaanccctcttggtcattgatatggtttggctctgtgtccccacacaaatctcatcttgaattatactcccataattcccacgtgttggagggactggtgggagataactgaatcatgggggtggtttctgccacactgttcttgtggtagtgaataagtctcatgagntctgatgatttgataaggggaaacccntttcacttggctcattctccccctctncct

SEQ ID NO: 588706 - DNA, 689 bp, Homo sapiens
  misc_feature (316)..(316): n is a, c, g, or t
tggtgtgtaacgtagacaagaataaatgataaaccaatcaagaaatagtaagctacaatcttttcagagcaccaagtctacgaagaaatatacgcataacacattcagagagacgaacaacaaagttactaagtggggggcatgaagttaagatgtagagttggtattagtcttgtagtccgttaatgcaaacagtgttaccaggttaaaatacatgggttcacgaaatagtatttgtgatccttatggtaacctcaaaacctaaaatacatacacgtggatacatagacgaagatattcagagcttaaaaacctnaaatcatatctaccagaggcaatagctagccttccctacataggaagaccaggacagcaacacgaacagaagaagaccagcaaaatgaatctagaaacaccaagatagaattaagcaaggccaggagtccgtcgtttacttatcggatacatccatttgacttggcacactatggagctatgatctccaatcaaaaagacatagactgggctgaatgacatgcgagaaaacaagacccattggatctgtttgcctacaagaaacacacttaaaactataaagacacaccattaggctgaaagtaaagagttggaaagagttattccatgccaatggaaaccaggaaacaaccacggctgaataaaaccccacg

SEQ ID NO: 588707 - DNA, 1012 bp, Homo sapiens
agcgggaaaacctgtccatgcctgaagcagcttgaccccagcaaacaccctgcctccatggagtgaactgcaaatctccaaaaaaaaaaaaaaaaaaaaaattcttatttccttaccccttcctgtgctcccctggtggggcagggacagcagggttccctaaaacttgacagtttcgcctccagtgatctttaaaagagcagaagctggcttgtgaggcttgcagtgcttgcctcgatgggggtagtgtggccctctgtgcgcaggctggggcctccaagggaagacgccacaattgggcctcttagatgagagaagggacgccttaaaattttgaaaaagatttcggcaaaagagggcgcttctcttgtaccgccatgtggcttgacacacttggtgctcggttccctttcgcaagggtgaacactttgcgccagttctcatcccctttggccaagttataaaacccttagaattttactttttgtgtgaaacacacgacacttttacggtctcaggaaaaccaagggctcttctcggaaaacaccgtggtgacgtgttgtttaggagcattaaaccgtggattttcgggaagtggactcttttaaggcgtgaccaccagggcggtggacagttgtcccccacttccgagaaaacaccgtgtgttctttgatcaattaaagtggagcctttgcgacatattcccccgccaacgtggcgtgtttgcccaacaatgctgttggtttgtattgcacgccgcccgccgtttgaccatattgtttggccggttggtgtgacataactggggggcataacgcggcgtgtgcagagacgtttttgtggccctctacaactcctcgaagtgttgtcctattataagcccaattgtgccctttctccttattcttgggcgagcctcctttctctccgggggggcccccgcggtctcctatatttgggaaatcccccctttttatagtctacagcttcttaatcaggggtcccatctgcc

SEQ ID NO: 588708 - DNA, 106 bp, Homo sapiens
gaccccgacttcaagtgatgggtggtgggtattgtggtaaggatgatggtgatggtgatggtggtggtgatggtgatagtaacgatgatggtggaggtagagatgg

SEQ ID NO: 588709 - DNA, 938 bp, Homo sapiens
  misc_feature (914)..(914): n is a, c, g, or t
cgcgctctcctccgcgttcgccgccgccgtcctcccgcggcggcgcgcgccgcccggggcggccggcggccgcgcccctcgcctgccccggggcgcccccctgtcctgcgcccctctggtgccgccccctgcctgtcccctccgccccgccccccctggcgtcccgcgggccgtccgcccgccgccccccgcccgcccccccggtgcccccggtcccccccgcggccccggtccccccggccgccgctgggcccgcccccttgcccccgccctcgccgccggcggccccggccgcgccgccgccgccgcccgccgccccccccccggcccctgccccgccgccctcggccccggccgcccctgcccttctcccccccccccgccccctgccgcccgcccccccggtcccccgccgtcccgctgcccccccggcgcccccgggtcctggggccggggcggcggccgctgcggctgcccgtggggggcctgggggccgcggtcctggtcctgtgcgcccttcccccccctgctggtggctgggggtgtggccgtggccgccctcgccctgcttctcggtgtggccttcctggtccggcccccctcctccctgggggcccggcggggggcccggcgccccttcctgtcccgccccgcggccgcccgtgcctgccgcgttcccccttccctcttcgtccccccgccccttccttccccccctccctctgcccccccccccccgcgcccggtgccgcggccgcccgcgcccccccctgctgcccccggccttcccccccctcccgggccgcccgcgccccggctccggggtcccccgccccggctgtggggcgcgggcccgctggggcccggccgcccggctggccctgtgtgtggcccccccccctggcggtgggtgntctgggcccccgggttggttgcct

SEQ ID NO: 588710 - DNA, 929 bp, Homo sapiens
aatttaatgtgtatgtgtgtatgtgtgtatgtgtgtgtgtgtgtgtgtgtgtgtgtgtgtgtgtgtgtacaaacatgtatttttctgcaactctcattatgctggctagagtgatgcagacttgttcttctttattaaagcactctcaagaataagcatctctttaaaatgtttctgtgtataatctagtttattacagagtccattttttcttatcgtctttataagggttcacttaacttaaaaacagctttataaaacaactttagtatcttcgtgtcgttgctatcattgtgcctacttccctagagaagccctggctacctcgcgcattaggaccacgtcgtgggttttaagcggctctgggaagcagggttggttaagtaaagacaggaatgtggggggagaggtgagtagttcctttcctctttctcctctccaatttatgcttttaacttattttctacctggataaacttctggaacggttggcttataaatttaacttctctagttttataaggcagtttccaccgttggctgggtctaatgcttttctgagaaatgctaagcagaattcccaagctttttccagttctagatatctttactagaccttgggggactcttataatggagctgctttgttgaaaaagccactttaattagattagtgtcattgcggactaactcacgaaggattgcccagtgagaagcttctagcgctgatctcagaggaccagagtgactggaggggtaagtgtctcaccaggcccatggatgaatttctggcctttaaacaatgatactgcgtcttgggaaaaagaggcctcatttctccgaacgagagaaagatttttccccgggtcccatctgtttgggtggcggggggttccaacggcggcacccccgttcccaaaaacggtttt

SEQ ID NO: 588711 - DNA, 580 bp, Homo sapiens
accctaaaaacccaaatttttttttaaaaaaacctcctttttatagggaatttcccctttagggaaacctaaaaataaagtggtttaaaaaaagggccccccccaaaaatttggccccaaaaggggccgttttttttgttttgttttaaagggcgggaaaaaaaaaaagggtttttttaaatccttttttttcaagggaaggttttttccagttaaaaatattaaaaatggctttttttttcccgggtccaaaaaaggtttttctttccttgttttctgggggggggtcaaaccccctccccatttttgggcaaaacaaaaagggcccgcccctctgcaaaaatgggggggctcccccattgggcccaccacctggaaacctaaaaaaaaaatggtgataaaagttccccgggggtttttaaactcttggcggctatttgggggggaacccccacaaaaaaaaaggttttggcctcttcccgcggactttgaaagggggccgccctctctcaaatatttccaccccgcctaattgtggcctaattctccgggccacaacaaataggtggcgcctccccga

SEQ ID NO: 588712 - DNA, 133 bp, Homo sapiens
cctgccggtcgagtctagcaggattcccccagttactgagctttacctatggattgtttttcttccagcctacgcagttaccttttgctatgatatattggtaagggatcagtatctattactatgttatgaa

SEQ ID NO: 588713 - DNA, 119 bp, Homo sapiens
cattgtcaaaaacaatggagagcaactgaatggacattataactgcataacagtagaaacaagcagaagtctgacagaaccagggaaataaacaatcaagaagagtcctcctaggatta

SEQ ID NO: 588714 - DNA, 1153 bp, Homo sapiens
gggtcactgtggagcctcgtttcgctccctatacctgtgcccgaaagcgtgccgcggagtcactccatacgaggacgtgatctacaggccacctgctgtatgactatccacacggaactgcgcgcgtgtgcggaggcagatcggaccattagtgcgcgcgaggcaataagggcgttccgcatacagatgatatgcaggggttagtgtcccgcatctagagttcaagcgtacatacagaggagtgcccaagtatacgagtgctatttcctatcaaggactggagggagccaggcatagaagtaacacggaggagatcccagtgtatcgttcccttggagggctcatcacgcacatgatgtggactcgagggcaacaatcatataagaaacgctaccaatcacagggagcactccttagacgggaactatagcctagacacgcgtggacggcccactaacacgtaaaaggacgtcgatcacttcatcccttctcctctgctccaaatcaaggcgtcgtaggcaacgaatccggacacctgggacaattctacctaaacaggagcctcttcctagcgcggaagccatcgacacggacgagttcatcatcgcacccaatgtcgtgctcatgtgatgtatgcgaaagttcccaagtccagggtgggcacctggcaaagcctgtacctgcgagaagccgacatggcagaccaaccagacatagggccaaatatcgtgcggaaaggcttggtgaaccaaacactccgaaagataccccataatgacaaagacattacacaccattataaatagccacacaaatacaagacaagaacgagaatggaacgcaaacaatcaacacggagtgcctaataaaccacggtagacaagacatcgacacaatcaaacagacgaatacaccaccatgtagaccccactggggacatcgagcaccacacggcacagaggccatgggccgcaaagagacccgccgacgggcacccagccacgacaacacggaaacagacacaccaccaagcggctaaacgcaccgcaccagcacagacgcacaatagacgagcggtcccaatcaccagggcggagtagaccacaacgcccagctccatacccaaggccactccaagcaaagaccacacacc

SEQ ID NO: 588715 - DNA, 240 bp, Homo sapiens
aaagacatccatgatcctaccttagtgtgagttactcacagtggctatacactctcccgactcctcatcaataattatctgcagtatatttttctttttttttagacagggttttactcccgtcacccaggctggagtgcagtggcacaacctcagctcactgcaacctccacctcccagactcaagcaatcctcctgcctcaaaaaaataaaatacagcagttaagctaaacctctttg

SEQ ID NO: 588716 - DNA, 213 bp, Homo sapiens
ccaaaattggcccccgggaactttttagcttgggggataaaaggccgaacctgggatttttgcctcccagggccaaaaaaatgttttccccccaattttggctgtccatttttaaagggccctgggggggggggaggggggcggggtgggttccccccaaaaatggggtttattaataaaaaataaaaggggggaggggtgtttttggtttta

SEQ ID NO: 588717 - DNA, 182 bp, Homo sapiens
  misc_feature (24)..(24): n is a, c, g, or t
  misc_feature (27)..(27): n is a, c, g, or t
  misc_feature (35)..(35): n is a, c, g, or t
  misc_feature (52)..(52): n is a, c, g, or t
tcccagttctgagtccagaagtanccnaggcattnactacaagcagctactnttactaacatgacaaaaactagccccattatcagtactatgccaaatctcacaatcaatcaacccaaacctaatactaactatagccatattatcaacttttaatccggagggcgtaatatagggtttca

SEQ ID NO: 588718 - DNA, 405 bp, Homo sapiens
ggatggtgtcatgaattctaaaaggctttatcaaagtgggtgggattccgagtcaggaaagggcctttatagacacagggaccaatccaaacctgtgcaggagtccacacaggtcagatgtgggacagcagagcaaaactccagctgggaagacctctagccccacctgttttgcaaacgggaaaagagccccaggagtggctcccccacggttgagaagttaactcagccccggcttcacaaaccccacgtgcagtatggcagttagtatttttgggcaccacctttcgggtgtacctgtctcctatacaccttgtgccaataggcacaaggcaagtctcttgcccagaaccagtggaaagcaaatgaattcgttagcctttacaaaaaacacctttttttttc

SEQ ID NO: 588719 - DNA, 136 bp, Homo sapiens
gatccagtggcaccgacaataagcatacagcaagaatgcagatgtgtgagatctcatgactgcaggtacacctgtctcaggtgatggcagctccaccaggaaccagttctctctccctgcagcgtaccgagctcga

SEQ ID NO: 588720 - DNA, 540 bp, Homo sapiens
agcgggggcgggctctctgacgaatgactggaaggtgacggctggtgacctgtgcaggccgttggtgcgagtcagaggcaggtgactatgaaaggcttatagttgcgcgaacacgagttccagcatgaatcatagcgagtcgagatgtgagaggtccaggacgccggggccactccccgtgtgagtcgcaggagaagcatggagagaataccgaaagatccatgagcggaagccgtttcgagaacacgcaggaggtgatgtcgtgaagccgagacacgtgacgccacgagaaatgagagaaatgtcggcgacgacagggtgccagtcaagccacacgtgttgggcagaccagaagccgacgataagagacagggacacagaaaggtacattacccgacactgtctcccgagataaagacttcatggggcaggtgaaacaacaatgaacatcaaccgccaaattactcaactgattccattcaactgagaggaacactgggggttgaccaacacgtggagcaagagtcgcgcagagaagac

SEQ ID NO: 588721 - DNA, 267 bp, Homo sapiens
atcaatgacaatatcacgagagtaaaaagataactcacaagcctgggagaattatatttacaaatcttacatccaataagggattaatatccatactatataaagaacttatacaagtcaacaacaacacaaaccctgatgtaaaggctaggtacagtggtccatgcctgtaatcgcagcactttaggaggccgagatgggaggcatcacgttgagcacaggagctcaagaccagcctaggtaacatagggagaccttgtctttacg

SEQ ID NO: 588722 - DNA, 115 bp, Homo sapiens
tggagccgctgttattgctgagcacctgcaatactacctactcgggaggctgagacggacagattgcctaagtccaggaggctgaggctgcagtgagctataatggggccactgc

SEQ ID NO: 588723 - DNA, 202 bp, Homo sapiens
atcggcgctggaacttcacggttagtccgaggaactgtacgggcacgagctgtgcgcgcacgtcgtcttcgccggaaccgaaagtggttttgaatagagcttcggagcgcaggcggcccggatcccagttctggcgtgtttcggggagcggcgttgcgcccgtcaggtagggatacatgagcaccgagctcatatccatgtc

SEQ ID NO: 588724 - DNA, 169 bp, Homo sapiens
gatcgggtggtgagagcgctgcggtcaggtgttaacttgcgcagtaggtcagactcgtctagccggacggcggggattcagctgagcgccacctgtcggctgtacgctgctctagagggggccgtggagccatgcagaagacgtgaaccccaggaagaccgcagaatgc

SEQ ID NO: 588725 - DNA, 223 bp, Homo sapiens
gcgtgattccctggacaaacttcttgcagaacaacttttggactttgccagtttcaaaaggtttcttgaaggtttgaatttcaagttgaggaaaacctttgaggtttttggatttgccctttgagggatttacaaagaagatctaagtgtcccctctgccaaagatgggcttgagaaggcaaaagcaaaatttttttgtaagatttctattctaaacgggagg

SEQ ID NO: 588726 - DNA, 608 bp, Homo sapiens
tagggacagactctcgaaatcctgacctcaagtgatgcaccgcctcggcttcccatagtgctggaattataagtgtgagccaccatgcctggcccaggtgagtgttctttttttttttttataacacaaacagaactaggtgagccttcagggaaagaaaaaagacggggtgcttgtgtgcgtgcatgcccgtgaatgccggcctgtgatttccaacacacgcgtcctccctcctcggcctctcaaagtgcggggagccactcacgggtgtgagccaccacgcccagcagagcttcgtttcccaatcatcttcatcatctccatctctgacaccagatcagaagggtctttctcgggggcatcatctttcaacatcttcagggccagggtgaccggctcctggggctggtcttggtcaatccccactgcttccggcatgaccactggcccaaagcaaccttctcccaggggctggcccagtgtcagcttatctctgggaaactcccattgggggtcctcgggaagtccatactcggagacccctgccagcatgggggtgtctgccgttgaagagaggcgtgtggtaatcctcaccaggggggttgtgg

SEQ ID NO: 588727 - DNA, 381 bp, Homo sapiens
tctcccccttcccactgtgattggcacatcgacaagggctgtcccaagtcaatgcatcgacaaagggtccgggttagggcaaggttgtggggctcaacaagactcatagagtcaaacagttccaagtgtccacttggggtaaagccactgccaacaataccagtttatcatgctcattagtttggtatgtcgaaactcaaattaaaactcacacccacccacccccaagtgcatgtctccatcacttaaaaagtaagttccatttgaaaatatcctttcttttttttttcttcctatttttgtttgtttatacaaatatctgatttgcaagaaaaagtgcatgggaggggttttagtggtttaatgaatttttaattaaga

SEQ ID NO: 588728 - DNA, 424 bp, Homo sapiens
aaaaagttaagggcaattataattccaatacattaattcagtaacagctactaaatccataatcctattagtaaaaccacagacgttgcacaatgtgaatgtacttaacactgctgaactatacacttaaaaatggttacatcgccatgcgtggtgccttacgcctgtaatctcaccactttgggaagctgaggcgggtggatcacttgaggtcaggagtttgagaccagcctggccaacatggtgaaaccccatctctactaaaaatacaaaaattagccgggcgtggtggcgtgcacctgtagtcccagctacttgagaggatgaggcaggagaatcgcttgaacccgggaggcggaggttgcagtgagctgtgatcacgccactgcactccagcctgggtgacagagtgagactctgtctc

SEQ ID NO: 588729 - DNA, 381 bp, Homo sapiens
ggatgcatccctacgcctggtcgcctgttcgggatggagtattgcctcgtgtgtctctccaggcgccgccaggacagtgggtgtccgcttggcaggcgagaccaggggacctgctcggagggctggcacgtccggagaggggacctcttcgaacgtggctgggagtccagagagaataccaccccgaagagctgggagcagggtagagaggaccacctcgagggcctggcagtctacaaaggggactggtgaacgcagtcagtattttcggatcgtcgatggcatggtccattccgagcagaaccaggagatggtggggaaaaaatgtatccatatcaccgggatgagcctcctagggctccatggaaccatggagaagag

SEQ ID NO: 588730 - DNA, 115 bp, Homo sapiens
  misc_feature (69)..(69): n is a, c, g, or t
  misc_feature (79)..(79): n is a, c, g, or t
taacatcgcatggcaggatgggtgttggaataattactttcctccacaatctatcattttaataagttntataatagtngcagttcatgggaaacatgccaagtcgtcgcgacgc

SEQ ID NO: 588731 - DNA, 422 bp, Homo sapiens
gcgtcgacccagctgcataatttacacctagtgcaaagcaaaaatgcagggccccttgtttaaaaattattaagaatttcagctgggcgtggcggctcacacgtgtaatcccaacactttgggaggccgaaatgggcagatcacttgaggtcaggagttcgagttcagtctggccaacatggtgaaaccccatctctactaaaaacacaaaaattagctgggcctggtggtgtgtgcctgtagtcccagctacttgggaggctgaggcaggaggatcacctgagcccagaaaggtggaggtgcagtgggccgagatcatttcactgcactccagcctgggcaacagagcaagactctatctcataaaaacaaagaaagaaagaaagaaaaagaagtaagaaaagaaaataccttgccttgag

SEQ ID NO: 588732 - DNA, 461 bp, Homo sapiens
atcccagcactttggaaggctgaggcaggcggatcatgaggtcaggagttcaagaccagcctaaccaacttggtgaaacctgtctctactaaaaatacaaaaattagccaggcgtggtggcaagcacctgtaatcccagctactcaggaggctgaggtaggataatcgcttgaaaccgggaggtggaggtcgcagtgaaccaagatcgcaccactgcactcccgcctgggtgacagaaaaaaaaaaaaattccaaagattacacttttaaattttacacaggacattgaatgtgggctgaaaaaaggtacaccatggttttgcagtaaccacgagagagtcaacggggtatactattaccagacaaaatagactttaacacaaaatagtactagagcacaaagaatagtatttataatgcaaagagtcaattcatcaggaagatgcccaattttaaacata

SEQ ID NO: 588733 - DNA, 156 bp, Homo sapiens
ccccccccccccccccccccctttttttttttggggttttttttttgggggggcgccccctttccccccccgggggggcctgccccttttttttggcccccttggggggggggggcttgggggggggggggtttttttttaagggggatatttata

SEQ ID NO: 588734 - DNA, 398 bp, Homo sapiens
  misc_feature (153)..(153): n is a, c, g, or t
  misc_feature (235)..(235): n is a, c, g, or t
  misc_feature (245)..(245): n is a, c, g, or t
  misc_feature (289)..(289): n is a, c, g, or t
  misc_feature (313)..(313): n is a, c, g, or t
agcttagacgatcactgggtatctgagataatactcggcttggttattaatgtttaatatattctcaactagatgcgtatggtgccatcaccaccttgatagtgtgagcattcttcatgaccacgtcacgtgcatatgttaatctcattcaangtgacatcgcagttctatctagtgtcgctctcgagtcattctggtacgctcacgtgcattgatgcgtgaacagtgtacttcnttgccaggangcttttctaatagagcgtgcgcgaaagttttggacttgtggaancgaatgatctcagtgtgcagtagntgtcgtagacttatgctacgtatacttagtgaagatatttaaagatagcaccaactgatactatataatgtaacacttcacatat

SEQ ID NO: 588735 - DNA, 108 bp, Homo sapiens
  misc_feature (69)..(69): n is a, c, g, or t
ggacagacagagattctcatgatgaagctgcagtagaggcagaagaagaagccagctacccaaagactnaaaaagttgacaacaactgttttgggacatggggacctt

SEQ ID NO: 588736 - DNA, 210 bp, Homo sapiens
gtcagaaatacaccaggtagcaagtgcttgctacaagggtattcagtcatactgcagcagacgaataaacccaacttagatatttcctacatactgtcatcttctccaaacgaaaatagtgatgcatctcccatagagaaaatcacaacacttgtaacgctataggtatctctttatattattttgggcgggaatattttccccagacga

SEQ ID NO: 588737 - DNA, 125 bp, Homo sapiens
gagtgaggcattcttgaatgacttcacagtatggttgcatagatgtttcctataaagattctgtacatgtatccataggtgaattgtcttatccatgactactacaattgtatgcattttctttt

SEQ ID NO: 588738 - DNA, 145 bp, Homo sapiens
  misc_feature (16)..(16): n is a, c, g, or t
tctagagtgatccccntagatgtaaccacaaacacaatagtgtgctcactacacccaccacatataacaacataaaaccctacatatcacactgatgtgaactgacccacctgaaggaactgactgtgtgtacctgatgcgtctg

SEQ ID NO: 588739 - DNA, 863 bp, Homo sapiens
ggcttgcagtggcccccgccatggctctacaagccctgggcctgcggtccccgccttccccgcctgcgtccctggtcgctcctgtgccctgacccacgaggcctggcggctgctgctactctggggcctgttgctgcttgtgccgtgagctgactgccaggccattgtcccgcgccgctcctgtcagccgcgccctggccgcgcgcgcacctggaaggctgcattggcgtcttgctgggctccgggccgggtgggcagtgatggcctccacagagcctgcattgtgcggcgcattgggtgagccttcctgtttagatagactgcgctgacggcctgcccctacctgcatgggcttgcagtaccggctgtgaaatgctcctgtgctacccgcgaattctgtcttcccgtgtccctgttcacctggagctgtccctctgtgaacctaagcagtagcggttccgccaattgaaacgggtctgcacctgggagcattgatgaccccaaaaggacagggacactgatgagacaagaagggaagtacgccctccgggtaccatggggtgcagacacccagaagacttcatatgccaccgaataacctaccctgaggattcaacgcggaatcggcccatgagacatagccccggtccctttggcccaacaccctcaggaccccatatccaaaaggaaacatatatctgaaaacgaacgtgaccatgggggttcacaacacgcagactggagagaaaacagcaggccataacccatacaagagcaataagccccacacgattatggagtcaggatccaaacagagggtaacaacggatacatgggaatcacgaagcaacacaatacaaagc

SEQ ID NO: 588740 - DNA, 763 bp, Homo sapiens
tgagatgttgttgttttgtgttgtttttggatttactcggctcgttgttgtggtctttatcggctgagtcactggttgcacctcctggtgcaccgccacgcgcgccgcgtgaggtgcgccgcggcgctgcgacgcggtggtagcctgcattcgtacgagtgctgcttcgtctccgggtgcgctgggagcggcggagtgcggcgaacgccggcgccggtctcgcccgctgcggctggcctgtgccgccgccgaggtgaggtgcctggcgggctgtcatcttcgtggtttacggctgccgcagcgcgtcatagggtgggctgtcgtggggggtctgtgttttttgtgctgtgttttctccgcctgcgtcctctgtgctgtgggtttggggtcgcctcgcgccgcccgccggctcggggggggcggctcgcgcgcccgcggcgccctcgttgttctctcttcttgctctcctgcgcgctctgttgtcggggtcccgtcgactccccccccgctgcgggccacggtgctcgttcggcggtgctggcgtcgccgcgcgcgccggcgggcccggctggctggctgtcgcgtccgagccgcactacacagttcggctcgcggcccggcccatccccccacggtccgcgcccgccccccccccccgccgccgcgcggcgcgcccccgcgcgccggccgcgggggggggggggggcagggccccccccccccccctcccggttgcgccgtggcgctggtggggggcggaaga

SEQ ID NO: 588741 - DNA, 422 bp, Homo sapiens
ccagttcctgcttcgaaaatattgccccctggtgttccgtacacgaacattggagagaattatatggtattgagtaaggcaatcatgacaatcatccatagtatttagggacgattgcttaggaagcttgttagcacaatcagaattctttagcccaggacacatgacaccttctatacatgctgtggtgacaatagtgataaactgtgaacagtccaactctgattgcattcctctcagaatatggaggacaggagagtggggacaatctcagcattaggactgccctctctcgttttgtttcaaaaagagtttaagtcacttagaaaatacatataataagtgtaaaaaaaaagggaaattgggccacgggaacatggcgagcaatgtccagtgaggtcaggatcgaggtcagtatgtgg

SEQ ID NO: 588742 - DNA, 254 bp, Homo sapiens
gggggggggtttttttaacccaggcctttttttttaccccccggttgcccggggggccccccccccctttttttttcccccttaaaaaaccccgggggggttcccccccccggtttttttttttggcccgggggggggtaccttttttcccccgggacccctttttccccttgggccctttttggggccccttttaacccgtttttttccaaaaaccggggggggcccgggcgggttttcccggggtttgggga

SEQ ID NO: 588743 - DNA, 1028 bp, Homo sapiens
cacgcgtaccgttgcctttctgctcccgcctatatgcttccagagcttctttcaatggggtaattcagcggagtatagacacaggtatgagggagaggtgacggacggcagtgctagatatagatagagatagatagggaacctggaaggacagctgggtacggtatggggcatgcttcgagggccactcgcagagcggcagccatcagagacccacaagcaaagaacaacaacaaggagaaaacgccgacaaagaaaaaaaccacacaaaacaatcaagaacacccacacaacagaaaagccggaactcacaaacgcacaacgccggaacaccaacacacgcgcaccaccgagaacccaagccccacgaaccacaaacaaacacacaaccagcaacgaacacacacaacggacaacaaacacaaaaagcactaaagacaaagacccaaacaaagatactaacaacaagacacaacacaaccacgacgcatacacagccaccagtaacacttcaacatgacaaaccaaaacaacataccccctaaagagcatagtgcagcacgacagtatcacaacaacccagcacagaagccacacagacccaccaaaagacgaacacaatagaacgccgagaaaacaggtacagcaccagatacaccagaaaacgcacaagacgagacacaacaacagtcgacccagcgataacagaaccgcaagcacgacaagcataacagcaccgcgactcacacccggcgaccaaacacaacagaaccaccatctaacaaacacagaggcgcaaacgacgcaagcaccaaacacaacgaatccacatgaaaatcaccaggaccacacaaacacgcatcaaaccacactgaccaaacacacagaatgcaccaacaacaaacaaacgaagcaggaaagacaacaggccctcacacaagagaacataacgaagagacaaacacatcaagacaacaaaagagcacaagcccaaccgcacgcacaaccacaacaaggaccccgaaaac

SEQ ID NO: 588744 - DNA, 227 bp, Homo sapiens
  misc_feature (123)..(123): n is a, c, g, or t
tcccggtctagaatgccactcgcgaactctggccgaactatgacaaactgtggagcaagctggtgtacgctcgtgtccatgctccgagatactgcccacggctgtcatcagctgtctcaccgngtgtgtagctagtttcttccatccttctcccgaggtagcgctgtccttcacgcgagtatccgacgtctcagatcttccgctaaatctctagttctatagcctga

SEQ ID NO: 588745 - DNA, 244 bp, Homo sapiens
tggcgaggctctctacctccggaaggtagtccagtgaacgggaactctacccacctttcccccaaaaggggagaggttgggtgcagataaatctggcagcgtggtttggagggaaaccaaggccatgaccaatggctcctccattatcttcttggctatcggcttagggtatagatctcttcctccgggaagggaactcctggagcacagagagggacaaggaaggtagaagccggggggtacc

SEQ ID NO: 588746 - DNA, 609 bp, Homo sapiens
ggggaaaagtatctcaggaaatgattccaaaacattttcaaaagacatcgtgtgatgctttcaaaaacagtgtcggccaggcgcaatggctcaaacctgtaatcccagcactttgggtgcccaatgcaggaggattacttgaggccaggagttcaagatcagcctgggcaacaaagcaagaccccatctctatttaaaaaagaaaaaaaatagaaaacattagccaggcttgctggcacatgcctgtagtcccagctacttgggggtctgaggtgggaggatcacttgaccccaggtgtttgaggctgcagtgagccattatcacgtcactgcattacaggctggacaacagagcaaaaccctgtctttacaacaaaaaaggttaaagaaaaaactgtttacaagaatgtgacaacaggtttggtgtgtatgtctgtgtgtggggaaacaggatgagacagcagataaagaaaacacagggaccgggcgtggtggttcatgcctgtaatcccagcactttgggaggtcgaggcaggtgaatcacgaggtcaggagtttgaggaccagccttggccaacatggagaaaccctgtctctagtaaaaataca

SEQ ID NO: 588747 - DNA, 922 bp, Homo sapiens
ggattataggcatgagccactgcgcctagcctgttgcagctttttaaagcaggaaaatatccatataaactgttgggttagaatctatattagaatctttcaaactaattgaaaacaggaagactatcatctaagtagccagataatctgggtttcacaaagttattccatggtactggtttagaaaatacttgttcaagtgtttaaatttttaaagtgtaactaattcttcaaatatgttatgctgttaaaatatgtattccataagtacttttatgtatatgtattcttagacttttagaaaagtcaagctgaactgcgcacaacgatgattactaacttctgggactgtacgaccatttaaacctagacttcccagttcctcgtccttgcaaaagcttggatctttgttttttcctactagggacacaagagtcaaaagtaagttccatagtaactatcctcaaagtagctattgtgcttgtagtaaatgaccggttggatgcgatggatactgacaatggtgagcaggcatttcgaagcctttcaaacttagtacttttgagtcgtcttgccttagttaaagattaccgttaattttacgcatagaccaattgtcgctgataacactgtgtgtctcgatggatggctttcatagcacaccggttacaccatattcttatccaaattcccccctttttcgggttcccgtccccaattgttccttaaacatcagcgactcaaccagtcaatccatctaacacacctgcgactcaggatgatccaacccgagcgcattgaaccaacagattcagctaagggtgcacatgcaaagaccattcttcgaatccttttacaggaaaaaccatgcttaaggattcatcatattaggaatgttattcctttaccattgggactattg

SEQ ID NO: 588748 - DNA, 334 bp, Homo sapiens
  misc_feature (166)..(166): n is a, c, g, or t
  misc_feature (173)..(173): n is a, c, g, or t
  misc_feature (187)..(187): n is a, c, g, or t
  misc_feature (256)..(256): n is a, c, g, or t
  misc_feature (329)..(329): n is a, c, g, or t
taaacagggttttgctctgttgctcaggctggtgtgcagtggcataatcatggctcatggcagccttcactgcctggactcagccatcctcctgcgtcaacacccccacaccccccagagtagctggggactacaggtatgtgccaccacgcccagctaatcaaanaaaaaanattatacagacagngtcttcactctgttgcccaggctggtctcaaactcctgggctcaaacaatcctcccacctcagcctccnaaatttcctgggatcataggcatgagccacctgtgcccagcaaatttttaaaatgtttttttttgttaggagncaggg

SEQ ID NO: 588749 - DNA, 359 bp, Homo sapiens
gccccccccgggggtttttgaaacctttttttatgtttttgggggggggggggggccttttttaaaaaccccccccccccttttaccggttttccgggggggccccttggggttccccaggggtgggggggggaaaaaccgggggttttttaaaaatccccctttgggggggaaagacccgggttttttggccccccttttgggggccccccttttttttttttttggttagcccccccccccccccctttggggggggggccccccctttttgtttcctgggggggggggggggccgggggttcctggggaaattttttgtttcccctttttcccaaaggggggttttttccccccca

SEQ ID NO: 588750 - DNA, 486 bp, Homo sapiens
  misc_feature (7)..(8): n is a, c, g, or t
  misc_feature (24)..(24): n is a, c, g, or t
tatttannataaataacttcagtncaattttactgtttttaatgaccaggtaattttgccgcaagggtacttaacggggggagatgaccacttgttgtcctcgggctgggaagataaatgtggctttttccacgggcgggaagggggtttgcaggtgggacacccccctagcagacctcggggcaccccgaatttaagggtcggtttacattagggagacaagtctttaaaaacggaacctgaccgggaaatacaacttttgggggttcttaccaaacaaggataccctggggaattggagatacttgggttccaaagacttccacaaaaattgggtgttttatggggtaaaggaccaaaaggccctaaaatttgtccttaacatccagtttgaagtgagccaaaaatttccgtttcctgccatggaggccaaatttgtaatcgggggatttacaaaccctttttcggcaggttgtttgttcaaag

SEQ ID NO: 588751 - DNA, 658 bp, Homo sapiens
tacttcttctttgagtttctagcccatatattcacaggcctatctgacagtttcacctgctttactcaaaaagcatctcaaagctagtttctcctggataatgggctctggctacctgcatggccacgcttacggtgaggcagatatgactagacaggaggccaggctatttctatctcacacaagatcgcctctgctcctacctgcgtgaccgacggccacaccggacagaacgcatgaacatgctgtctctagcgacagcatcagctgacgattcgttatgggggatacatcgacgccgagatccagaacttgcttgagccaagttggcgatcttgttcgcgaggagctcagcaaataccagtaatcccggggggcacattttccctagggaactctttatcgggccgcataagggttcctgtcgtcagggcgggttccccgttttccaatgggacgaagcgtgaaggaacggctttcgtgggcaaaggcgttccctttcgtgccccacgtccccgcgccggcccccggattaaaaaagacggacgcgaacgggaggaacaacaacaggccagaccctgggaggaaatctctgcgggaacaggggaaacctcacagtcgggcgggggggaaccctaaatgggggacaaagtaagca

SEQ ID NO: 588752 - DNA, 307 bp, Homo sapiens
caaacaaaatgcaagtggaagctccatgggaaggtggagtgtgttgtccgggggatctcattgcgaggtgactgggtggccaagtaactcttcactggggaccctcaaaaattaggccatgggtttgttctctcgagacaaggcagtttttccagagagtaagcctctgtattgtccaatgcgccttgttgtcctcccgttttaggatacaggggggaagcgtcctggagttccccgtatccgtatgcaatctgttgcgtctgagcgtttcggcaatccagcaacagagcaagaggcgctgtttata

SEQ ID NO: 588753 - DNA, 1068 bp, Homo sapiens
gattcctcatccaatcccaggtctcagatccggaagctgagcgtgtctgaccctgcgtaaggggaggcagagactgaactggactcgtttgggttccctgatcctttcacactcactactctcgcttgtgaggtgctgggctgggagtacttcacagagcagtataccttactaccttgtgcatatggggctcccaatgtgcccatctacacgtggtggcttacgacagggcggacgtgggtgatgcgttggagactgccctgtgagcagctcaatcggcgctatcagccccgtctgcgcttccagaagcagcgactgctcaacggttatcggcgcttcgacccagcacggggcatggcgtatcaccctgggacctgctgtttggaactgtgtgacaccacgcgtgggccaccggcggggccctggactcgcaaggggtcagtcctgtgacggccacctgaagccgggctgtgaaatccataccatatgccctaatgtcacgtgatggtcacccgatttgcagctggtgctgccactcactgagtggctgaagctgctgccagcccctggttacctcgaggcttttgcagacaatgtcctggagtccacgaagaacatgccatagctcacctctgattgctggtctagcgggccaccgaagactggtggtcgtgggatgctccagaacaccattttctttgggggctcgaaggtgcaagtagctggagtttagaagcgacgggtacccctgggtactacggctggcctggttcggtgtggcgaagtaagaaggggccccttacctaaggtaggcgaccttcattgcgaccgatgggttctcagaaaagagaagacaaccctggtgtggaaccacttctcctctatttacgtaaaaccaacccggtggttggaccacacgggcccttggggccccggaaaatcctctcacactcgcttgttggcttagatatggccaattctcttgtccttgggaacagagctactcttccacacggcccacattcccacggaatttcccatccttgaccctgttaccaaagagaattc

SEQ ID NO: 588754 - DNA, 158 bp, Homo sapiens
cgcggtggctcacgcctgtaatcccagctctcagggaggctaagaggcgggaggatagcttgagcccaggagttcgagacctgcctgggcaatatagcgagaccccgttctccagaaaaaggaaaacacaaaacaaaaaacacaaagggcaaaacaac

SEQ ID NO: 588755 - DNA, 155 bp, Homo sapiens
cacggggcattcatctcctcctcgtggttcttcttcaggtaggccagctcctccttcaggctctcaatctgcatctccaggtcagctctggcctcctccagtgcgcgcaccttctccaggtaggaagccaggcggatcgttgagatcatgcatgt

SEQ ID NO: 588756 - DNA, 732 bp, Homo sapiens
tgacgccggtgcagctggggtggtgccctggggtgccctggtggccctggtgatgggtgaaccgcggtgtgcttcctgctggagtgtttctggcatgtgtgcatcctggtggccgggtgtcgctgtgcctgtgtgacgtgtggcctgggtgcctgatggcctgctggatgctctgctggagtgcaatggcctgatggataatgtgagttgtgatgccctgtcaccaagtttggtgcctgcttgtgtcaatggacatgaatgatcaatgtccctgtgaggagatctatctcttctccctgcctattaatggaatcatgagatcatttgatttcttcctgtgggtgcctctctcaaggatgaggtttttgaagattatgccagtgcagaatgcagacccgtgcctggccagctgcaccagtgttcaatggcatttgtatgctatctggggactacaatgtgccacgtcggtctagggttgtaaaatgtgctccaatggagtgtgtgcacctgccatcctgtggggccatacatccatgtgccaatgctctccaatctgtccccgtgctgcagatggctactgtgggtgaacaaagatctggcaaggccccacacttgtccctttgcaatggttgacatgggccgctagcggctcatgtgctggtaacgccatcatccctgcacccagggggcactgggcatcgtactccggactggtgcctaagaagctgtcat

SEQ ID NO: 588757 - DNA, 328 bp, Homo sapiens
tttttttttttccgggggggggggggcccccccctccggggggtttttttggggggccccggggaaaagcccccccccccccccccccttttgcccggaattccgagggggggggcttttttttgggtttagaaatgggggcctttggggcccccccccggggggtttttctttttaagcccccttttaaaaaccccccccttttttttttttttttttgggggggggggcccaaaaaccccgggtgcctttttttttaaaagcccccttttttttggaaaaagaaaaaaaaaaaggttttccccttttttcctgtggggggccccca

SEQ ID NO: 588758 - DNA, 148 bp, Homo sapiens
cctgtggcaggtagcaaaagtggacatccctgtttacatcatctctagattactcataatacctaatacaatgtaaatgctatatacatagttgttataatgttttttattcgtatttttttttactattgttatttccagtttttaa

SEQ ID NO: 588759 - DNA, 156 bp, Homo sapiens
  misc_feature (146)..(146): n is a, c, g, or t
tttaggtaagacggtttctccatgttggtcaggctggtctcgaactcccaacctcaggtgatccacccacctcggcctcccaaagtgctgagattacaggcgtgagccaccacgccctgcctaaagagacatcttaaattacgccntttattttta

SEQ ID NO: 588760 - DNA, 88 bp, Homo sapiens
gggggaggtgaaaagggcaaaggcaaggatggtggggcccccagccccctctgttagtgccccaataaatgctcaatcatgtgccaga

SEQ ID NO: 588761 - DNA, 308 bp, Homo sapiens
gcgtcgaccagacccaatgtgggatacagacaaaggtaggcccccaaacctgacactattactgaggctatggagtgctcacaaaaagggatctatcatgactgccctctgaaagaccaaagatgcagctgcaagagtcacagtcagatatttgcatgcaaccaatggacagaagctgctgacccctttggttgaattaggggaaagctggaagaagctgaggaggagggtgaccctgtaggagacccagcagtcccatttaacctctgccccagaaatctgtcagatactggagccaccaagtcgac

SEQ ID NO: 588762 - DNA, 439 bp, Homo sapiens
aaaatttcctaccttttcaaatggaatccctgtttaaaaatatcctgttaaaaacacacaagtatctggtgcaaatgaaacctttgaagtggagtacacaatctttaaacggacagttggagatcccactagaacccccagcactgccttcgtttccgtattgctcgtctccagttcacattttgttggcccacaaggctccaccgggcccaaatcctcccccgacaaccaccattgtactcattacatatagagaaaattatgtatggctctcatggccaaatcccaggcagaaaagaggcagaaagagactcgaacaatttttcaaatgcgaataccacctaggggtaatgcacgacggtcttccagttttaagtctcaagttctccaactaaaattacttaaataaaagtaccagcctactccactcctccccctt

SEQ ID NO: 588763 - DNA, 217 bp, Homo sapiens
ccagttcggatcgtggccacaccatacccggctatttttttttgtattttttagtagagacggggtttcaccggtgtcacccaggctggagtgcagtggctgaatctccactccacctcccgtgattcatagcgattctccctgccttcaggcctcccagtagtagccgtgaattctgggggatcctgcctagagttcgactctggcagggcatgtc

SEQ ID NO: 588764 - DNA, 1173 bp, Homo sapiens
  misc_feature (580)..(580): n is a, c, g, or t
  misc_feature (1000)..(1000): n is a, c, g, or t
  misc_feature (1034)..(1034): n is a, c, g, or t
  misc_feature (1080)..(1080): n is a, c, g, or t
  misc_feature (1142)..(1142): n is a, c, g, or t
gctcactctagcgtgcggcggttgaatgaagcctcatcgtgatgcggtccggaaccggtggtgcttgcgtaaagaaacgacaggcatcaagagtgctgaacgaggctgttacattggggaactgtgccctctccagtaagcttgcgtggagaggagtatcgcggcaagtatgtctcaaggacactgaagtcctgtgatgctagtcaagtagctaccaagcgatctggggtgcgtcgtgccacgaaggtgatatgcgggacgtatgctacctttcgcctggggtctcgctatccgtccgtatgtagcctaaccctgctgttagtccaatcccatgctcgttaccaggatatcatgccatgcatgtgggcccgaatggtacattcaccacgctttggatgtccgcaccgtgaactatcggtggcagaaccgatcatgcatgactttagcgatcgagaggaggcagggatccgaactaatcgcgacggatttctccgctcatgtcaggagtttcgttgattgtgagactaaacgttgcccgggggataataccttgtgctggtggcacccttttgaaggtatntgggtcaaccgtgaaatttgtgtcatgttcattgaatgttcaactgtttgtcgccattgtttgtgtcacagtttcacagaatcacaatctctcgcactctatattgccactgtctgagggggactgtccacatggcggtgagaaataaggtgcactatggtgtccatcccgtgacctttccaagggtgacactggttcgcaagcgagactggatagggcgtgcaagtgtaatgatgcagctagaaggtacagatcttgttaactcgtcggagacagacgtgcggagttggggggttcgatgtgaagcgtaattcgttgagggcctattcgttcgagtaggaactttaccacgtggggttcgcgtcctcgtgtactctggtgatgttgacccatttcggctctaggggcgtaacgtactancacatagacgtggggactcctatagacacggttngaggtgaggccacctgtggggtgggcaccgcggggatagccgcatntcctgggcacggtttatcagaaccctagggtttctcttataagccttcgcaatttcgccgcngtttgtttttatggccccctagggggggtct

SEQ ID NO: 588765 - DNA, 192 bp, Homo sapiens
cattacaggacatgctgactgtggaggactttgatgttcctgatgccttccaacgcagtcaatcgacagagtccgtcgaagtcggtctgcctctgatgacctaacatcagcaatgatcacacattgccaagtagtgagtctgcccgttgatctgtcgcggtactcgatgctcggaattctgtaagtcatgga

SEQ ID NO: 588766 - DNA, 194 bp, Homo sapiens
gctcgtttatctccgggtggaagcgtgaattacatcgagaatgagaacgtgattcctatgaggttgtacgatcccgtttcgtgcaagaataagatggtggattgctgctagggctgcaataatgacgggcatgatgatgtgaaaggtaaagactcgtgttaggcgctgggactgcccatcagatccccacccat

SEQ ID NO: 588767 - DNA, 251 bp, Homo sapiens
  misc_feature (21)..(21): n is a, c, g, or t
  misc_feature (23)..(23): n is a, c, g, or t
  misc_feature (141)..(141): n is a, c, g, or t
  misc_feature (168)..(168): n is a, c, g, or t
  misc_feature (179)..(179): n is a, c, g, or t
  misc_feature (203)..(203): n is a, c, g, or t
aggtggagactgtgcccgagncntttgtgcaactgcgagagcaacctcagggcccggtgagtgtcagcggtatctggcatcccagtagcttccatgttctgtgtatgtatgtggtgtgcccttcctcccactgtttgaatnactgaaaagcccatgtctctccaactngctcccacagncactctgaagggtcaacttttcantcctcctgctcctcatccgtgtcatgagatggacggttcagggttcgg

SEQ ID NO: 588768 - DNA, 1169 bp, Homo sapiens
gcagaagaaggtggggaggaagaggaggaggaagaagaaggtgatggtgaggaagaggatggcgatgacgatgaggaagctgagtcagctacgggcaagcgggcagctgacgctgatgaggatgacgcccctgctaacgggaatgctaatgaggaaaatggggagcaggaggctgacaatgacggtagaccgaacgaacgacggacagaaggtgagggcggaacgaggacggaggaccgaacgaccggtgactggtgacgcgacacgacggactggacgactgaacgactgacggacacgctgaagtcaagctaccgaggcaacgcgggcagactgaagatgactgaggactgacgactgtcgactaccacagaagcagaagaccagacgaggactgacatagaccagcaaaacaaggcaaaagttaaactaaaacaaaacaacaggccgacagaggacctattacaaccgtacacagctatcacagaacatacaacaactctacaccagtgagtaaccataacagaagtaagagacgtgaccaagcaccggcaccgacacaagagaaaaatagcacgacaccggcagagactgcacaccgacagacatacatccaaaacaacaccaaagcgacacacaagagaacacataagaagaaaaggggagcaaggacaacaagaaccgaaaacattcacaaaggaccaagcgagaaaaaaaaccaacaaaagacacacaggaaaaccaagaaaaacacaggcagaggcacacaacacaaaaacacaacaaacaacaatcacccaaagacccatactaggacgaaaggaacaagacacaaaaaaacagaaacacaggaacaacaccaaaaccaagacaacaagcaaaagcgactacagtaacacacccacattgacatacaaccatcgaaagaatgatacacaacaaaatcaaacaaatacaaaaaaagaacaaatacaaaactagactacaaaaactaaacaatagaacaaccaaaacaaaaactaactaccgacactcgcggataccaaatagacaagtatacatagtagaaaacaaaaacaatatgaaatacaatgatacaacgcccaaaatcagagaatactcaaaacaatacctaacaaaaagaataactaactactgaaaaacaacca

SEQ ID NO: 588769 - DNA, 240 bp, Homo sapiens
gtgggttgagcgtggcttggtagttcacgcctgtactttgggaggcagaggtgggtgaatcatctgaggccaggggttcgagaccagcctggccaacatggtgaaaccccatactctactacaaatataaaaattagctggttgtggtggtgcatgcctataatcccagctacttagtgaggctgaggcaggagaatcgcttgaacccagaaggcagaggttgcaataagccacggtcaa

SEQ ID NO: 588770 - DNA, 118 bp, Homo sapiens
gtgaccatgatgtatcaatgggtggctaattggcgagtggatttataaactcgctgctagctgccacgtagtgcagctagcccactcacccgtatctgtagcttacccgtaactgtac

SEQ ID NO: 588771 - DNA, 870 bp, Homo sapiens
aggcgagagggatttgttgaggagcaaggtcttccacaggaactgcgacttggaaagtattcaccaagggctgtgccatgcgaaaccctctttaaaggaaccgcatcgctacgcctaacgggcatttcttttttaatgtaatggttcagagctatgtctaccacgcctcgcgtgcacacgcacacacacgcaagttccctcagtcagccgagaatcctgccatctcttttagataacaaaagctcttaggccttatgcttgggtaggattgtcttccatggacaggtattcagttggaaacaagtatatagtcactgcctctatggtatggagatactccgatttagtccctctgcctcttggggaaacaaaaaaaaaatttgtaaacttccccttcagaagtttctaaaggtcccctgtaccaggtggagggaccctttacccgtggaacttcccgtggattcatgggatccttctgggcaggaaaaaaaaggcaaaacaaaaaacttaaaaaaaaaaaaaaaaaaaaaatgtttgggggggcgcggccaaaaaaagtttttaaaaccactttgtggggggggcgggcgcccatgtaagtggaactggccacacggtggcccaagaggaacccgtgccagacatggggcgggtccccccaaaaaaccgcggcgggcaccgggttctgacacccgcggggtctgggcttcgggtctacagggcaggccgaatcccgcccgcgcgggggaaagtcgagcagagacaccacaacaaaacacactagtaacaacaaaccacacacaacacaaaaacaacaaacacaaacacaggaagacagatagacccgaatcacacagcagcagacagcat

SEQ ID NO: 588772 - DNA, 241 bp, Homo sapiens
cgcagggatacgtagagagtgacagccagagggaggaggctgggataaaccgtggcagaagatgccttccaggatagtccaggtaaccgccatcactgtggcagtcaggattggtccggattaagtcacagcggtcagagccattcagggcacacaccttgcggcagtctaaacacgggagtctggttcacaccttaagctggaaactgggggccactgtgggataacacgttcgggagga

SEQ ID NO: 588773 - DNA, 509 bp, Homo sapiens
tgagtcagtctagaggactccccggtctggcggtacggaatgtcgattttcattccacaactatctgctggctgcgcgtgtggaatgactgcggagacgcaagtaggacggggagtatgtgggcaggggaaggaggccggtgccactaagtgacagtggcttgacccagaaggagacagcactggagagcaacggaatccagacctacttcaatcagagggacccttggagtgacggtgcagtgaagaagtgaggatgacagccaggtttgtggcttgggagatgggagtgttggcggtgaatatactcgtgacaggaaaggaagagatttctggtgggataagacagccggagccccattttagaccaaatgaatctcagctgcttaatgaatagccacgtaaagaccgccagtggcaaactccccaggtgggagggcgggggacagatctgtggagtcagcaggctacagacagatgtggagccggggaggggcaggtgagacgggc

SEQ ID NO: 588774 - DNA, 281 bp, Homo sapiens
ccgtattcgctcctagacggagagagaaaacaaaacattttcatgaaaggaagaattttacaaattttaaaactaagtaagccaatgaaacaagtctgttgggataaagtggtagctcagaaggggaggcgacagggaataagttttctgaagctgagagaattccaggactgaagggaaaaagcagaagaaccctggacactgataggaatgaactctggacgaagatcaggtgtcgtgctccagtagcggcaagctggcttgccgtctaggagcgtaat

SEQ ID NO: 588775 - DNA, 383 bp, Homo sapiens
tacttttccacaggccacctaaactattgccacgttcttccttgctctttggacgccccttagtttgctagttgggtctcgaaatcatggtctttacgttaattaatggccggcacagtgtttgggagaaaaacagaatctgcagctttacatctcatcactttccatgggctgagcttgtctcccatcgcctgagtcgatatttccactttttcatgtttccaaagtgtcctgtcatcctggtcttctcagtgatggctgagacagtgcgaagaccgcttgcacgccctggatgtccaagggctgtctaagtacagctgtcatagctgtccatctgcagatccagacctgggatggctagagcagagatacctgtgctctaa

SEQ ID NO: 588776 - DNA, 683 bp, Homo sapiens
  misc_feature (109)..(109): n is a, c, g, or t
  misc_feature (155)..(155): n is a, c, g, or t
  misc_feature (201)..(201): n is a, c, g, or t
  misc_feature (208)..(208): n is a, c, g, or t
  misc_feature (217)..(217): n is a, c, g, or t
  misc_feature (231)..(231): n is a, c, g, or t
  misc_feature (268)..(269): n is a, c, g, or t
  misc_feature (280)..(280): n is a, c, g, or t
  misc_feature (331)..(331): n is a, c, g, or t
  misc_feature (339)..(339): n is a, c, g, or t
ggagtatatctcacaccatatgattaggaatgtctcatggttcatattcacacgcaatcacattaagaagattatccagctcctctgcacaccacattgcgggaagagnaccatatggaccatatcttcattagagaataccataatcacttaanaggttattagtgcctattctaaatccagagatccatgtagagagantatgtgnctcctcagngaatggaaatgttntgtaggacattccttcacagttggcatgactgtttgnnggactgactanatgctatatcacacatctgcatttacaaggtcttcactgttaatcacagancacatttntgttccttccagattgctcttgcttctgtagacaattatatgctaattattattcaacataccagtgagagcaaaagtgacaatactgcacacacaaccgcaatctaaggagccataaagaaatatgctggcaagctaaatgcttacacacaaaaaagttagacttataaagtgtgtgagaaactctgaaaaaaatatttcaagttcttcaatcctcctatctcatactgtttataagtatgagatacttttgacaaactcactctgtcgatcatgctactgcactccagcctgggtgacagagcgagtttgtcataagtatctcactcgtgccgaattcctgc

SEQ ID NO: 588777 - DNA, 272 bp, Homo sapiens
acaccagcagcgggcgcaggcgcttgcccccgccaatcgcggcgtgacgcatcgcccgatacagattggcgcgcgggtcttccggaatcgccagaaactggtccagccgccggtcgatatcggcaccgacgtccgacaaggccgcagcaagcgataggggtgcagcggtcatgccctcaacccgcggcaaagggctgcgtgccgatggcgcgcccctcgctatcggcgcggatcgcttcgatccgcgcctgtgcggcattgagccgatcatc

SEQ ID NO: 588778 - DNA, 301 bp, Homo sapiens
gggccgcgcgccggggagggtcgcgccggcccgccctggtctccgcatcgcccggggcgcattgcgcgctcctctggccgccctccctccgcgcggggacccctggcgggcggaggaggacatggccaggaggccgtgcagagtgagcctcgcagctggtccctgcatagagcagctgggcctggcctggggcagacctggaggaccaccggggtacagcagcagctggagctggagcgggagcggctgcaggcgggaaatccgcaaaggagctgaagctgaaggagggtgatgagaacct

SEQ ID NO: 588779 - DNA, 206 bp, Homo sapiens
ttattaggcgcgttacagcgtgcccgccccgatcaagaagaagagctgcttcacctgcttgcctcacacagctcggtggtccatggcctgtatctggcacactggtgtatgtaaaatgtagctcagcttgttgcaggactggaggtcatgtgtgtagccgtcacgtgtcgtactatagctacgaggatgcgcttcctggacagcct

SEQ ID NO: 588780 - DNA, 564 bp, Homo sapiens
ttttttttttgggtctgaatttttttggcttattattatgcctgagataatctatttggtgtatttagcagtgtttcattatttgggattgtcctttagtatctattgtacaatttaacaaaatttatttaatgtaatgtacatatataaatgtacatatatatgtatcagagtaataaatgcatacacaaacacacacacacatcactcagagcattatgactacaggtcattatgagaactactactaattcaagatcataaattcctcatgagatcttttctgcaaataacatctggttggaacaacaacaaaattactggcccctctatgtgaagtttattggctaatataagtttactcttgggggttcaagctacatatggcataggcaacgggtgcacaccgggggctttccccttgggccagaccactttcttgctacccacaatgggaaggttaattcctgggccatccagcaggtttccaagacccatttccagtggggaaccccacttatcctccaagggccctggcccttaccttggcctccctacccaccc

SEQ ID NO: 588781 - DNA, 333 bp, Homo sapiens
  misc_feature (14)..(14): n is a, c, g, or t
  misc_feature (120)..(120): n is a, c, g, or t
  misc_feature (225)..(225): n is a, c, g, or t
taaaattccacatnttaacggccgtgagccaccatgcctggccggaatttcttgaacttaaggcaacactgaaatttgctgcatcagtcgactcttccttccaggaacgatttctctgtngcatgcagtgttgtttgatagctttttacccacagtagaacttctttaaaaaatggaatcaattctcttaaactttgctgctgctttatcaactaagtttatgtnatattgtaaatcttgtcatttcaacagtgtcacagcatctgcatgaggagtagattccatctcaacaaatgactttctttgcttatgcataagaagcaactccatatc

SEQ ID NO: 588782 - DNA, 526 bp, Homo sapiens
  misc_feature (18)..(18): n is a, c, g, or t
  misc_feature (20)..(20): n is a, c, g, or t
cgaccgccaggagccgantntgcaatcatttgaggtcaggatttggagaccacttgaccacttgttgaaccccgtctctactaaaatacaaaattagccgggttggcgcatgcctgtaatcccagctaaccgttaggagaatgccggaactgggagatagaggctgcagtgagctgagatcatgtcctgcactccagcctgggagacagagcaagactctgtctcaaaaaaagaagaaaaatacaagagagtccgggcaaggtgctcacgcctgtaatcccagcactttgggaggctgaggtgggcggattgcctgaggtcgggagttcgagaccagcctggccagcttggtgaaaccccgtctctactaaaaatacaaaaattagccaggcgtgatggcgcatgcctgtaatcccagctactcaggaagctgaggcaggagacttgcttgaacccgggaggcagaagttacggtgagcagagatcgcgccattgcactccagcctgggcaacaggaatgcgtctc

SEQ ID NO: 588783 - DNA, 282 bp, Homo sapiens
ctcaaaaagtagaatctaaaatcaacacagatgtacaactagattctcaagagaaaattggagttaaagaagaatcgcattctgattttccatatggatcatttccctatgttgctagaccagtacactggcaacctggtcatacagggtctcactttgtcacccaggctggagtgcagtggcgtgatcttggctcaactgtagcctcaacctcctgggtttgagatcctcccacctcagccccccagatagctgggactacaggcggcaggcacacgtgga

SEQ ID NO: 588784 - DNA, 295 bp, Homo sapiens
ttcagtctctggacggatgtgtctgtggtttgtaaccactacggtttaaaccacggtttaagaatttccccaactaacagaaattctgctcgggaagcgataaactagctccaccctaccgagcccgtttttgagttttagatactttctctctcaacaacttaaaaccgctctcctgaaaccgtgcattcctctacttccttcctttcactgaaattgctaacacgccactctctttttcgcactgcgattttaaccatttattacatcaaaattttgttaaagaaaaaaaaaa

SEQ ID NO: 588785 - DNA, 225 bp, Homo sapiens
atacacttatagacagctaaaacagttgctatatgtcgcttccaagatagccatataggaacagctctggtctacagctcctagtgagattgacgcagaagatgggtgatttctgcatttccaactgaggagcctggttcatctcactgggactagtacgacagtgggtgcagcccaccgagggcaagccgatgcagggtggggtgtagcctcacccaggaactg

SEQ ID NO: 588786 - DNA, 196 bp, Homo sapiens
tactttcccagtgggagtattacagcgaactagtttgagttgacagtatgtgggagctagcctggtgattgtgaagatacctgtcatcaagaacccgagtggtggtcatgtcacactatggctatgaggtggaagaggtgaaaatcctatgaaaggatcgttacttggtgtgtcacacatcacaaacactgttggt

SEQ ID NO: 588787 - DNA, 1143 bp, Homo sapiens
cccacgcgtccggtgatgaactgtgttgcacacagacatggctgacatcaccagaacctacctgagttctcactcctcctgcttctgggtagctgagtctagaggtcagacagtgggcatggtggctgctcggccagtgaaggaccccctcctgcagaagaagcaactgcagactacttcacctctctgtgtcatgcagcaccgaagagaaggcctagggaaagctatggtcaggactgtcctccaatttgcacagatgcagggcttcagtgaagtggtcctttccaccagcatgctgcagtacgcagccctggctctctaccagggcatgggcttccagaagactggcgagaccttctacacctatttgtccagactaaggaaatctccaatgataaacttaaagtatagcctcacttctcgggaaggggacctgtgatctctctcctctgggcgtcaatcaggatctgatggcttctgtaatagtaacaagcagacccagctacttcaggtgcaaaccactaaccctcactctcaagcacatctgagtaacgtgtaacgagggtgggcttggggcaatggttactctgatgtatctagggctttctgaggtatcctttagctaacataaacgccatgtataccaagtaccacaatatgaactaagcaagtacccggaactctggatcctagcaggatatcgtatcaagcatggacaactcggaaggccatggacttgacaagatatatggcccagtacagggaatgccagggcacacaatggcacatggtcagagaagaaggagacggacacgacgcggcacagagggcaagcccgggacaggggtccacgccacacaagcccatcacaaaaaggcagggcaagacaaacagcggagaccagaatggacaatgcaacagacggggaacccgggcaccaacagtgatgcgagccaagatcagctcaaaacacgagggagaaacgaacaaacaacagtgggtcaaagacacagtcagcaaacaacacaacctgaaagactccacagctggaagcagagctaacatctgcgaacacacggcccatacatgagacggtcaattcatctgacgcgctctcgatagctcacaacggacgaggtgagc

SEQ ID NO: 588788 - DNA, 256 bp, Homo sapiens
  misc_feature (104)..(104): n is a, c, g, or t
cagcaccaaccaaccgcctgccccgcctccttgggttcgacggacgggccggaaggccaataaaaacccccggtaaacccctgtcggccaatcccaggggccgnttaggcaaaactgactttaaaacccgccccttttaaggacggaaaaatgcgccaatcattatagtgtttgggtccccggctgagcctatcaaaaaaaatttaaataaaggcttataaataggccctataaatataacctcctttttttcgga

SEQ ID NO: 588789 - DNA, 82 bp, Homo sapiens
agggcagggcttttggttttgttctctgatgtgtggcagtatctagcccatcatatactctcaatggatccttgttgaattc

SEQ ID NO: 588790 - DNA, 188 bp, Homo sapiens
cgtctacaaacagagtactgcggcaagtactattgacccagctctgattcgtactccttgaccttactgtgaacataagtggagtccgtaaagagatatctttactataaaagctattgtgtaagctagtcatattaagttgttggctcaggagtatgatagttcttgggcagacaggtgcagcgtag

SEQ ID NO: 588791 - DNA, 383 bp, Homo sapiens
aggatcccgctgaccgcttaagctgttggtgtatagcagagctactgatttgtgtacattaattttgtatcctgaaactttgctgaatacatttatcagttctaggagctttttggattagtcttaggcttttctaggtatatgatcatatcattggtgaacagtgacagtttgacttactctttacagatttggatgctcttcatttctttctcttgtctgattgctctggctaggacttcaggtactattttgaatgtaagtggtaaaagtggacatccttgtcttgtcccagttcttggggaatgctttcaacattttcctgttcagtataatgttggctgtgggattttcatggattgcttttcttaccttaagcggat

SEQ ID NO: 588792 - DNA, 431 bp, Homo sapiens
  misc_feature (399)..(399): n is a, c, g, or t
cgggcgtgcacttactctgtgctgcttgccagccttgcagttgttgttttaagcagaggtgacatcttgttgacgcctgaggtgaaaatctgggtgaaaatgtaacttctgcacaggctccttcctgctttgtaggctgggaagatgcccctggggtaggggtgctgattacctcagccatgtggaggaaggctggagcttgttcctgccccaggaataggccaggagggaaggccgcagcaggactgccgtggggagcacccctgctgcccccctctcactgaccaggggtggacaatgcccaagcagagggagcccccttgccctgtttggccaccctctggccagccaaaagcactctgaaaccaagaccttcccatttcctcctccacacatggngctgaggctccctgctgcaatgcaattaaagc

SEQ ID NO: 588793 - DNA, 329 bp, Homo sapiens
  misc_feature (18)..(18): n is a, c, g, or t
  misc_feature (272)..(272): n is a, c, g, or t
  misc_feature (279)..(279): n is a, c, g, or t
tttttttttcagataggntcttgctcagcccaggcagcagtgcagtggtgcaatcatagctcactgcagcctcaacctctctagctcaagcgatcctcccacttcagcctcccaagtagctgggaccacagacgcaccccacccacgcccagcctttttttttttttttttttttttgtagagaaaaggtctggctttgtcgcctaggctgatcttgaactcctgtgtttcagtgatcctcctgcctcagcctcccaaagtgttgggcttanaggcctngagccaccacgcccggccaaaaattgggttcctaagcagaattctatacg

SEQ ID NO: 588794 - DNA, 412 bp, Homo sapiens
gccttggagattccaggacccaagaacctgccagtatgtatagccagtgtgaccttggggtattaagtgtctcagacagccgcgcttgaagttggtctgccctcagggtccaattcccagactctcagagaccttgtccttaccggtgctccagtagtctttcagggacctgaagccttcggtcacacagccctgtggcttgttggcccacttggaattcttgcacgtgtgctcagtgcatccttgccggtcttggtggcgtgcttcatgtaaccgtgcataactctgagaaggaaggcatcctcggcctctagagctcggacagagcacaagagcgacagagagggccaccacaaagagtacccgggtgtgcatggcacctgtgtttctagaacatctgccctcgtgccgt

SEQ ID NO: 588795 - DNA, 114 bp, Homo sapiens
ccagatctttaacttgactgttgtgtcatccaggcagacagtctgtgtgagaaaggccgctcaattgtgctctcctggtactcgcgaaactgtcccttgacaaagcggaggacg

SEQ ID NO: 588796 - DNA, 450 bp, Homo sapiens
gtaaagaacaacaggggctgagactgttttgaaacaaagatattttgcgatttaccatttccttttttccccctatgttacgtttcgtttaaagtgcctgcttgctactttaacatgttatttttctgtttctttttcagattattcttggagaaaccctgtctgtttactgtaaccttttgcactcaaattcctttatcaggaataactacatagccactatctacaaagccattggaacctttttatttggtgcagctgctagtcagtccctgactgacattgccaagtattcaataggcagactgcggcctcacttcttggatgtttgtgatccagattggtcaaaaatcaactgcagcgatggttacattgaatactacatatgtcgagggaatgcagaaagagttaaggaaggcaggttgtccttctattcaggccactcttcgt

SEQ ID NO: 588797 - DNA, 571 bp, Homo sapiens
gctcggctccctgcaactctgcctcctgggttcaagcaattatctggcctcagctacagttagctgggattacatgtgtgcgccacgggcccggctaatttttttatttttagtagaggcggggtttcaccatgttgaccaggctggtctcaagactactgacctcaagtgatcccccccccccccgctcggccttcccaaagtgctgggattacacgacgtgagccaccgttgcccagcggtttggcattttccaattgtggggcacggtgacgaaaagacttgacggaaagcaacggcgagtgagatccatggaaatgtacggggggaaccttgccaggccatatggaacagccagttgcaaacgggcctggggttgggagctgcctcagggtagccaaggatggcacggacggcatcaggctcggccgagatgggaatgcatgggcgcccaggtccttgcaacggtctcaaaggcgcccattggcctacttcctgcaacaccttgggccagggttttgagcctagagaatgtgacatctgactctttaagttttctccaagagaatcc

SEQ ID NO: 588798 - DNA, 923 bp, Homo sapiens
  misc_feature (37)..(37): n is a, c, g, or t
  misc_feature (83)..(83): n is a, c, g, or t
  misc_feature (106)..(106): n is a, c, g, or t
  misc_feature (166)..(166): n is a, c, g, or t
  misc_feature (194)..(194): n is a, c, g, or t
  misc_feature (255)..(255): n is a, c, g, or t
  misc_feature (312)..(312): n is a, c, g, or t
  misc_feature (401)..(401): n is a, c, g, or t
  misc_feature (417)..(417): n is a, c, g, or t
  misc_feature (421)..(421): n is a, c, g, or t
  misc_feature (525)..(525): n is a, c, g, or t
  misc_feature (529)..(529): n is a, c, g, or t
  misc_feature (598)..(598): n is a, c, g, or t
  misc_feature (600)..(600): n is a, c, g, or t
  misc_feature (785)..(785): n is a, c, g, or t
  misc_feature (912)..(912): n is a, c, g, or t
ttttttggtgatatattgattttttgcggatctgatnggttgtgctttcaaaactgtgcagtttcctttttggttctgaatangttagtaagagttccaagaggcntcaggtctccaacaacaaaggcagagaagttagcctcagaaagatgacagtctgaaggtngggaggctgagagtgcttggtgtttganagatgagtgttgtggtgggaggagtatggagtcacacagaggctccacccagcaaggcctntggccaggggctatgtttaaggctggggtcaggcagaggtgggagccgcagggtganagaagtctggccggtaagctccaagggaaggacaaagtgcattggtggcagatgtgatccgtggatcaaccgcagtgcaggcagggctnctacaacgttatagcnagcnaggccgtctatgaagctccctgagctacattctaacagaatgtggatgtggggctgggttagcatgtggccccaccatctttagcttagtggcagttttgatancttnggtggcaaggaatcccatttaccctgtagcggtagtctccgctggtgtctcctgggtccccagggcttnanttgtctggtccttggtgatccagcagatctcggtgtggcagacggtgcagcggatccagtcgcagccgtccttcttctgtaccacgatctggcactgggggcaggcatggcctcgccctgctgcagcatcaccttcagcatctctgtcgtctgccgggcagccacatcgttctgagcccgcagcnaggctcctcctgatactccttgcagttcatctgctcatggatggccttgcagagcaggcagttgacgtggaaacacacagggcaggtgaactcattgacatcatcctcaaagaagcaccatcccttncaatctggggt

SEQ ID NO: 588799 - DNA, 302 bp, Homo sapiens
ggctggggaggcctcaggaaacttacaatcatggtggaaggggaagcaaacacatccttcacatggtggcagcaaggagaagtgcagagcaaagggggaaaagccccttgtaaaaccatcagatctcgtgagaactcactgtcacaagaacaggatggtggaactgcccccatgattcattacctcctcccaggtccctccatgacacatggagattatgggacctacattcaaatgagatttgggtagagacacagcctttcagtgcttacgttctgcttgcttctgcagtctctttaggg

SEQ ID NO: 588800 - DNA, 1264 bp, Homo sapiens
  misc_feature (967)..(967): n is a, c, g, or t
gctgaggctgcatctgtgtaaagtccttgtgcgattgagctctttatgagatcattcatcgtggtctatcttgctcatccccttataaatgtgctttgcctgtccatcgaagacctcaatggctcagacgtcgagtggagactgagatgccctgttctgcacgattctagttgtccggaagaaagcctagcgttctggggctcaggtccgagatgcacctggggtattctgtttctcttgactgtgggcgaccttgctttggtctcttgcttaggagtgccccactgcccggtcaccatgcatggcatgctgtgcttggttccccataagacgatccttctttgaggtgcacggtgtcaaagtgtggcgcaggagtggagagctggctgcccttcaggaggagagcagatgcattgtccatcaggctccagcagagctcgacgagctcacaagtccttgaggaatgcttgtgaccctttacgggcttctgggagaggaggaacttctctctgaccctgggagcgctagaagtgtacagtgctccgcaggcaaacaagctgtggcccgacaaatcgtgactgactcgccgctcttgccattcctctgattgccagagtgtccagagcttgaagcgtcacctttgagatactttactgtgtgcccaagacgttaacacttgcttcgtcccagtgacactggggtcacatgaccttcgaggcacaccacccgaattgcttattgcctctgaggccgtgggctgccttgaccttgagcgtccaagcgcaacggtgtgccacagactgcacgacttttctgacgaaatggcgtccctcccaagaggcgcctggtagattcgcctaaggtaagcttcaccacaggtgtggcctccttcggtgtttggcccccaagtcagacccgagggcaggtaatgggcttcaacgctttgccactctgggttatagttgcncaattttgggcaccgtgctcatggttcagaagacatctcagaagacgattgtcgacttaacccccactagcacggcacgtggtcaactggtacaatcccgttgttcacccacttgcaagccgtcgcttgccaaaagaacgttccaggggccccgcgtggaattgtcctccaaggacgaagcccctaatggtgcacagggtggaaacgggtcctccgggtaccttggacacgtcgctacttcttggggtgcactcacatgcgggagttgaattgcgcggagctgcccttggccgaaca

SEQ ID NO: 588801 - DNA, 122 bp, Homo sapiens
  misc_feature (18)..(18): n is a, c, g, or t
tttaaaacatgcccagtnggccgggcatggtggctcacacctgtaatcctttgggaagctgaggcaggagcattgtttacgctcatgagttcaagaccagcctggccaacagagtgaaacct

SEQ ID NO: 588802 - DNA, 448 bp, Homo sapiens
gtactcatcgttggtatcatacacgaggagtctgcagggagcatataccggtacgagaaaagaaggatatttccctatggagggtgaaagagcccaaaggaaaaaggatggctcattagactatagtgatgaggacaacgagtccttgcaggtcattcagacgatctctgtacgggtgcatcaagcagcatgagtagtgacgacagcctggtggactatggcgagggtggcgagggtcagttcaatgaagacggctccttcatcggccagtacacggtcaaaaaggacaaggaggaaacagagggcaatgaaagctcagaggccacgtcacctgtcaatgctatctactctctggcctaacggagcccacccaggcacagccacctacttagcaagtgaaaggaggggagaaggagagacaaaaccactgcagacctaccacgaagcc

SEQ ID NO: 588803 - DNA, 311 bp, Homo sapiens
tcgagtgttggccagtcatgattcaagtatgggtatcgtggtgtaagccattgataaccggaaaaaaagggcgacactcgagggtcgcgcctcagtatgatggggcaatggttctaggacctccaggatttggtatccgaggttgctcatatccctgataaaaaatggtgtaggatttacatataacctatgcatatcttcccctataatataaatcatctctggattacatataatactcaatacaatgtaaatattatgtaaatagttgttataatgtattattaagagaatgacaagggggagacact

SEQ ID NO: 588804 - DNA, 207 bp, Homo sapiens
ttctagcaggatcccctgttgtacccatgctgtctttgaatggtcatcaccacgttctacagcctatttgatttctgtgaaattccaagaacattgtgcttatcacgcaactcatgctgagccctgaagacctttacgacaagcatcttgtaatgtctggccacttctggacttttatagaaactaggtgcagaccattcactggct

SEQ ID NO: 588805 - DNA, 171 bp, Homo sapiens
ccacggctccccgctgacgctgcctggtctctggttcgtgtgttggttacgtggcctagtctgcggagcgttctggacgtggcagtgaaatcacatggctaggccggaggtccattaagagggctgagaaggcccctgtcaagggtcatgggctgggttttactatatgat

SEQ ID NO: 588806 - DNA, 325 bp, Homo sapiens
agctgaattatcagctaagcttgtggcgataatggatagcttatttgacaagctgttatctaagtatgaagtgaaggctcctttttccttcttcctttttcagggatttttttaaggaaattacaaaaatgcacggaggtatatttgatctcttccaggaggacaaacacagtttttattttttgggattaatgcaggtataaactcacttgaaagagcagttatctcacttaaatgtgataaatgatggaggactcacatgggttggtcacagcagatgtagctttttacactggaaatcttcaggccttaccgggccttacga

SEQ ID NO: 588807 - DNA, 113 bp, Homo sapiens
agtggtgaatacactctctaccaggctgcagggtgaacgagctttggaggtcagcgcggtgcttacgtgtcgacggaacttgtccagggaggcgtgcgcgggggtggtgaatc

SEQ ID NO: 588808 - DNA, 162 bp, Homo sapiens
accatggattttttttccccggggaaagggtttccccctccccatttctgaagagagagaaaaaagactggcggccaaaaagagcagtgggtgaaatgggtccctgggtgacatttcaaatctttttacgtaattaaaaatattgtggcggggttttttgca

SEQ ID NO: 588809 - DNA, 297 bp, Homo sapiens
ggcaaccccaacgccacttatccagtgaaccactatcacgaaaaaaatctactctctatataatctccctacaaatctccttaattataacattcacagcacagaactaatcatatttatatcttcttcgaaacacattatccccaccttgtgtatcatcaccgatgaggcaaccagcagaactgcctgaactgcaggcacatacttcctaatcctacaccctagtaggctcccttcccctaactcatcgcacttgatttaacatcaaaaaaccctaggctcactaaaacattctat

SEQ ID NO: 588810 - DNA, 879 bp, Homo sapiens
  misc_feature (44)..(44): n is a, c, g, or t
  misc_feature (48)..(48): n is a, c, g, or t
  misc_feature (59)..(59): n is a, c, g, or t
  misc_feature (64)..(65): n is a, c, g, or t
  misc_feature (67)..(67): n is a, c, g, or t
  misc_feature (72)..(72): n is a, c, g, or t
  misc_feature (74)..(74): n is a, c, g, or t
  misc_feature (76)..(76): n is a, c, g, or t
  misc_feature (78)..(79): n is a, c, g, or t
  misc_feature (82)..(82): n is a, c, g, or t
  misc_feature (84)..(84): n is a, c, g, or t
  misc_feature (87)..(87): n is a, c, g, or t
  misc_feature (89)..(89): n is a, c, g, or t
  misc_feature (101)..(101): n is a, c, g, or t
  misc_feature (105)..(105): n is a, c, g, or t
  misc_feature (110)..(112): n is a, c, g, or t
  misc_feature (118)..(119): n is a, c, g, or t
  misc_feature (121)..(121): n is a, c, g, or t
  misc_feature (123)..(123): n is a, c, g, or t
  misc_feature (125)..(126): n is a, c, g, or t
  misc_feature (129)..(129): n is a, c, g, or t
  misc_feature (132)..(132): n is a, c, g, or t
  misc_feature (135)..(135): n is a, c, g, or t
  misc_feature (138)..(138): n is a, c, g, or t
  misc_feature (148)..(148): n is a, c, g, or t
  misc_feature (183)..(183): n is a, c, g, or t
  misc_feature (197)..(197): n is a, c, g, or t
  misc_feature (203)..(203): n is a, c, g, or t
  misc_feature (224)..(224): n is a, c, g, or t
  misc_feature (227)..(227): n is a, c, g, or t
  misc_feature (233)..(233): n is a, c, g, or t
  misc_feature (239)..(239): n is a, c, g, or t
  misc_feature (252)..(252): n is a, c, g, or t
  misc_feature (254)..(254): n is a, c, g, or t
  misc_feature (266)..(267): n is a, c, g, or t
  misc_feature (273)..(273): n is a, c, g, or t
  misc_feature (340)..(340): n is a, c, g, or t
  misc_feature (353)..(353): n is a, c, g, or t
  misc_feature (372)..(372): n is a, c, g, or t
  misc_feature (437)..(437): n is a, c, g, or t
  misc_feature (442)..(442): n is a, c, g, or t
  misc_feature (446)..(446): n is a, c, g, or t
  misc_feature (450)..(452): n is a, c, g, or t
  misc_feature (460)..(460): n is a, c, g, or t
  misc_feature (462)..(462): n is a, c, g, or t
  misc_feature (464)..(464): n is a, c, g, or t
  misc_feature (466)..(466): n is a, c, g, or t
  misc_feature (472)..(472): n is a, c, g, or t
  misc_feature (476)..(476): n is a, c, g, or t
  misc_feature (487)..(487): n is a, c, g, or t
  misc_feature (492)..(492): n is a, c, g, or t
  misc_feature (503)..(503): n is a, c, g, or t
  misc_feature (517)..(517): n is a, c, g, or t
  misc_feature (556)..(557): n is a, c, g, or t
  misc_feature (560)..(560): n is a, c, g, or t
  misc_feature (563)..(563): n is a, c, g, or t
  misc_feature (572)..(572): n is a, c, g, or t
  misc_feature (579)..(579): n is a, c, g, or t
  misc_feature (588)..(588): n is a, c, g, or t
  misc_feature (597)..(597): n is a, c, g, or t
  misc_feature (619)..(619): n is a, c, g, or t
  misc_feature (625)..(625): n is a, c, g, or t
  misc_feature (628)..(629): n is a, c, g, or t
  misc_feature (636)..(636): n is a, c, g, or t
  misc_feature (675)..(675): n is a, c, g, or t
  misc_feature (689)..(690): n is a, c, g, or t
  misc_feature (692)..(692): n is a, c, g, or t
  misc_feature (699)..(699): n is a, c, g, or t
  misc_feature (701)..(701): n is a, c, g, or t
  misc_feature (737)..(737): n is a, c, g, or t
  misc_feature (799)..(799): n is a, c, g, or t
taaggtaatggataaggacagagcttgaagggtcagcaattcantttntattggggtanttttnncntgttntntntnntananttntntcggattttttngggnttttnnnttttanntntntnntangtnttnttntgttcagatnttttgtcacctttagagtatttcacaggggccccngggggggggggggngggggngggggagggactttatggtgnggngggtgnccacgntgatgttcattangnccagcaccaggnncagggnacagagcaaagtctccgttgtctcaggcatctggattggctcttgggcctcccagtgcttgaggagnggctggtccaagncccagtggtccaccctggngtcatagacgtcctctgctgagggcacaaaggtcaggtaatggaacttgtggaagctgtattttnttttnggcnggtnnnggtttttngngncnccctcngtgnccgggtccccnttgcngagggatgtgngattgaggactggngggaagaacctgtcaatgtggcagatgagggtgttgggnnggnccngctcgcacnggggtcnttgggaaanaccgtcacntcagggggattattgggggggngggggnggnnggggggnggggtcaaggtattcaagttgttgttcaatatagcaatnttatctatcttgcnntnttttttnanggaaaaggctcggccaaactcctccagatgccaganggtctccttcttgtccagatccacatagaactgctcatcttcatcaaattcaaacataaacnctcctgttggtctatgggtctgtacaaacatggcataagttgacacatggtccgccttgatggcccagctcctcggagac

SEQ ID NO: 588811 - DNA, 174 bp, Homo sapiens
gtagattctgtaaggtgatgagtgggtatgcagccttcgaaggttattcataagcgtcttcagaccgaagatgtgctgcgagtagctttctgctggccaattcaatatatctgcagactatgagtcgtgcgatcatccttattactaaatattactttcccggttatctcaggc

SEQ ID NO: 588812 - DNA, 117 bp, Homo sapiens
tcactggggatcctgcagtcagtgactttgtgtctgcacgctgtgtccctgtggaaacaatctacaactcgcagctccaccaaactcactcagagtcacaaaattatctatcacgtg

SEQ ID NO: 588813 - DNA, 399 bp, Homo sapiens
tcgtctctgcgctctgtgaccccactctctggggtcctagagggttcttctgcgtcagcctcccaagtagctgggattacaggatgcaacaccaatcccggctactttttgtattttccgtagagacatggtttccgcatgttgggcaggctggtctcgagctccgtacttcaagtgatctgcctgcctcagactcgcaaagttctgggattcacaggcatgagccaccgtgcccggccacaagtgttgtggtaactctcatacctcaaaccaggcaataaggagagatccttgttctaatagctaggcttaacatcatgagtatggtcacatgggtcttctagtacgaaggtacctacagcaaaaaaccacattactataatactaatatttaatctc

SEQ ID NO: 588814 - DNA, 310 bp, Homo sapiens
atttagtttgggtggtctttttttaaaatgctggatcggtcagtctcttgtggcaatagcccttttaaaaaaataaagaatttaatatatggtgattgggatatgtagccttccaaaaaatgaattgcccaaaaactggtgtcatgtaaattccccctttacataaaaacccctcagggcagaatgatgctccatattttaaaattttaaaaatagggtgggatttttccttgtctctactttataattatccaaacttattttgtattgctactccccttaattgaaataaaatgtttataccttcgga

SEQ ID NO: 588815 - DNA, 367 bp, Homo sapiens
caggatggttggaacagtgtgtggaatgatgctcagtgttccataacacaatattgggaatagtaagggccaattgcatttaacattcagcctaatacattttctcaaactaattctgtgtgtaaaagttgccacctatcaaatggagatagctgaaacagcaaaaatattctttaacagtgatggttataatggaaatgctgacagatcattaaccacagcagtcctttagagaaaaaactgctgtaacgaaatcctgcagctaaaatttaatgaataccctaatcacacatttgctaatgcctctgaaatgtctacatcggtcaaattaataaaaatcagtgctatctattaagtctgactattg

SEQ ID NO: 588816 - DNA, 109 bp, Homo sapiens
ctgcattaccggggggatggaagaagtacatatagctcaggtagcactttatactcaggcatgatctcagccctctactgagtccctttgccagcagtatctttcaaag

SEQ ID NO: 588817 - DNA, 633 bp, Homo sapiens
aaactgtaaacacgaaattagaggaagagtccagcacctgccatttggccactgtccagacctactgtgtgcttcttggggaaaaactttacagctttgaatggctgagaggtttggaaagaaacagctcagtccccatggcccggatggagagaggatccctgcaggcaggtccccatgctgccaccagattggagccactccttgcttcctttagtcacagtacctgaatgtgcccgcctcctggagagcgtcctggttgcaggcttcccttgccaaccactccagagggtgaaactggctctcttcttgcttctttaaaaagacactgaggcgcatcttggatacccgcaagaaagaggctgtacaaaggcagaaacagacgttcagcatggccgtggctgagctgttggctccggagtgcttctgtcccacctcccccaggaagggaagtccgttggccaggccaattctagagcaaaatctgagagatgctcttagattcccactgtgtcactgcttctgctgagccatggaaacctgagagggtgtccccaacacacagtgaaatgatgccactcctcaggaagagcccacgtgggggcagggggcaagaggggtggggaggctcat

SEQ ID NO: 588818 - DNA, 392 bp, Homo sapiens
ctggatctgctgagccggtgagtggccacgcatgtcctcctgagtcgcgcgtcaggcccaaccgcatcaggacctcacgggccttccggatgccatccttctccctgggaaacagaaagacagcatgtgggcctgtgtctgacccactgtggccagtgtgtgtgtcggggggtggcaaggaagccctttagttccagcaaattcaccacccagtggggacagaatccctcttcattgcttagtccacctgtgcaggggcaggaggaggaggaagggggtgcaaaatatagcacagccaccctgaggctcctctcccagacaccacacacacacgcacacgcatgtgcgtgcgcacacacacacacacacacacacacagagacacacggagt

SEQ ID NO: 588819 - DNA, 253 bp, Homo sapiens
gccttttccaaggggtaaaaatttggccaaagtgggagcctactaacctctccctgagaaagtcctttggttagccttttttctttccatgttaatttgggggaaaaaaattttgtgaagccccttaattttgtgtagtaaaaaaatatttttgcccccccaatgaattggggggtttcctgttcccctttggaatttataaacagcctttttttagttgttaaaccttccaataaaacttccactgggttta

SEQ ID NO: 588820 - DNA, 495 bp, Homo sapiens
  misc_feature (3)..(3): n is a, c, g, or t
  misc_feature (26)..(26): n is a, c, g, or t
  misc_feature (43)..(43): n is a, c, g, or t
  misc_feature (70)..(70): n is a, c, g, or t
  misc_feature (274)..(274): n is a, c, g, or t
agngcctatggggggcccttttggcntcccctccctagtgtgntcagagaggggagatgcctaaaggtanccccctatagtttgccctcccaagcaatcctgtaccttcgaggttgataaataaggcatcaagaataggctgtaggtgggagaggtggcacgggcctgtagtcccagctacttgggagcctgaggcgggaggatcccttgagcccaagagttcaaggccagctggggcaacatagcgagaacttgactgtatttaaaaaaaganaaagaggcttcagcatcttcagaggaatctgtttaagaaggctgagaagggtgtgttcaggaagagttccacttgaaatgctgaaaattgaagaaaagattaaatactgaaaagtgggaaacattccagctcccaggaaacttacccattaagagaactcatttcttgaggattttggatagcaaagtctccctgtattccaatttccagcctgtattacc

SEQ ID NO: 588821 - DNA, 217 bp, Homo sapiens
  misc_feature (124)..(124): n is a, c, g, or t
ggataaaatagaaagcagaaatgtgcatctgacaatttgggagaacctttaatatctaactgtataatttattattcattaattattattgaggagatagggtcttgtttgttgcctaggctgnagtgcagtggtacgatcatggctcactgcagcctcgacctctcaggctcacgcagtacttctgcctcaacctcccagggtaccggagctcgaa

SEQ ID NO: 588822 - DNA, 99 bp, Homo sapiens
gcttccaccgacggggtgggtggagatggaagtgttagggcctgggtctcagtaccccgtggtcagaccccatgatgccccaaatggcactttggtagc

SEQ ID NO: 588823 - DNA, 1013 bp, Homo sapiens
  misc_feature (1013)..(1013): n is a, c, g, or t
agaccctgtgtcaaaaaaaaaaacaagaaagaaagaaagaaaaaatgctttatggcccagtgcaggggctcacacctataatcctagcatttggggaggctaaggcaggaggatgggcttgaggccaagagttcaaaacaagccggggcaacatggcaagaccccaattctacaaaaaacgaaaaattagccgggagcggtgatgtgtgcctgtagtcccagctactcaggagactgaggtgggagaatcacttgagccttgggaggttgaggctgcagtgagctgtgtttataccactgcactccagcctgctggggtaacagagcaagactccatctcaaaaagaaaagaaaaaatgcttggcttacataatgaggccaggcaaaaaaaaaaaaaaaaacaaacaaacaaacaacacaaaaaaaaaacaaaaaaacaacacaaacacaacaaacacaacgaaaggggcgggcgcgccctacacaaataacccccggaagggggaaccaaagagtcgacagcacgcagagctttttgacagacaaagtgagcgcccaccaacgaggcggacatacaaaacacaaaccagcagcgccgccgagaaacaccccaatcgcaagcagggaaaaccatcgcgacacgggcatacaggcaaaaaccccactctgggtgcgggagcctacgagggaacccacccccacaggaggctcaccagcccagggagacacaaccaacacgaggggtcatgagtggagcacccccaaccagtagtgtgcgggcgaagaacaaactggccacatgacatagatccaggaaaccatccgggcggctaggcaactgcacgaacgaacagcagcaacaagcaaccaaccaagtaaacaggcacagagaccagacagacacacgacgcacacagaccagaagcaacgcgacacagacaagacacccaacaaggagcaacacacactaaacacacaacgcgagcacagacacaggaaaacgtactcagtgn

SEQ ID NO: 588824 - DNA, 183 bp, Homo sapiens
cacgaggcgggccggttaccgtgccccagccgtcgatctcggtgatcttgttcttcttcatcaggtagtggacgcccttgacgatcccggcgctgacctggtgcgaacgcgcgtgggtcgggccgtaggacatcgtcgcgtcaccctcgatgccgtacttgggcttgtcgtgggtcaacgtcg

SEQ ID NO: 588825 - DNA, 103 bp, Homo sapiens
  misc_feature (39)..(39): n is a, c, g, or t
agattgttgaaattttatatgtttattgatatattttanaattttttattatgtatgttttgtaaaggttataagtttgtataataaaaatgtttaatggtta

SEQ ID NO: 588826 - DNA, 149 bp, Homo sapiens
tgcccaggttacatcctctctatcttgtgatcagctcattaacatttctcttgtgttcctgatccttcccaatgaacacctctctgcacccaagctctgtctcctcctctgtgagctctgggcttcccagttgtgtttacccgggaaag

SEQ ID NO: 588827 - DNA, 250 bp, Homo sapiens
attttaaaaaattattaatctggtgctgactcttaattcctatttcaatatgggtttccttgaagaattcaggatacaactttttgggtatgacagctttccttccccccctatttttgtggggggggatatatttgatttgggaagaatttaaaaaacccatagctttttaatttgtttgaaacagactttctgcctggtacatttttgcttttaacccattaaagaagcccatggccttttagtttta

SEQ ID NO: 588828 - DNA, 261 bp, Homo sapiens
  misc_feature (26)..(26): n is a, c, g, or t
  misc_feature (41)..(41): n is a, c, g, or t
  misc_feature (45)..(45): n is a, c, g, or t
  misc_feature (90)..(90): n is a, c, g, or t
gccgggaggggccgccaggccccgcncggtccagtctttgncggngtttcgatagagaatcgcttgtcggccagctggaatgcatggcgncgtctcgctcatgaaatttgcccctgattcaatctcctccccctcacctcccagtagctgggattacaggcacatcaccaccactcccggctaatagcgtcagttttttaattgcattaaactgcctgtaatttaaagtttcttattttatattaattccgtttttttttg

SEQ ID NO: 588829 - DNA, 1003 bp, Homo sapiens
  misc_feature (283)..(283): n is a, c, g, or t
  misc_feature (354)..(354): n is a, c, g, or t
  misc_feature (384)..(384): n is a, c, g, or t
  misc_feature (386)..(387): n is a, c, g, or t
  misc_feature (395)..(395): n is a, c, g, or t
  misc_feature (400)..(400): n is a, c, g, or t
  misc_feature (412)..(413): n is a, c, g, or t
cagtgtaaaaatgaggtgccactggatctgagtgctacacgaacacaagtagaagtattaatttgttgaaatgtgttgttaccaaaaagactgaaaagccccaaagtctagatataaagacctagacttcggcacgcgaaatcccagctatgctacctcttatttacctgaaaggaggacacgcaggatgggcagtcatgctggtgactcttgtactcccttgagggacattgggggggggggggggtggccccaggcaggatgcccagtctttgagctgaanattggaaggcagtgaggctgagggtgccaagatttccccagggtttcacccagaaggggaaggggctacantgcccccagctgtgtgcagggaggacactntnnagcccatnaccgntgccaacaccanntgcctaaaactgtgtttcatacatggggggttactatatattccagctggcggaaaacgcttacattttaccctttgtgaaacaaattaaatacgtgattagcctcaactaaacatttgctgacctatacaagacagtatatttcacccatgtcgctggcaattatgtcatggcgtaacaccaaataaccccccagaaagtagccagaaggccagttggaacttcacaattctaagtgttaagtaacctattctggagtgagtcaccagatccctgtcaaatagagtcacatatggtaggggagacgttttccagctataggaggaggggaactattacacacccagtagattcctatacaaagggtaataaaacttagttgtccctgggtttggaaacttaattgcccattacgagcctgcggaaggggttcccggactatatgaagatgagcctactttacgttatacaaggtgctgccttaacatgataccctggtaaagcgactcctgggacaaccattcatatagaactaaatcagatatggtactcacacaacaaagcggaggccataaaatacctcgaggcca

SEQ ID NO: 588830 - DNA, 848 bp, Homo sapiens
agattgtttttcctcaaaggagaatttaaaggtatttgttaaaattctaataagaggatcagccgggtgcaatgactcatgcctgtaatcccagcacgtgggaggccaagtcgggcggatcacaaggtcaggagatcaaggccatcctggccaacatggtgaaaccccgacgtctactaaaaatacaaataaattagccgggcgtgtttggtgacgacgaaccgtgttagttcccggctactcgggaggctgaggcaggagaatcgcttgaacccgggagacggaggttgcagtgagctgagatcgtgccactgcactccagcctgggtgacagagcaagactccgtctcaaaaaagatggccatgcttggccaaggctgggctcataggacaatatctgtagtaggaactgaaaggaatctggcctagggagccccggacttcggtttacctaccccgttacttcatcccattcatctgttctaaccctagtgtccatcattgccctggcttgaatccgtagggtgggagggaccagaaagccaagaaacaccaatggcacacgagaggttgggagacgaaaattgggcaggggaagccccaagggtggaattccccctttttgggacaaagtggggagttgggatcccttcttcccccttggtggggacactggaccagcggtttataccccttggacttaaagcccaaccttggggggctttgcctacattttcattggaaagcccattttgtgaaacccgacacggggagaggcattgactattcgccattggcagggcaacactgttaatatttgggaaaggctttggtggccccctccgtct

SEQ ID NO: 588831 - DNA, 380 bp, Homo sapiens
  misc_feature (167)..(167): n is a, c, g, or t
  misc_feature (195)..(195): n is a, c, g, or t
  misc_feature (282)..(282): n is a, c, g, or t
  misc_feature (303)..(303): n is a, c, g, or t
  misc_feature (323)..(323): n is a, c, g, or t
  misc_feature (371)..(371): n is a, c, g, or t
  misc_feature (378)..(378): n is a, c, g, or t
ttgtttttttcttggtcgagacagagtcttgccatgctgcccaggctggagtgcagtggtgtgatctcggctcactgcagcctccacctcctgggctccagcagtcctcccacctcaacctccctaagagctgagactacaggtgtgagccaccatggcctgggctnaatttttaggagacagggttttcacctnctttgcccagggtgggtccccaaactcctggggggttcaaggcagttccttcctggccttcaggccttcccaggagtatttgggggnttataagggtgttgaggccantggccaggaaaaacgttttncttaaggacaagggcaggtttttacattatattttaaatttttttttnaatggangt

SEQ ID NO: 588832 - DNA, 991 bp, Homo sapiens
  misc_feature (283)..(283): n is a, c, g, or t
  misc_feature (354)..(354): n is a, c, g, or t
  misc_feature (384)..(384): n is a, c, g, or t
  misc_feature (386)..(387): n is a, c, g, or t
  misc_feature (395)..(395): n is a, c, g, or t
  misc_feature (400)..(400): n is a, c, g, or t
  misc_feature (412)..(413): n is a, c, g, or t
  misc_feature (639)..(639): n is a, c, g, or t
cagtgtaaaaatgaggtgccactggatctgagtgctacacgaacacaagtagaagtattaatttgttgaaatgtgttgttaccaaaaagactgaaaagccccaaagtctagatataaagacctagacttcggcacgcgaaatcccagctatgctacctcttatttacctgaaaggaggacacgcaggatgggcagtcatgctggtgactcttgtactcccttgagggacattgggggggggggggggtggccccaggcaggatgcccagtctttgagctgaanattggaaggcagtgaggctgagggtgccaagatttccccagggtttcacccagaaggggaaggggctacantgcccccagctgtgtgcagggaggacactntnnagcccatnaccgntgccaacaccanntgcctaaaacttctggttccctatcactattgggggtgtttatcttatatattatttccaagtctggtggaaaagcgtcttcactttatacactcttttggaaaaaatataatatacactgtgtattaacgcctcccactctcaaactattggctggaccttaataaaagcacatgttattattccaccaatgtccgctgggcaattttgttcattgtggcgatanacccaccaaattaaccccccagaagagttagcccagaaggcccagtttgtgaaactctcacaaatttctaagttgtttccacagataaaccctacttctccgggcgcgtgatgtctcaaaccagaattccgttgtttggagtacacagctcacaatcaattggtcgggctgcgacgtttttaccaggctaaatagggagagcggcaaacttttaaacactcccttgtgtcgtcaattccaacaggggtaataaacacttgggttggccccgtggggttggggaaacctttaaatgcccattacagccctggggaacggtttcatccctaatggaaggactcttagctttaga

SEQ ID NO: 588833 - DNA, 1009 bp, Homo sapiens
  misc_feature (534)..(534): n is a, c, g, or t
ggaggccgcaggcgttggcgggcagcggcacggccggcagggttcggggtccacaccaggacgcagaggacggccgaggcgtgtctgggaccggacaagccgctggtgatggcatggcggtgggaatgaggtcaggagaggcgatcgctcacgctgagaggccgctgctgtcagagccccaccggcgataccgactaggagaacactggacagtaagatgttcttgatatgagactttttccttccacggtactgcgttccgcatgctcctgggtggggtgcagagtgtgatcagctcaagccagaacattctggtcgtaagagatgctgtctcgtcttcatgtttctcaaatggacttggcttcggcaaatcacttctgctacatgaaagccagcagcctgtgcagctctgggcggggggcatgcctgctatccagctcccggcattgttgcacatggctttgaaacgcacggcacagctcgtgtggcccaggtgcacctcgctgccaccctgcctgctgacctccatcccanatgccggtcctcgctgctctctgtggacctctcccggacgtggcgtccacctcctcctcgagggtcaccgtccagggctgtattgaactagcgcctccaagtccttgcattaccgtgcctcctgttttgggtgagacttgtgacgctatctctattaacttagtttggtagctccggtcacctgtcgagtcaccatggggcccagaggggacgcacagagggagaaccggctgcctgggatcccttctggttgcctcaccatcaggttgcggactgagggagcctcaacacctcagcccaccaggcggcggccaagggctggacaaagtcaatgaatcccctcggcacattcctccgaagccaaggcaagtgcctgccggggaattctaatcgcgcacgcttaccaaaagatcatactatcccaaggtactccgcacggggaacgcgagacccttagtaccgctggaacgacctg

SEQ ID NO: 588834 - DNA, 422 bp, Homo sapiens
gtcgacagggaagcagtggtaagagggagatagcccacacccaagaagccactggtacccctagcaggaccttcgggactgttgaacaacaaatcagaactacaaagggcctggttaagatcaaatgcctgccccacacctgcctctatagttcactcacaaaccagctgtaggtttcttcttccccattgtcagtgcctcaacgaagatctcataggagaagggagctccagcagtcaggtagcatcctggcctttatcctcaacccactctggctggtgaagcagctaaatcccaaagctactcctacctatcctagacactgtgattctactcctgcagtaaagggggcccaaggaagcaccatccagggtctctgcggccaccagtgagaagcagacacacatactccaaagttgctg

SEQ ID NO: 588835 - DNA, 434 bp, Homo sapiens
ctttccaaaacgcctaattctgtgctaggttgtgagggcacaagacttcaagaccacttgccctgcctgccagtggctcatagtccagtctaatgctagccaacctgtctcaccatcttcccactttatgttctatctaaggcaactcatttattcccacagctttacttccatctgttgatgactctcaacttttcatatctccaacctagacctttcttcagcttccacagctgtatatccaactatctactggatatctcttgtatgtttcacaaatccccaaggcttaccatatttaaatttaactttttcattgtctacccacacctcaacaacagaaaaaacaaatgttggatgtaattattatctttcctaaattccgtatcttgttaaatggattaaaccattctcactcttggcttccaaaaaaa

SEQ ID NO: 588836 - DNA, 319 bp, Homo sapiens
tttaaagttataactttttaaataatttttatgagttacatatctacttaatccattccctcatgatctctgcaaacattttcatttctggatgaatcattttttctctgcaagtcttcagttgagaagctgtgttattgagctcacaagtggctttctacttactgaacccataacttgattcagttttcttagtctcattgcacgcactctctgtcaccttaattttaccggctcaaatgggagcagacaccagtgtctcccatgcagatgccatttcttcatactttcctccttcaacatcacagcctaggaattg

SEQ ID NO: 588837 - DNA, 1277 bp, Homo sapiens
taccagggggaaaatacctttaattggaaaccccaccaagtggcaaaatctggtccctgggctattaagctcctctttcttcctctgttggcaattccgggttcttttcttccatgtggtgcccctatggatatggcttttctttctccctcccatgggtctggagaagcgggcctatgggcacaaatttgggaggtgggtgtgccaatggactcttaagggtacaattctttctcccaagaggcccggccggattcggttctggacaccaagacaaggagatttggcggagaaagggtgaaaagcacccgagtttctagggtctcccacccaacaacaggctctttacaagacttgtgaacaaaagtgtccctcttgggtgcacactcttcacaccccattagtgtggagacacacatagtcgcccaccccccagagaggtgtgtgagagaatagcgctctctgtgtgtgccaaagacataagggtacaataagagtaccagagtagagaagagagacgctatatgggtgtctcatgatggggactaccaaacagtctttaggacgccgtggtacatcctgatgagaataacaaagggtgtagaacgcccctcttgtgggggccacataatctctttttaatacaccaaatagtcttctccctatgggtggaggagaatatctcaacaaaagtgtcgacgagagagaggaatgagtgtaaaacggcgcttatatttcgtaggggcgccacgcaaaagagctgcgggttgtggcaccaaacaaagaagacaagaaagaggggttaataaacagagaagagacgacaagaagggaatgtagccacaatatggggcgccccacaaaatataaacaaaaggggggcgaccaaccccttgttgggcgacaccagaggaggcccatcatcgagaggaggggaggaggaccattaatgggggaggaagaggagacacaaaggaaatatacttatagagggattgcggttgtgcgacaccaacaagaaaaatctggtgtggatgtggacaaccccccctcattatttttggtgtataacaacgccaccttattcagaggaggccccattttggtgtggattcaacacaaacccccccgagagtaaaataagagaaaacgagtatgcaggaaaataccaacaataacgtacaacaattcaccatgctgtggggacgcccacaaaaagacaacacattggttgtggtggtattctcccaccacaaggggggtacaacaccccatag

SEQ ID NO: 588838 - DNA, 824 bp, Homo sapiens
gtgccactgcactccatcctggacgacagagtgagactctgtctcaaaccaatcaactcaatcaatcaatcactgtcctggccagttgcagtggctcacgcctatggtcccaacacttcgggaggccaaggtgagaggataacttgaaactaggagttcgagaccagccagggcaacatagtgaggccccatctttacaaaaatacaaaaattagctggcacgctgctagctcccagctacttagcgcagcgctgtagcgggcatggcactctgccttgaagcgctgcagagattgacgccctggcagtgacctcatgcacgaatgccacatcgcctgctttaacaagcctcctaccgacctgacccgcacgccagcatccctgctcctcctgcgccataccatacctacccctgccttccccgccattctcacctgttgccctccctcactcacaccacctctccgaccggccggggccactccgctgcgctctctgccctgcttcctcctcaccccacctctctgcgccacgcgccctccgcgcacggctgcggcctccccctgcgcgggctcaccgcaacggcctccgcagcaccctacctgcccgtgtactccaactagtggcccgacaaacccccgactccctccttacccttaccaccaaccctccgcacacacaactcccgcccagacctgacacccctgcctcgccagccccctacgcaactccccaaaacacctcccaacgcagcgccaaacgcaccccacacccctcgtcccgacccctgcgcaacgccccccgccggcaccacccaccacccg

SEQ ID NO: 588839 - DNA, 417 bp, Homo sapiens
gctgtttaatcatgattgctacgacggtagcgttatgattcagagtcagaaatgatagtggtgtcatataaccagagattgtccacataggtggctgagatagtgaaaccctgtctctactaaaaatacaaaaattagccaggtgtggtggcatgtgcctgtagtcccagctacttgggaggctgaggaaggagaattgcttgaatctgggagccagaggttgcagtgagccaagactgcgccattgcactccagcctgagcaacagagtgaaactccctctcgaaaaaataaaaataaaaataaagaatatatatatattataaaatactattttcaggctatgtgtgtaatgtgtatacaaagcataaatgaatttggtgttattattaagtcccatcccaagtattccagagta

SEQ ID NO: 588840 - DNA, 112 bp, Homo sapiens
gcatcccactagtaagcctgatatcagccagcaattaagataacgttcaagctcaaatcccactacctaaaaaatcccaaacatataactgatctcctcagcacaacctgga

SEQ ID NO: 588841 - DNA, 763 bp, Homo sapiens
tagggtacctccctttactctggagctccagtgtaccacctctaaggatgaagcaggtgtctcagaacaccctgagtgcccctgcgagagaacctttgagaatggacaacccctcagcaaggagccagtggcccagtggaggtcacactgtgtggccaacaaagcacaaggtgctatggagcctggcagggcctgcgcagaccttccatcttgcctgagggctcttcagattcaagatggtctcagccgtggagaaacatcctgtggcccctcagacactgttgtttttcgggagaaacaaaccaaaggaggtgatgggagtgctatatcaagaagctgctccaacatcatcaactcctcccagctgctataaccaggagtatagtgatgttgtcctgaataaggagataccagagccagcagcggctgggagagcctgtcctgatgacacaccgggcctaactctcctggagggcacgcctcgtgaagtgccctggttcttccataccgagtacgtagcctgcagatgtgcctctccatgtgctccagcggatccctctggccagggaaattcccgatgggtgctgcaacagacaccgtgctagtctcacatgacccatgaaaaccacacaagcttgaacacgtccaaattatgacccaagattgcagtacaaaggcctcctctaactggccacgactaacatagttgtggaataatcatcacatttaaattcactacggccacactaacacacagaacaac

SEQ ID NO: 588842 - DNA, 415 bp, Homo sapiens
gctccaaggccgccgcgtatactcaagtactctagttggccttgcagaacctgtgtatatgacaagtcagccctctgtttatgtgagttttgcatcccacaaatactgtattttccacccacgtctggctgagaaaacccgcatatgagtggacctgcacaggtcaaacctatgtagttcgaggggtgactgtattcagaaatctgaagaaatcccaaatctttttaaaacacttacggtcccaagcacttgggaaaagggatacgcaatctgtagagtaccgtgtagagacgagtatcgagtgggtgtggttgacctgatgctcactcccactggaataaaaataacagcatttatctctgttgtgttttttaactggctttcatccatagatttattgatttgcttgattcaa

SEQ ID NO: 588843 - DNA, 318 bp, Homo sapiens
  misc_feature (140)..(140): n is a, c, g, or t
  misc_feature (177)..(177): n is a, c, g, or t
  misc_feature (186)..(187): n is a, c, g, or t
  misc_feature (278)..(278): n is a, c, g, or t
  misc_feature (295)..(295): n is a, c, g, or t
ctgtgatcttggtgtgtgtgcccactccagcctggggaccacttcagaaggtaggggcgtgtccgcggtgctgactgaggcctgcttccccctccccctcctgctgtgctggaattccacagggaccagggccaccgcanggggactgtctcagtaagacttgatttttccgtcccntttttctcnncacactcacactgacaaacgtccctcagcgggtttccaacttgtgtggcttcagtgtgttttcagagcacaacccaaccacaacaagcaangtgcattttcagtcgtntgtgctttttttgttttgtgcta

SEQ ID NO: 588844 - DNA, 108 bp, Homo sapiens
atatcgagctcgtacctacactgaatcaccccactgaaaaagatgagttctgcctgtgtgaaccatgtgactttgtcacagcccaagatagttaagtgggatctgaga

SEQ ID NO: 588845 - DNA, 942 bp, Homo sapiens
gcaggacacacggggtgctgtagcagcaaaccataatactgctgccgcgggattgtccatttacatattgtcgtgccatccgtttctctgccggccgcattaccggggccacaaaaatgggccggccattgctatacaaggttagtagaacggcctctcatgcatctgcggatctttatggcgtccacacgggcgggttgggcaaaaaccccttatggggccacaaccacatcctcctcatgttgccggttcatggctctgttccgtccatggacaggggcaagaccattactgagtcccggttcagcgcctcggcatactgccgcctgttatctctgtggtggagagggccttacttccgcggtgctcccccccggggctggattgttcccgccccctatccagtggtagccctgcgcgtgaccccctgctcccaggcctttggcacctatgcgttcccagcccctggggaaactctgcttcgggcgccgaggaccattttcagcccccttgtcaagcacaccccgccactggccctttgtggtttttgcaacacaacgcgacccctgtatggggccactagggaatagcattcagggtcattttcctgcccttcctctcccgctctccttgggcagagcacccacgcccagtacacgcggccaccatcatgcgagcaacccccctttctggcagcacccaccgaagggggccgccccgtggaacacacccagggaagggcggggccctcaccacgccgagcacacgagccggtcgtctgcatccacggtcggaacaccaacgcccgcgggctcccccgcggtcgccgccacgatggcagcacaccactctcccgggggcagggcaaagtagtctgtccgcacaaaagcaaaaggtcttctggggccgcttccggccggcgattccaccacaacaaaaaca

SEQ ID NO: 588846 - DNA, 936 bp, Homo sapiens
tgttgtcgtggtccgattcactgcctccagggttcttgcccaccgtggcgctatccctggcttataagcatggctttattatctagcgccgggctttgcccgtgcttggccataacccccgtggccgtgtttccccaattccgcacggtgtctctcattgccgcctcgcgcccgcccagtggccgtttcctccgggcctctcttaccagaatgccttgcgcctcttcggaccccggctttcttgcgcttctcaaccccagggttgccactccccctcttcccggagcgcgttgtttgttagccacccccgcccgtgctagggtgacacaccagtacgccttcccgcgtagttgggcgctgccccatcccctgggaatcacaaagggagcaccccccctgggctcttctttggtgtgacctggagtcctgggtatttttgcccccccgtggtggaccccttcccccgtaccccccctctggcgggtccccgctgcatgtgttcttctcacaccgggttttctccagtagtttctgaacgagtagtcccgcgtggccttctgtcgagaggtcctcgacccccagcggtttcttcgccgggtgacccggcagtgtccctccggtcctcgggttgcctcttgtgatttcacggactcactagagtgtccaccaccgggttcgtaaggatagactgtgctccctcccagtgtgcaattttccgcaccattgccctcccatcataaagctgtggggttcccttgccggccccgcccgcgaaagatctggtcctgccgtgcgttggcccctcgcagcggccccctgtgattggcggggcgccccccccacggtcccgtttgagaccggttcgtgacactacggttctaaaccccatggacaaaattgtcagtggcaaaaaaaaacccacttctcttcaaaaca

SEQ ID NO: 588847 - DNA, 309 bp, Homo sapiens
  misc_feature (148)..(148): n is a, c, g, or t
taattcaataataaagttcttattctgggcaggcaacggggcgtcacgcctgttagggtcagcactttggggaggccaggggggtagatcgcttgagtccaggagcttgagaccagtctggggcacatgaagcaatcccatgtctacnacaaaatttaaaaaaatatttgccaagcgtggtggcgcatgcctgttgttcccagccacctgggaggctaaggtgggaggatcagagcccggaagattgaggctacagtgagccgtgattgtgccactgcactccagcctaggtgacagagtaagaacctg

SEQ ID NO: 588848 - DNA, 545 bp, Homo sapiens
cctacctgaacaaaatgtgtatatacatacaattacgtcagccataagaatccatctttaatatatgttgatgacatgtgattagattcttagaaagacttatatgcttccaggcacggtggctcacgcctaccatcccaccaccctgggaggtcgaggtgggcagataacaaggtcaggagatcgagaccatcctggtcaacatggtgaaatcctattctccaccaaaaacacaataaattatgccggacattctggcacatgcccgtagtctcagccactcaggaggtcgatgtaggagattcgcacgaacccgggaggcagaggttgcagtgaaccaataccacgccattgtactccagcctgtgtgacatgagttccctccagtctaagagaacaataaaaaaaaactttatgcttagtgaaataagccagaaccggaagggcatatatgttataatttcacttttatgaggtacctagaataagtaaattcagagacaggaagtagaacagacattaccaaagggtgatgtctgggttca

SEQ ID NO: 588849 - DNA, 662 bp, Homo sapiens
ggacgagtagctgagttaggaggactgcttgaatccagaagtttgagggcagcctggaaaacatagtgacaccctgttctctgtaaaaaaaatcaaaaaattagccgggcgtggtagcacacgcctgtggtcccagctacttgggaggctgaggtaggaggattgcttggatccaggagatcacggctgcagtgggcctggagtgacagagcaagaccctgtctcaaaaaaagaaagaaagaaagaaagaaagaaaaagaaacaggtgtagggctggacacatggctcatgtctcatgatccgcccacctcgggctcccaaagtgctgggattacaggcgtgagcccaccgtacccggccgtacttgttgatagtaaacttgaagcccaggaaagattggggataagaataaaaattaccccaaatttccaaatcaagaagtaatcatggttcaggtttgggcagatgtactttctaggcatgaacacacgttatctcattgtttacttaacaccgggttataaacatttacccatagcatttgaaaggtagctatagatagaaaagaatcagagaagttctaaaacagctcttgcgcgttgtttcaacattctctgcaggaaagatgaggtcgtcagccctttttttaactcggacaaatc

SEQ ID NO: 588850 - DNA, 283 bp, Homo sapiens
cgtgagtaatggccttagctgtttcctgaccataaaactacgaattgttaaacattagcaggctttgggggggtcataggggataaacgctgctctcatgctatctttcaaagtgaagatgggtttgtcaagagataaaaagccttgtaagagatgctgggccagagataggagtttgtaggaatactagattctctcctggcggagttgggcaggggaggtgagcacttgagtttgagtggcatgtacagggtttgtggtaggccccacagatgacccccag

SEQ ID NO: 588851 - DNA, 388 bp, Homo sapiens
gagggcgatctgctatcccacctgtagcagaactgttacatcgtgggtatcggttctgcatctcctgctccatgcattggtggaggtggcaggtggttcatgtggtctagtactaataccctttcctcagctctagtcagaagctcactcatcttactcaatggctatgctgaaagtgtgttacatccatccatataatccacgtttgtctgacgtcttgtttcaaaatgagaggctgggccattcgctacttcgttatgcttatgttcgagattagcatcatcttcagtccagctctggtccttgggccagcttctgccattctcgccgcctgtcatgaggtgctctttgccctttgtctggttcatgaggtccatctagatttttc

SEQ ID NO: 588852 - DNA, 100 bp, Homo sapiens
ggaaagaggtcaccaacgggcagaaggtgtccagggcgcagccagcgagccccacctgttggggatgcttggtctgcaagtagtggcggccccaaagaac

SEQ ID NO: 588853 - DNA, 120 bp, Homo sapiens
gaaaaggggggggccaaggggttttgtaaaaggggggggggggggaaaccccaaaggggggggggggggaaaaaaaagttcaaaggggggggggcccccccccccccaaaagggagtata

SEQ ID NO: 588854 - DNA, 795 bp, Homo sapiens
  misc_feature (20)..(23): n is a, c, g, or t
  misc_feature (279)..(279): n is a, c, g, or t
  misc_feature (508)..(508): n is a, c, g, or t
  misc_feature (549)..(549): n is a, c, g, or t
  misc_feature (557)..(557): n is a, c, g, or t
  misc_feature (574)..(574): n is a, c, g, or t
  misc_feature (610)..(610): n is a, c, g, or t
  misc_feature (656)..(656): n is a, c, g, or t
  misc_feature (773)..(774): n is a, c, g, or t
gaagtcgaggcgggagtgannnngcttccgtttctggttttgctctagtgttgggtttcttcgcggctgctcaagatgaaccgactcttcgggaaagcgaaacccaaggctccgccgcccagcctgactgactgcattggcacggtggacagtagagcagaatccattgacaagaagatttctcgattggatgctgagctagtgaagtataaggatcagatcaagaagatgagagagggtcctgcaaagaatatggtcaagcagaaagccttgcgagtntttaaagccaaaagaggatgtatgagcagcagcgggacaatcttgcccaacagtcattcaacatggaacaagccaattataccatccagtctttgaaggacaccaagaccacggttgatgctatgaaactgggagtacaaggaaactgacagaaggcatacaagcaagtgaagatcgaccagattgaggatttacaaagaccagctagaggatatgatggaagatgcanaatgaaatccaagaagcactgagtcgcagttatggcacccnagaactgnatgaagatgatttaganagcagagttggatgcactaggtgatgagcttctggntgatgaagacagttcttatattggatgaggcagcatctgcacctgnaattccaagaaggtgttcccacttgatacaaaaaaccaggatggagttctggtgggactgaatcttgatttggcacagatccctgcttcatagatttgcatcattcaagcatattgnnaaacaacactttttgggatgg

SEQ ID NO: 588855 - DNA, 205 bp, Homo sapiens
tcccaaacctcttcaccttactaccagacaaccttagccaaaccatttaccagattaaagtataggcgatagagattgaaactcgcgcatagatattagtaccgcaaggaaagttgaaaattttaccagcattatttagcaaggcttaaccctattacctcctgcataatgaattaactagaataactttgcaaggagggccaag

SEQ ID NO: 588856 - DNA, 824 bp, Homo sapiens
  misc_feature (20)..(23): n is a, c, g, or t
  misc_feature (279)..(279): n is a, c, g, or t
  misc_feature (537)..(537): n is a, c, g, or t
  misc_feature (578)..(578): n is a, c, g, or t
  misc_feature (586)..(586): n is a, c, g, or t
  misc_feature (603)..(603): n is a, c, g, or t
  misc_feature (639)..(639): n is a, c, g, or t
  misc_feature (685)..(685): n is a, c, g, or t
  misc_feature (802)..(803): n is a, c, g, or t
gaagtcgaggcgggagtgannnngcttccgtttctggttttgctctagtgttgggtttcttcgcggctgctcaagatgaaccgactcttcgggaaagcgaaacccaaggctccgccgcccagcctgactgactgcattggcacggtggacagtagagcagaatccattgacaagaagatttctcgattggatgctgagctagtgaagtataaggatcagatcaagaagatgagagagggtcctgcaaagaatatggtcaagcagaaagccttgcgagtntttaaagccaaaagaggattttctttcctctggcttctgccatacgtggtatgagcagcagcgggacaatcttgcccaacagtcattcaacatggaacaagccaattataccatccagtctttgaaggacaccaagaccacggttgatgctatgaaactgggagtacaaggaaactgacagaaggcatacaagcaagtgaagatcgaccagattgaggatttacaaagaccagctagaggatatgatggaagatgcanaatgaaatccaagaagcactgagtcgcagttatggcacccnagaactgnatgaagatgatttaganagcagagttggatgcactaggtgatgagcttctggntgatgaagacagttcttatattggatgaggcagcatctgcacctgnaattccaagaaggtgttcccacttgatacaaaaaaccaggatggagttctggtgggactgaatcttgatttggcacagatccctgcttcatagatttgcatcattcaagcatattgnnaaacaacactttttgggatgg

SEQ ID NO: 588857 - DNA, 330 bp, Homo sapiens
gcttagttgacatgctcagtctgaggcgtctaagacacacctggtagttagctaggagaggataccaatgataatcagctcaccaatgttatcttaggctacagtgtccaggcacaggaacacaatgatcaaactgacgaggtcctgcccttgtggtgcttgtcgtgggtgggtcctgagctcagaacagagaccaagactggggacagatgtgcgcatcgtcaataggcgacacctgaattggcaaagtggctgcaatcactcaaggacacactaaacataaggggaccagagatgacagcaattccccaggtggccccggtaccgagc

SEQ ID NO: 588858 - DNA, 342 bp, Homo sapiens
  misc_feature (342)..(342): n is a, c, g, or t
ggagaatctatcgaatccaggaggaagaagttgcagtgaaccaagattgcaccactgcactccagcctgggcaacacagcgaaactctgactcaaaaccgaaagggaaagatgaaggaaacgaaagcgataattagggactgggaaagacaaagactgaaggattggtggcaatgagttatggggaataatacgaatgctcaccaaactattatcaggaaggttatcaaatagatatgagggtatgcaatctttttgaccatgcactacattgcttgctcagaaggctaatatacagcaacattggaggtagcagcagagaatacacataggtttagcctgn

SEQ ID NO: 588859 - DNA, 553 bp, Homo sapiens
tagtccacgctcgggagccatgccgtccaaggtgcccgctgcagtctgtgcaggtcttcggacgcaagaagacagcgacatgctgtggcgcattgcaaacgcggcaatggtccactcaaggtgaacgggcgggcccgggagatgatttgagccgcgcacgctacagtacaagactgtctggagtccagttctgcttctcgtgccaagggagcgactttgctgggtgtatacactccgtgtccgctgtaaagggtggtggtcacgtggcccagagtttatgctatccggtcaggtccatctccaaagccctggtggcctattaccagaaatatgtggatgaggcttccaagacaggagatcaaggacatcctcatccagtatgacgcggaccctgctggtagctgacccgtcgtcgctgcgagtccaaagagttgggaggccctgtgtgcccgctgctcgttaccatgaaatcctagccgataagcccatcgtgactcaaaagtcacttgtataataagacagttcgttggagggatttctaacagtcttccaa

SEQ ID NO: 588860 - DNA, 934 bp, Homo sapiens
cgtgcactgcccccacaccttcacccgttggtgtcccgagaaggaaagagataacgttccacctgagaaagcggaagctcctggctctgcagcggggagaggacccaggaaaccggaagaggtcagaagaggacggaggaagaggacgacaacaacgaacggtgatcgctcgatgaagaggggagaaaatgaggaggaaggaaggaagactgcagaggctggttcagaaaaggacggaagaggcccggctggcagccctggaagagcagtagcgatggacggcgaagaagtcccagggtgatggcaggcacctcgaagctggaggataagcagcggctggcccaggaggaggagagtgacggccaagcgcctggccattatcgatgactgaagaagacgggagaagtacctgtaccagaagatcatgtttggcaagaggcgaaaaatccgagatggccaacaagctgcgcggagaagcggaaagcccacgatgagcgcggctagaggtctgagaagaaggaccaagaaggtcaaggccggagtagagctagcactgatggcccctcacagggcaagaggccagcccgctagacagctaggatgtggcaagaggcaggcctagaggacataagtgtgatggatcaagagtcaacttctcactcagtcctttctccagccagccactgacccctaatgctctctggcatgggccagagggcagcccatcgcttcctcattggatcggagctgccatgctggtgcctggtcagagaagaggcctctgtgctgagcttgatataatctgctccaagagagccagtgacatgaggcgcagaggccaacgcagcaccctactactagcatcaattcatcatggctataacagccacctccaacacagtggacccggattacggcgggtgatgagtggagg

SEQ ID NO: 588861 - DNA, 136 bp, Homo sapiens
caaagagttggaattacaggcctgagtcaccacgcctgactggaaaaagtcatttgtaacccttccaccagaggtgactgctattaagatttttagcatatttgtttccagatttttctctccaaaagttaacttc

SEQ ID NO: 588862 - DNA, 458 bp, Homo sapiens
  misc_feature (82)..(82): n is a, c, g, or t
  misc_feature (88)..(88): n is a, c, g, or t
tgctagcggaatattcgtgcagcgacgcgtctttcgtagtactcattcatcaaatggagtctatttactcgtcgtataaaanagggtngtggagatagtgtgtgaaaacactatgcgtcttttgagctcattatatctgtgcacacacatatatatcacacacagtgtccccgcgaagtcgtgtgtgagatatatgtctcgggtgtgtggtgtctgtgacacgtagacccgcgttttgggttataggacacagcacacactgggctgtgccgacatttttctgggcccttcttaccaaaccaagggaggggagaaggacccaattctttttcttttggcacgcgaaccggaaccggttttgacacagggccaaggagagaaacactgtggtgtgcagagatgaaacctgggtgatggggaggtctttgagcaaccttgtttatgagactattgattgc

SEQ ID NO: 588863 - DNA, 1448 bp, Homo sapiens
  misc_feature (1208)..(1208): n is a, c, g, or t
  misc_feature (1236)..(1236): n is a, c, g, or t
ggtatgcatacacggtgtgttaccacaagtatgtctgcccccgcacgcagcaacaaccacgaatgtggaatgaacactactctgtggggggggtactgggctcacactacacacacactgtctgcgactttactggtttgatgtgtgcccaccacccctttcttttaattgacccccgacgaaggagaagagcgttcttttcctgcagagaaaaggaattttaccccacacaaaggggcgcctttagatacccccacggggggaaaatacacgagcgaagaaagggtgtgttgaaaagttattaccctggttttgaaatagtcgcgggtgttaaatgttgccgtgggtgaaccccgttgttgataaaaagcccacgtgttgctgaaaaagccccctcgtgggagccccaccccccccctcgtagaaaagaagaaagttggtcacccaccgggttgtggtgcttaaccggagattttgtccttgcccataaactccgcgggaagggagaccacacaaggggagaaattttggggcccacacatagaattcaaatggccttcgtagatatgcccacaacttgtagaaacaaaaagggttttggggagaaagaaaaaaaagggggtggttccacttccacccaccgcttataacagggagatggcgagaaaaaccccccctggagacttggagtgcagagatttatgagaattctatattggaaaagcgcacatggaaaagtttttgagatccgcagagcgccccaacatatatgtttgccccccaaacaaactctttaatttaatagatctattccccacaaagagtgtctcagagaaattgtgggagatatgtcccacaggaaatggccctcacaggtgtgtctcgtgtgtgagagtgtgagaaaagagaaaatagtttctaacgtgatacccacggtgcccactttgggtacacctgcctccttgaaaaatttccccacatgcggctccccgtaaagcccctcttgggtctaataagatcccctgagaagaatagtgttgaatgtgaggagaagcgtcttaaagtgacacccctcgtctttgagaataagggtataaaggttggttcttcacaggtttgtggcacatcacaaggctcccacagggtgtttggtggaccacacatatagaaaagaacccacagcttataaagaataattggctatattngctatacttggtgggtcgcacgctgttntggagaaagaagggagttgaccccctgaaattcttgaaaaacgcttcacgcctcactgagcttatggagaaaagttggaagaaggtcacttgtgagccacaaagacgaatgccacatgcttctttaaaaggaaaaggtgacacaggctccaaattgaaaaacgtattccagaaatccttgagcagttacccccccccaactagtgaatatga

SEQ ID NO: 588864 - DNA, 943 bp, Homo sapiens
  misc_feature (64)..(64): n is a, c, g, or t
ggcgccgaccgaaaggacgattcaaaggacgcagaaggacaacgccttgcagggactcccaggnatgatgatcctcctgtgacccgggctacctgtagccaaaatgcaactaggatccagttaatcgctctcatttaatgacccactcttttcctttggaaaatacaataaggacgtcccccatacacggagtagaatggtaaaaaaaaacacagagacaggaaagagagcaagacgaggaaggaacacggaaggcgagcaccccaccaccaaggagtcggaagaacccggggaagcgccgaaacctgggagaagggggcgcaatgaacacgaagcgacaaaagacgaaaactaagcacgtgccacgcgccaacccgagtagcgtgtgaagcctcaaacaactcatcgacataacgaaggagagtatcagaagtaacgccaagatcaacccccaagaacaatagaggcacggagggtaaggtagcagcgattccagaccctggcccaggccctccgcgcgacccgatgtcacgacgcgggcggcggggcacgacaagggagaagcagaacagagtgtgaggggcagggaccacgatggcgcaagcaccggcaagacacgcgtgagcacgacgaagaggacgcgacgcccacgacgacagccgacgatacagcaacaaagcgaatgaatcaaacacctattctcgtccccggccagccctcgcacgacacctctcgagctcgccacacgtgatgagtgaagcacctgacgagaggggcggccatacgggatggacagcgacaaaaaataaagcaaaccagacgccaccggagacaacgatggacggacgagaacggatagccgagttaagataaccaccaacaacaaagagaaaacgtcgtaactaccatggcaaaaacggagaagagaccgcatcgagctgag

SEQ ID NO: 588865 - DNA, 1562 bp, Homo sapiens
  misc_feature (1210)..(1210): n is a, c, g, or t
  misc_feature (1257)..(1257): n is a, c, g, or t
  misc_feature (1354)..(1354): n is a, c, g, or t
cttgtgggctccgcttccgacaaaagatggcgtcagaaggatatagtgtgtggttctcttgctttcacaagacaggagatatgtttcttctgttttgcttgtgggccgcgcaacaacgattgttgtcgctggtggttgttgtgctaccatcgcccctactgatttatgtgttgcctcccctccccccccctcgttgtgggggagcccaccaacgcttggtgggctgtgttcacacgctgggtctccccagaggggggggagtttattcttcgctcttggtgatccaccctttctcctcaggggcgcctcctctaatttgttagtgcgccctctctcggcggcgttaatattgtgtcccccccccccggtgtcatatttgtgggagaatttttggcccgcaacacacaaccccgcgggcgtgtcaacaccaccgtgtggtggccaacaacggccaacaaagttgttgtgtggtctcggaagagcttttcgtgagagaaggggtgaaataaagagtttttggatttttcccccccgctcttttcttgtggggtgtaataatagaagtcttctggcgaagatagtattttgggcccccctcaagaaaagtgttctctgttgatgagtagtgttctgcttgggtgtggaagaatcgtctctgcccccacaacttgtctggttgtattgaagatattagtgggggggtcttcttctcctggtgggccaacaacaggaccccccccacacatggtggttggtgtggttttatgatgaggaagaagacggcttttcttcttctacaggaagactcatatagttctccacaaccccgcctctttgtgggtttctctctcttgtgtgtgctctggttttttctgctgtgaggataatatgtagagaccacacgcagccactactactttgttcttctggcagtgtggtgggggttgtcgttctactattccacacagagcacacagctgtgggagcaccacacagcagcagagtgggctgtgttcctgtgtggagagccctctgtgcgcaagaggtgtcacccacaaacgtttgctcgcgccccacagcgaacggcgctctcacgcagagagggtctataaagtgagagatatattttatctcctctctatatatcaccgtcgtccccaccgcgccctctctctctatatatccacagctcgggtgtgagacagaaccnactgtgtctccacagagactctctgctttttgtgttctcacacattngcggccacatcttataagtgttatcagtgatgagtatatacaagagactcggtgtgtataatagagattataccacacattgcactctctgtgtaanacacctctctcatcgagaaggaaaagagagaaatatttttgttggggacccctcttggtgttttcttttttggcgctgtgcgccgcatttttaagatgttatattagtgtttttacaaacaccaggacttttttaatagggacaccacttggaccccaaatattgtccacagagattttgagaccccctttaaaaagatttaatgaga

SEQ ID NO: 588866 - DNA, 103 bp, Homo sapiens
tcccacaccgtgcacctgcgtcaaatgtatttatgctagagtcgccacactccacggaaggcaatcatgaacatgatcttgctgcagttggtacctgagctcg

SEQ ID NO: 588867 - DNA, 80 bp, Homo sapiens
gcggccgcctactactactactgctcgaattcaagcttctaacgatgtacggggacatgatgggattaatgcccttatgg

SEQ ID NO: 588868 - DNA, 221 bp, Homo sapiens
tacaaaagaactgtgtattccagcaaatatccagccttgcattactgtatcataaacattctgtatgctttttttttggtagtaaagtttggtagggggtaatgaatgcctggagggggttggttagaagtgagcaaatgcttccggaaggagatgaatggttatgtgagtttggaaagagaagtgaaagccagacaagggtagaggtgggaggagaggaa

SEQ ID NO: 588869 - DNA, 245 bp, Homo sapiens
cgagaggtaacctcacacgattatttaccttccacttcatctgccttcattatgcagttctagcaggactccacctcctattcttgcacgaaacgggatcaaacaaccccctaggaatcacctcccattccgataaaatcaccgtcccaccctcacacgattctttaccttccacttcatctagcccttcattattgcagccctagcagcactccacctcctattcttgcacaaacccggaagga

SEQ ID NO: 588870 - DNA, 408 bp, Homo sapiens
  misc_feature (106)..(106): n is a, c, g, or t
gggacgccttccccggggccccccgggggaaatattcttttttttctcgagggcccccccccttttgtggtgtggcccaccccccctttgaggggggccccccccnttttggtttttgggccccccccctttgggcccccccttggggccccgggggtttcccggggtttccccccccccaatggggaaattggttccccccggaatggggggtgggttttttcaccccccgggggcgccccccctccaaatttttccaatttttccccccggccccggggggcccccttttttgggggggggggttttttccccccccccccccccaaagacccccctttttttccccccggggggggggggggggcccccggggggggtttttttttaaaacccggttttccccca

SEQ ID NO: 588871 - DNA, 229 bp, Homo sapiens
aaaccaggggggaaaaaattttagggtccgtttaaggttttattaaaaaaccccatttggattttttccgggaaaaaatttgccaatttggttttcccccaaggaggtaaaacctgagggaaaatccccccttttttccctttttggggtaaaaaaaatccttttttccggaagaaatttttttactaaatgttccccgggtttaaaaaaaaaggccctttaattttta

SEQ ID NO: 588872 - DNA, 84 bp, Homo sapiens
gcacacacacacacacagacacagaggacatacctttcattctcaaatgtttcactgatactcacccccttctgtcgtcttctc

SEQ ID NO: 588873 - DNA, 778 bp, Homo sapiens
ctggccagcatcggcgtttattggttggatataaaaaagtcaaacttatacaagcataaggtgtgttgctcaagtactcctgtgggggtggggcaatgatgaaatgagggaactggcgcctcaccctatactctgttccgtatttctgtagatatgatatccaccacagagactaattcacaagagacagaggagtgtctgtgcacgatgattacacaaaggagcctaagtgactgtactagatttcttactatagaggcgtgttaggttttttatttagagagcgcggggagtatatttcgagactgttatctcttacgtccccctggaccacgccttaaccgcacatagacgccggggcgcgagccgcgtcggacgcagccctggctccccaccccccgcgactccgccacccctctcaccctcacaattcacacctcctcttccccaccacacccgacacccccgggctcccctacagtctcatttagccgtcgtcaccccacaaacaaaggttgagatgatctaactcaatgcgactcgttgtttttgtttgaaaatatcttatatttcatactcacttactctatctttcgatctaagttaaggcctaggtctaactgtgttgattaactttatatgccgtcatgtttccccatatgtagccccctccctacatcatcaccacatccaccgccctctttctcgtctccatgtacgttgtccgccctcaccatcctatgcctgcggcattgcccgagtattcccttaatgtctg

SEQ ID NO: 588874 - DNA, 906 bp, Homo sapiens
  misc_feature (392)..(392): n is a, c, g, or t
gagcgggctcggcggcattctacgctgcagtctcagctgcaggtgcaggacatgagccgtgcacccggaggagacccccggaggaggcgagcgaaagcttcgcagtagcacgtgaccaatcccacgagacccctgggttatgctctgcagctaggtggcactcatggcgtgttctctgctccgccatggccatggcatgcgccgtggtgcctggctccgaggctcctggcagcgtttagcacgatagttcgtggaaggagacagctcagaaggaccgcgcttttcgtcgtgcggcatcagtgtggcagactggcagcacacatgtcgggggacgttgctccggcgggcagtccctcaacgcaattcccgttgcccatcggtccaactaaccntgcggggccagcccggctcgaattgccgcgcggggctgtgcctggggcttgctccgctggggtcagagtggacttttccctggtcccggggggcccgggaggccagacggtggctggagtgagcgcgggggaggttgccgcgttcaaggtgaagcgaagagcgctagcacgagttaccgagttggacactagacctggcgtaccccacgccgttcgctacaacccgaccagtactccacctgggcagcttagcagccggagagctaggcggcctccactaaactgaaatcttcaagggggttattcgtaatcaaggcgtagtgaaagggttcgcgagagctactaggtcacattctggatgggacaaggtcgatgacagaacagccttggttgggtaacgcgatcaaaaggggttccgaacacggggaggttccgtactttttcttcttaaccctggagaaagggggctcattgccgctgcatatttcctttttcggtcccattttacttgggg

SEQ ID NO: 588875 - DNA, 880 bp, Homo sapiens
  misc_feature (880)..(880): n is a, c, g, or t
gacacccaggccggcaaagagcaggtatcagcactgcaagcaccaagtgtgtcttgagctcagtgagtactggtatgtgtcacattgccaaatcccggatcacaagtctccatgaactgctggtgagctaggataataaaaccctgacatcaccattccagaagcttcacaagactgcatatataaggggctggcttgtagctgcaagttgaaggagctgaccagccagtgacccctcaaactcacctagccaccatggacatcgccatcccaccacccttggatccgccgcccttctttcctttccattcccccagccgcctctttgaccagttcttcggaggagcacctgtgggagtctggatcttttcccgaaggtctacttccctgagtcccttctaccttcggccaccctccttcctgcgggcacccagcgtgttgtgacactgactctcagaggatgcgcctggagaaggacaggttctctgtcaacctggattgtgaagcaattctccccagagggaactcaaaagtaaggtgtgggaaagatgtgctgaggtgcatggaaaaacatgaagagcgcaggatgaacattggttccatctccaggagtccacaggaataccggatccagctgatgtagacctctcacattatttatcctgtcatctgatggggtcctcactgtgaatgaccagcacaggtctttggcctgagcgacatccattaccgtaagaaagctgtggacgaagccaaaagaaaaaaaaaacattgggggcgcgggcggaatttaacaccttgggggcagataatagacaggcagatgcgcaggggtcacaaccgggcgggaacaggtggtgtcacctctcctcgcgggagn

SEQ ID NO: 588876 - DNA, 152 bp, Homo sapiens
  misc_feature (5)..(5): n is a, c, g, or t
  misc_feature (8)..(8): n is a, c, g, or t
  misc_feature (86)..(86): n is a, c, g, or t
  misc_feature (108)..(108): n is a, c, g, or t
gtgtnctngggccggaaacatgctgccgccagatccatccggtacaggccaagaagcatgccgggccttgatcccccctctttgtnatttcattggtaactggagctnactggagcaacactgtaatctcttgcgtctggccattgttcatc

SEQ ID NO: 588877 - DNA, 148 bp, Homo sapiens
cggaggcggagattgcagtgagccgagattgcgccactcactgcactccagcctgggccagcaagactctgtctcaaaaaaaaagaaaaaagtgtgggtatatgtgtgtataagtgtgtgtgcatgggcatgagaaggtccaggtatg

SEQ ID NO: 588878 - DNA, 424 bp, Homo sapiens
tctctagtaacgtggttcattgcgatccaaccatggccagccgaattcgagacttgatcacccagcgggaggtaaccagagcgctcctgggcggcctcaatgagtgcgacactctagaactgacacctagagtccagacgcttagaggtggccaagcccaattcgaaggattcatacaatgcgaacggattatgcctgcccgttggttccacagtgcggtacctgtaccttcgcggcggcgctgaagatgcctccatgaccaagatctatggcggccgtcaagagcgctcttatgcccagccacttcagctgagctttcaagagcgggaccctgtaggctcctgcacgcattgtggggtcctgtacccgttctgcctcttacccaagttggccgatctatctgcgacccgcaggttcaccttgc

SEQ ID NO: 588879 - DNA, 248 bp, Homo sapiens
ggactgacagaagacaaagaaagtgcttttgaatatctttcctctggctgactagaccatgatgttactacaatgcttcaaagctgaagaatctaaatgtcgtctttgactccagtaccacataataataatgctatacttaaattacttgtgaaaaaaaacacattttaaagattacgtgcttcttggtacaggtctgtgaatgacagtttatcgtcatgctgtaaatgtgcattctccataaatat

SEQ ID NO: 588880 - DNA, 224 bp, Homo sapiens
gtaattgtgataagtagtgcttgaattatttgttttcgattattttctattaggctgtgatgggctcaggtaattgaaacccctgatgcaagtaatacagatgtattcgggaggagtacttccagagggtcaaggggagaaatgcctgttaggggtcggtgtcctcctagttctagagttggggctaggctagaatggtagaatgccaagaagaacccagcaaa

SEQ ID NO: 588881 - DNA, 130 bp, Homo sapiens
  misc_feature (1)..(1): n is a, c, g, or t
nctcgggccgttatcgcagctcattgtatcctcgatcacccaggactaagcgatcctcccaccttgtagctgggactacatgctcacagcacacctggctaagaattttttttcttatttgagtcagagt

SEQ ID NO: 588882 - DNA, 931 bp, Homo sapiens
  misc_feature (63)..(63): n is a, c, g, or t
  misc_feature (75)..(75): n is a, c, g, or t
  misc_feature (87)..(87): n is a, c, g, or t
  misc_feature (93)..(93): n is a, c, g, or t
  misc_feature (124)..(124): n is a, c, g, or t
  misc_feature (135)..(135): n is a, c, g, or t
  misc_feature (148)..(148): n is a, c, g, or t
  misc_feature (234)..(234): n is a, c, g, or t
  misc_feature (237)..(237): n is a, c, g, or t
  misc_feature (303)..(303): n is a, c, g, or t
  misc_feature (312)..(312): n is a, c, g, or t
  misc_feature (330)..(330): n is a, c, g, or t
  misc_feature (364)..(364): n is a, c, g, or t
  misc_feature (408)..(408): n is a, c, g, or t
  misc_feature (630)..(630): n is a, c, g, or t
  misc_feature (646)..(647): n is a, c, g, or t
  misc_feature (654)..(654): n is a, c, g, or t
  misc_feature (689)..(689): n is a, c, g, or t
  misc_feature (698)..(698): n is a, c, g, or t
  misc_feature (717)..(717): n is a, c, g, or t
  misc_feature (722)..(722): n is a, c, g, or t
  misc_feature (737)..(737): n is a, c, g, or t
  misc_feature (830)..(830): n is a, c, g, or t
  misc_feature (845)..(845): n is a, c, g, or t
  misc_feature (849)..(849): n is a, c, g, or t
  misc_feature (918)..(918): n is a, c, g, or t
ttaataacaaaagttatgcaaagattaacttcatttttagtagagaaaatgttttgtaaaggnatttcttcaaantatttctcccgngggggnttaaccatcaatctcaattttattaaacatnctcctgaagancctatttcaagangtagaaaaaaactgtattcacaatctttgcaaacccaaagagtatgcaaaagatcacggatccacgggaaacatcagtaacagcanggnggctttccacctgaggggggttcccacagcgcctggatccgggagccgcccggggcggggaacctngggaggggngtgcccgggcaagggctnaacttacatcccccgacccgaacacagggcagancaccttatacggcgtcttgcctcccggggccccgggcgggggcncgaggcaggccggagaggcggaccggggcaggcggcggcgggccaccagcacgacaaggggcccaagggcggcgaggaaggagaggggacgcaaggcgggggccaccagggttcccggcgggccggcattaaaaaccgggagccgcgggggggaaaggaagaggcccacccccgccagcgtcggggcaccccccccagaattctggacccggcggacggccnccggcgcgtgcatcanncggaggnttttggaagggtgccggccggagagcagcggggtngacccaggnaattggcagcaaagatgancccgncgatgaggtcttctngttcgcagggccctggaacagccacaaaacttggaaatgatgccaccttctttgtctctggaatgttgttattgtcaacaggtccattgagancagagcgctgcggcntccntggctgcgccagaccattgcaaacctgctcgtggggccacttcagcctctcttctggggtcctggtctngggcttgaagccc

SEQ ID NO: 588883 - DNA, 868 bp, Homo sapiens
gtttccgggaggcgcgtgggcttgaggccgaagaacggccttgtgccaccaaatggagactttgtaccgtgtcccgctctagtgctcgaatgtcccaactgaagctgaagaagccgcccttgttgcacatgccgtcgccatgcatgtgtatgctctggtggtgtgtctaacttcctcatacaccggagacaatacttaatgatgtcattgtggaccctccaagtgtcgggtctatgatgatgaacaattgggccatcagaggccagtagctttcttgtggcctacagagtaattggccatattatttctggaccggctggcatccaggtttcctattaaccaatgggaggtacaggttacaataattcgttgaccgattccgattgcgcaaaattatccaaaaatcaaataggattctttcttctgtccatgtgatcggtctgtgtctatggagtttacatggttagagtatcatgacgaatgaaactgcgggtatctgatgggtaagaggtgctctgagagaatcaggggttagtggaattggccctgtcaatgacgtttaagggttgtaccaatccttatatgattgtggaaagaattgaagagcgcgttcaaggaatatctagtgaaaaccgggagcgtatgtaagctggctaacatttctctgggtttacagcgaccacgtatcacaggatttttccgtggcatggtaacaagcttgagtgcatgctatagtcaaaaaatttcatttacgatttataaagggtttgtaacccttaattgggagacttgtcaaaaaaaccacgtgtggtgactgggatatagtgtgaggggggacattgtgcgggggggtaaaaagcggtgggta

SEQ ID NO: 588884 - DNA, 130 bp, Homo sapiens
aatactcttatgccgttgtccaggttttggcaaattacaaataaagatgctgttagcattcatgtgcaggttttcgtacggaagggaagtttttaactcctttgggtaaatacccatggagtgtgattgc

SEQ ID NO: 588885 - DNA, 178 bp, Homo sapiens
ctctttactcgtcgtcccatccctttccgccccacaaagccatcatcttccctcaacctccccagtagctgggactacaggtgtgcggcaccacacctggctttttttttttttttgtttttttttttgggaaaaaaaggatttgggttttcccccttttggtttccaatttctgggc

SEQ ID NO: 588886 - DNA, 183 bp, Homo sapiens
ccttcgatagtcgtggcacttagcagggacagtggacgtgcacctgactgctgacctggactggctcagtctagaagcaggccagagagcagaggacgtggatcccagggcgacctcagacggccagcggtttagctagttctgctgttcgttcacgagttctgagcattctctgctagccta

SEQ ID NO: 588887 - DNA, 114 bp, Homo sapiens
aggatcgcgccgtcggtggactatggtcgtgacttgcgaaaacctcttgcggtgctcccaggaggctgcagttggctttgaggcccacagcagggtgctgagcagagcactgtg

SEQ ID NO: 588888 - DNA, 234 bp, Homo sapiens
  misc_feature (19)..(19): n is a, c, g, or t
tagctgactcatctcccanggtccaagtatcttctacctcagcctcccaagtagctgggaccgcaggtgtgtgccaccatacccagttaatttttaaattttttgtagagacagggtctccctatgttgcccaggctggttttgaacttctgaagcgatcctctcacctcagcctccaaaagtcctgggataacaggcgtgagccactgtgcctggccatgcgtggattgccag

SEQ ID NO: 588889 - DNA, 167 bp, Homo sapiens
ggcagtgcagctgctgctgtgatcgatctagaggatcccggatatgtattaggggtgtgtgttttggatgcgtacatatatagacacgtgcttacatgatgaggacaaattggagaaatctaccattaggcaatttgtcttagtgtgaacatcatagattgtactca

SEQ ID NO: 588890 - DNA, 311 bp, Homo sapiens
aaggacccgtctgaggcactgcttcagaggaacagggcactggctgttcctccagccccacgcgccaaatctctgcttctccatcaggcagcaaaacaaagactggaaggacgtgagggctgcctgggggttggggcaagggaggacctttgttcaacgcgcttccactgtttgtactgatgtctttcagcgaccgtgtccaacatgtatgtcgtgtacactatagtactggtattcccctagtcgtgaacaatgtgttccgcttcctgctgcctcactggacgtgctgttccccagcttgctccagacgt

SEQ ID NO: 588891 - DNA, 784 bp, Homo sapiens
  misc_feature (92)..(92): n is a, c, g, or t
  misc_feature (156)..(156): n is a, c, g, or t
ttgtgtaaatcgcggcgagtatatgcaaaagattctttaatggtgattgggtgccggcccactcatgaggatttcaactgttcagcggtgtngtagagtggtaacatggagtctccatgtgtgaacaacagcacaaatgagtatatgcccgcctcnttgatagttaaatgcaatatggcgatgaggcacatcttagactcaggcatcgtctatgtaagcatcacagtattgcagacagccaccaatagatggagacagtcaagcatgcatcatcttgtagagccctttgagagagcagagtcatgtcaacactatggtttcagacctgtggtctctcagtctaaaggaggatactcctttatgccattcaacactgtgttaaatctttgcaaggtctcttgcaccaggtggtgtcagtccaacacaggtgcacatgcggtaagacatccgaggtatctacacatgcctacatagcaggaattagcagatggaagttgtgttcagtgtgtagggtgtggtattacattattaaagcagcagcaaagtagcacatgtatgcttatctctgtctaggtgcagggtttttttacatattgaaaggcggcttatctgtagtgttcactcttcacatgtggacatagccacatagttcgtctcgtataatagaatccattctttgtgacaatagtagagccgtggtatttccaatgggagagagcatcgtgtgttttaccttgtgacatgcacaacaacgaatgatcttatcacccatgtctgttttgag

SEQ ID NO: 588892 - DNA, 100 bp, Homo sapiens
agaggatcccgacgtgtctctagaaaacaaaacaagtcagagaaagaaaaattacctatatacctcattggcacatttctggttacgtcaagtcgtgggc

SEQ ID NO: 588893 - DNA, 327 bp, Homo sapiens
cacgaggggatcgttgaactcgatggttacctgcgcctgcaggttgggatcagtgggcggcggccccaccacctctgcggcactgatgagcccgttgccagtgttgccgcttgcggcagcggtggtgatgggggcggctgcggcaagcttggccggatcagccacggcgaggaccaggtcacgggccccgtccaccgtaggttggatgaggaagctgtcgcccgctgccgcgacgccagaagacaacgtcagggtaaacccgtccacggtctgggggaaggtgctgaaagtggtcacgctgccgtcgctcagacgcgtgagggtata

SEQ ID NO: 588894 - DNA, 137 bp, Homo sapiens
ctgtaccggtgactctcaatggcaggtgtttgagaagtccccctgcgggtaagaacttcgggatctggctgcgctatgactcccggagctggaccacaacatgtacctgggaatacctgggacctggccaccggggt

SEQ ID NO: 588895 - DNA, 140 bp, Homo sapiens
cgagcatcaccgtgtctgttcactgaccaaagtcacaattgtcgaggttgacagttgggcagaagctctggttcctctttaatgtggtaatgcttcataccaacgtttcccaaagtagcctgaatggtccgtcgaagtgg

SEQ ID NO: 588896 - DNA, 91 bp, Homo sapiens
tcacacaaccattaagggaattggtcttcacccaccagtgtgggccttgaagcaaagggcacagccctggtgggttggaaaaaaaagtttg

SEQ ID NO: 588897 - DNA, 845 bp, Homo sapiens
  misc_feature (25)..(25): n is a, c, g, or t
  misc_feature (82)..(82): n is a, c, g, or t
  misc_feature (93)..(93): n is a, c, g, or t
  misc_feature (107)..(107): n is a, c, g, or t
  misc_feature (109)..(109): n is a, c, g, or t
  misc_feature (111)..(111): n is a, c, g, or t
  misc_feature (144)..(145): n is a, c, g, or t
  misc_feature (157)..(157): n is a, c, g, or t
  misc_feature (160)..(161): n is a, c, g, or t
  misc_feature (163)..(163): n is a, c, g, or t
  misc_feature (165)..(166): n is a, c, g, or t
  misc_feature (168)..(168): n is a, c, g, or t
  misc_feature (181)..(181): n is a, c, g, or t
  misc_feature (196)..(196): n is a, c, g, or t
  misc_feature (202)..(202): n is a, c, g, or t
  misc_feature (207)..(207): n is a, c, g, or t
  misc_feature (214)..(214): n is a, c, g, or t
  misc_feature (216)..(216): n is a, c, g, or t
  misc_feature (224)..(224): n is a, c, g, or t
  misc_feature (252)..(252): n is a, c, g, or t
  misc_feature (434)..(434): n is a, c, g, or t
  misc_feature (445)..(446): n is a, c, g, or t
  misc_feature (448)..(448): n is a, c, g, or t
  misc_feature (451)..(452): n is a, c, g, or t
  misc_feature (479)..(479): n is a, c, g, or t
  misc_feature (510)..(510): n is a, c, g, or t
  misc_feature (519)..(519): n is a, c, g, or t
  misc_feature (538)..(538): n is a, c, g, or t
  misc_feature (554)..(554): n is a, c, g, or t
  misc_feature (557)..(557): n is a, c, g, or t
  misc_feature (561)..(562): n is a, c, g, or t
  misc_feature (566)..(566): n is a, c, g, or t
  misc_feature (581)..(581): n is a, c, g, or t
  misc_feature (591)..(593): n is a, c, g, or t
  misc_feature (598)..(599): n is a, c, g, or t
  misc_feature (610)..(610): n is a, c, g, or t
  misc_feature (616)..(616): n is a, c, g, or t
  misc_feature (624)..(624): n is a, c, g, or t
  misc_feature (654)..(654): n is a, c, g, or t
  misc_feature (669)..(669): n is a, c, g, or t
  misc_feature (677)..(677): n is a, c, g, or t
  misc_feature (682)..(682): n is a, c, g, or t
  misc_feature (685)..(686): n is a, c, g, or t
  misc_feature (695)..(695): n is a, c, g, or t
  misc_feature (699)..(699): n is a, c, g, or t
  misc_feature (719)..(719): n is a, c, g, or t
  misc_feature (738)..(738): n is a, c, g, or t
  misc_feature (745)..(745): n is a, c, g, or t
  misc_feature (774)..(774): n is a, c, g, or t
  misc_feature (779)..(779): n is a, c, g, or t
  misc_feature (819)..(819): n is a, c, g, or t
ggggtttcatccccagagactgacngaaggcgttacagccctcctctccaaggactcagggctgagaacggattcgaatctngaatgatcagnaaaaacatgcaaangngngaaggaaagggaaaaaggtgcattcccctaagnngagggggatggnatnncngnncngagggggcagggnggacaagtaccaggnggctcntcccntttcccncntggtgttncgttcgaaaacagtccaagcttggaganagcaatgagctccacctactcagcagaacccacggctcgtcccccgtggacgtgactgagcagtgaccttgcctgccccgttcctcagccgcccatcccactgccttgactgaggggaccctgcttgtgctcctggggggcaggactgggggtcctagctccttgcttctttggttcgcacncagagaacagnngngcnngacggactcatccccactccccaaacncaagctccctgctgggtgggcggaaggcacngacagagtncctgggacacccccaggtngccaccttctcttttnctnatgnnggtncctccctggcacatngtccattctnnnctcannccccagggtcnggaatngggacgcnaagaaagtgtaccctcaagaaaaagcttcnaggacttttctaatntgcagatncttcnaannccatgccgnccgnccccacagccccatcccttncacagggccttaaattcanggcttcncaaacggtccttccccttggctgccggtncactntgggcccaggctttgcaggccagcttcagacagtgggacnagaaacacttgcagcatgtctctcct

SEQ ID NO: 588898 - DNA, 141 bp, Homo sapiens
ctcgccgcctcctcccgccgctgcgggcccccctcgccggggaacgagcgcgctcgctccggcgccggcctcgcctcctcgcagcagcgccatggatgagttccacccgttcatcgaggccctgctgcctcacgtccgcgc

SEQ ID NO: 588899 - DNA, 290 bp, Homo sapiens
  misc_feature (40)..(40): n is a, c, g, or t
acataatacaacacgacctaacaccacagaatgtatgtanttcattacagaaatgtccacagtaggtaaatccacagaaacgaaaagtagcttactggttgcctagggctggaaggattgtggggaaatgagacatgactgctaatgggtatggggtttccttcaggggtgatgaaaatgttctaaacttgattgtggtaaaggctgtacaactgtgattatactaaaaaccattgaaatgggttacattttaaatgggtgaattgtatggtttgtaactgcattttata

SEQ ID NO: 588900 - DNA, 1789 bp, Homo sapiens
  misc_feature (286)..(286): n is a, c, g, or t
agcggaaggcccgggaagatctgcgggaggcggcagggcccagggcgttgaatgcccggccacaagatcagcctcctcccattggcgaaaggagccccgaagagcttgtgttcaggagggaggcctcggcctggtcaagtcatctagcaggaagagtcccggacagtgcaaagcaaatgcaagaagaccccctccctagccgatgggaaatgccccagccgttgaaggcggaaataacggcctgtaggcaacggaactcccagcgttcgcaaaggagcggaggagncggaaactcagggcgcgaggcctgtgggcccagcggtgaggcagcagctgggggcggggggagggcggacctagcttcccagggcaggtgattcgtcggccccggtggcggcggcgcgtgcgacggtcacctcggtttggggaagatggaagagttgagtcaggccctggctagtagcttttctgtgtctcaagatctgaacagcacagctgccccacacccccgcctatcccagtacaagtccaagtacagttccttggagcagagtgagcgccgccggaggttactggaactgcagaaatccaagcggctggattatgtgaaccatgccagaagactggctgaagatgactggacagggatggagagtgaggaagaaaataagaaagatgatgaagaaatggacattgacactgtcaagaagttaccaaaacactatgctaatcaattgatgctttctgagtggttaattgacgttccttcagatttggggcaggaatggattgtggtcgtgtgccctgttggaaaaagagcccttatcgtggcctccaggggttctaccagtgcctacaccaagagtggctactgtgtcaacaggttttcttcacttctgccaggaggcaacaggcgaaactcaacagcaaaagactacaccattctagattgcatttacaatgaggtaaaccagacctactacgttctggatgtgatgtgctggcggggacaccctttttatgattgccagactgatttccgattctactggatgcattcaaagttaccagaagaagaaggactgggagagaaaaccaagcttaatccttttaaatttgtggggctaaagaacttcccttgcactcccgaaagcctgtgtgatgtgctatctatggatttcccttttgaggtagatggacttctcttctaccacaaacagacccactacagccccggaagcactcccttggtgggctggctgcgcccctacatggtgtcagatgtccttggtgtagctgtgccggctggcccgctgaccaccaagccagactatgctgggcaccagctccagcagattatggagcacaagaagagccagaaggaaggcatgaaggagaaactcacacacaaggcctctgagaatgggcactatgaattggagcacctgtctactcccaagttgaagggttcttcccatagcccagaccaccctggatgcctcatggagaattaaagagagaagcctccttaaggagccacaggatggtacctggccccaaaaggaatcctggagaggaggacagtgacaacaggtgacttcattctttagagtgaactttccaaacccagtccagctggaaacagcttatctataatctgaaatgctggctcaaacagttatggggaggttcccagattgcgtagcattcagattgatttgagcagctcctactgtgataagtgtatcccagatccacaatgtaaatatatgtgatttgtaagaaagaa

SEQ ID NO: 588901 - DNA, 640 bp, Homo sapiens
  misc_feature (25)..(25): n is a, c, g, or t
caggctgcgtacggtccgagggttngatggcgaacttgggctgcaggaccgtcccgggcccggatgaggacatttttctgtacttcgcctacggtagcaaccggctgacgagagtatccacctccgaaacccctcggcggcgggcttctgtgtggcccgcatgcagatccagaccgtcctggccaacatggtgaaaccccgtctctactaaaaatacaaaacagctgggcgtcgtggcgggcgcctgtagtcccagccacccaggaggctgaggcaggagaattgcttgaacccggaaggcggagcttgcagtgagccgagattgcgccactgcactccagcctggcgacagagcgagactccgtctcaaaaaagaaaaaaaaaaaaagggaccattttgttggtaatcagaagttaaaggtttccaatctccaaggaagggaagacgaaactaacctggtcaaagattatcctggatggacaaattacagaaaggtggcgtcctccggtcttcacaggtattaaaaggaattattgggcattgggggccaaaaattaaaaagtgggttgtgccgcgtgggagtatcaagaagaaagtttaaaagccaattagaaaccaaagtgaactattacggggaag

SEQ ID NO: 588902 - DNA, 1866 bp, Homo sapiens
ggcgacggtcacctcggtttgggtgagtccctgggttcgagcccgggccccgccagctgccgagttgcctctcggtgccggactgtgactccctctggccggccctgcactctggcctcctgggacgtcatctggagggatagagccaggcctgggactccttttgggagagtttccgttcttctattccgtgctgtccggccaggacccctcagggacttctgtggggcaggggcgaatcatgcatggcctagatgaccccatgcctagaaaaaggcagtgcggggcggtggcggcgcgcacggccgagtgaagcagatagcgtccccggggctggagcccggtagcagggggtccacctaaagtgggaagtctgttttcaaaatgacatctactccatgcctgtcttgtttccctaatgtactttatggaagttcttcacactactggagcattgacgttacttgttaagcagccttccacatcctagctcttttccaaggggaagatggaagagttgagtcaggccctggctagtagcttttctgtgtctcaagatctgaacagcacagctgccccacacccccgcctatcccagtacaagtccaagtacagttccttggagcagagtgagcgccgccggaggttactggaactgcagaaatccaagcggctggattatgtgaaccatgccagaagactggctgaagatgactggacagggatggagagtgaggaagaaaataagaaagatgatgaagaaatggacattgacactgtcaagaagttaccaaaacactatgctaatcaattgatgctttctgagtggttaattgacgttccttcagatttggggcaggaatggattgtggtcgtgtgccctgttggaaaaagagcccttatcgtggcctccaggggttctaccagtgcctacaccaagagtggctactgtgtcaacaggttttcttcacttctgccaggaggcaacaggcgaaactcaacagcaaaagactacaccattctagattgcatttacaatgaggtaaaccagacctactacgttctggatgtgatgtgctggcggggacaccctttttatgattgccagactgatttccgattctactggatgcattcaaagttaccagaagaagaaggactgggagagaaaaccaagcttaatccttttaaatttgtggggctaaagaacttcccttgcactcccgaaagcctgtgtgatgtgctatctatggatttcccttttgaggtagatggacttctcttctaccacaaacagacccactacagccccggaagcactcccttggtgggctggctgcgcccctacatggtgtcagatgtccttggtgtagctgtgccggctggcccgctgaccaccaagccagactatgctgggcaccagctccagcagattatggagcacaagaagagccagaaggaaggcatgaaggagaaactcacacacaaggcctctgagaatgggcactatgaattggagcacctgtctactcccaagttgaagggttcttcccatagcccagaccaccctggatgcctcatggagaattaaagagagaagcctccttaaggagccacaggatggtacctggccccaaaaggaatcctggagaggaggacagtgacaacaggtgacttcattctttagagtgaactttccaaacccagtccagctggaaacagcttatctataatctgaaatgctggctcaaacagttatggggaggttcccagattgcgtagcattcagattgatttgagcagctcctactgtgataagtgtatcccagatccacaatgtaaatatatgtgatttgtaagaaagaa

SEQ ID NO: 588903 - DNA, 820 bp, Homo sapiens
ggaattacacccatgcttgagcctactactgaccccttgttccctctgtggttgtactagtttatattatccacaggtgatgcttgggcgtatgcttatcgcccagggatgctatggtctaaatactgagttagtaagctgaatgtctgttaagaaaatcatgtttgacatcttttctatctgctgcgttaaccagttccctgtgagctcgtctagcgttactgggtgcgagaagccctggcgtatgactttgccgattgtgtacacttctacactgtcagtggacttgacagttgagttgtattcttcttatcttccattttggtctatgcttatgttttcgttcgaaatttgtgtgtttccgatatgcgttcctgcttctgcaccgtacagaatgtgttgaaaggttctactaacagccagctcacatttggtatatgttagctcttatctgttgtcacttggacgtttcattcttgaaagttaagcaattgttatgtttcacatatagttttatacaaagtagccagtcccggtaatgaaatgctgtattgccatagtggtcacacccaatgtggtccagtatctcaatggtgaggcagccagatctggtacagggctgctttgttgaaatgtgatgattttcatatgctttttttgttgtctttttttttttttttcctatggtggcaaaatgaggaagatgtagaatcggtagttattaaagtaactggtaataaaatttatttgtatacataagtttgtattgataggtgactagtggacttcaaacagtaagtatacggggacttataatgtg

SEQ ID NO: 588904 - DNA, 378 bp, Homo sapiens
ggccagcgaccgttccggcggccattgcgaaaacttgcccacggctactgcgtacacgtcgcggtcgcgttgggacttccttaaagcaagacggcaaggcgcccggaggtcgtaagtcaagtcttcccggcttaatccatgccgggttggagcctgctacacgcaggtcgcgcgcccaggtgctgggtcgactcgggacacggcctgggtgctgccctgggcccggggacacagaacacacatctgcgctttttgttgagaggtctacatagagagagtggtacatagtgggatgagcatctctctcaggacaatgtccaattcattaagcagttggtctcttatgagataaagcccatttagcaagtcactgtgtcc

SEQ ID NO: 588905 - DNA, 107 bp, Homo sapiens
acagtgtgtgccctgtcagctccgcaaattggcagtcactacgtttgtgccccctgtaaccttgtgatcttcactgccactagcgatgaagtcttcattatggcctc

SEQ ID NO: 588906 - DNA, 1715 bp, Homo sapiens
ggcgacggtcacctcggtttgggtgagtccctgggttcgagcccgggccccgccagctgccgagttgcctctcggtgccggactgtgactccctctggccggccctgcactctggcctcctgggacgtcatctggagggatagagccaggcctgggactccttttgggagagtttccgttcttctattccgtgctgtccggccaggacccctcagggacttctgtggggcaggggcgaatcatgcatggcctagatgaccccatgcctagaaaaaggcagtgcggggcggtggcggcgcgcacggccgagtgaagcagatagcgtccccggggctggagcccggtagcagggggaagatggaagagttgagtcaggccctggctagtagcttttctgtgtctcaagatctgaacagcacagctgccccacacccccgcctatcccagtacaagtccaagtacagttccttggagcagagtgagcgccgccggaggttactggaactgcagaaatccaagcggctggattatgtgaaccatgccagaagactggctgaagatgactggacagggatggagagtgaggaagaaaataagaaagatgatgaagaaatggacattgacactgtcaagaagttaccaaaacactatgctaatcaattgatgctttctgagtggttaattgacgttccttcagatttggggcaggaatggattgtggtcgtgtgccctgttggaaaaagagcccttatcgtggcctccaggggttctaccagtgcctacaccaagagtggctactgtgtcaacaggttttcttcacttctgccaggaggcaacaggcgaaactcaacagcaaaagactacaccattctagattgcatttacaatgaggtaaaccagacctactacgttctggatgtgatgtgctggcggggacaccctttttatgattgccagactgatttccgattctactggatgcattcaaagttaccagaagaagaaggactgggagagaaaaccaagcttaatccttttaaatttgtggggctaaagaacttcccttgcactcccgaaagcctgtgtgatgtgctatctatggatttcccttttgaggtagatggacttctcttctaccacaaacagacccactacagccccggaagcactcccttggtgggctggctgcgcccctacatggtgtcagatgtccttggtgtagctgtgccggctggcccgctgaccaccaagccagactatgctgggcaccagctccagcagattatggagcacaagaagagccagaaggaaggcatgaaggagaaactcacacacaaggcctctgagaatgggcactatgaattggagcacctgtctactcccaagttgaagggttcttcccatagcccagaccaccctggatgcctcatggagaattaaagagagaagcctccttaaggagccacaggatggtacctggccccaaaaggaatcctggagaggaggacagtgacaacaggtgacttcattctttagagtgaactttccaaacccagtccagctggaaacagcttatctataatctgaaatgctggctcaaacagttatggggaggttcccagattgcgtagcattcagattgatttgagcagctcctactgtgataagtgtatcccagatccacaatgtaaatatatgtgatttgtaagaaagaa

SEQ ID NO: 588907 - DNA, 1127 bp, Homo sapiens
agcggcagtcgggccgtgacttcgcgcgccgccagggtgtatcggtgtagctgcgcagcgtcgcgcgcgctacccgcgcccaggttcggcccccgtatgcgcgtactggacagcccggcgcccatctttcatcgcagtcgccatgggccgcgagcctgcgagtgccggtgccgcggccgggtactgcttgctcctcgcgcttgcgctgtgctctctgctgaccacggcgccctgtccctgggctgcgaaggagccttgacagcacactgtggctgcgggactgtacaacagctcttagcctccacttatgaaccgtctaatacacatctcctcgcagcgctggcatcccatccccgaccagcttcgaacatgctgtatcggcagtgcacccggcctgtgctccgctggatgtcctgtgcatatcgcgcccacacacaagtcgactatccaggttgctccaggaaagccccaagcgcctgcgtgacatgcggctgatgcaattgtgtacaagcctggggacactgctaacgcaccgctgacgctccagtgactaattgctggtcacgaccccctctctgtgcacaccacacaacctcggttggcgtcttggagcgccgctgatccgcaacacggggcctacactgcgcaacggccttcccgtttccttggcacacggtaacccccaacgctcatctagcttaaccccttaacacggccaacggggctttgccttaccggcctgggggccccttctcgcgggcaccgcctaacttcacaccttgtgtacgacgcaactttcggacgtttaaccccaacgcacaatcaagcgtctcaggctgccgcccctgggccccagcgacaacaaaaaccccctggcggagagggcggccagccttacactacgggctcagagagccaaagcgcacaagcttcgcgacgcgcggcgcacgtcctaagcgtcgtcctcccattagtggtcccttacccttgaccaactggtgaactctctcaactagcatttccacaacgcacttgcgcgctccaccttccgcaagcccgcaggtcactacgcgccatgtggctcacacgtcacgatcggccacagcttgggcgtgtactaaggacta

SEQ ID NO: 588908 - DNA, 1687 bp, Homo sapiens
  misc_feature (286)..(286): n is a, c, g, or t
agcggaaggcccgggaagatctgcgggaggcggcagggcccagggcgttgaatgcccggccacaagatcagcctcctcccattggcgaaaggagccccgaagagcttgtgttcaggagggaggcctcggcctggtcaagtcatctagcaggaagagtcccggacagtgcaaagcaaatgcaagaagaccccctccctagccgatgggaaatgccccagccgttgaaggcggaaataacggcctgtaggcaacggaactcccagcgttcgcaaaggagcggaggagncggaaactcagggcgcgaggcctgtgggcccagcggggggaagatggaagagttgagtcaggccctggctagtagcttttctgtgtctcaagatctgaacagcacagctgccccacacccccgcctatcccagtacaagtccaagtacagttccttggagcagagtgagcgccgccggaggttactggaactgcagaaatccaagcggctggattatgtgaaccatgccagaagactggctgaagatgactggacagggatggagagtgaggaagaaaataagaaagatgatgaagaaatggacattgacactgtcaagaagttaccaaaacactatgctaatcaattgatgctttctgagtggttaattgacgttccttcagatttggggcaggaatggattgtggtcgtgtgccctgttggaaaaagagcccttatcgtggcctccaggggttctaccagtgcctacaccaagagtggctactgtgtcaacaggttttcttcacttctgccaggaggcaacaggcgaaactcaacagcaaaagactacaccattctagattgcatttacaatgaggtaaaccagacctactacgttctggatgtgatgtgctggcggggacaccctttttatgattgccagactgatttccgattctactggatgcattcaaagttaccagaagaagaaggactgggagagaaaaccaagcttaatccttttaaatttgtggggctaaagaacttcccttgcactcccgaaagcctgtgtgatgtgctatctatggatttcccttttgaggtagatggacttctcttctaccacaaacagacccactacagccccggaagcactcccttggtgggctggctgcgcccctacatggtgtcagatgtccttggtgtagctgtgccggctggcccgctgaccaccaagccagactatgctgggcaccagctccagcagattatggagcacaagaagagccagaaggaaggcatgaaggagaaactcacacacaaggcctctgagaatgggcactatgaattggagcacctgtctactcccaagttgaagggttcttcccatagcccagaccaccctggatgcctcatggagaattaaagagagaagcctccttaaggagccacaggatggtacctggccccaaaaggaatcctggagaggaggacagtgacaacaggtgacttcattctttagagtgaactttccaaacccagtccagctggaaacagcttatctataatctgaaatgctggctcaaacagttatggggaggttcccagattgcgtagcattcagattgatttgagcagctcctactgtgataagtgtatcccagatccacaatgtaaatatatgtgatttgtaagaaagaa

SEQ ID NO: 588909 - DNA, 1405 bp, Homo sapiens
actctagaggttcccctcgaattcgacggtttctcgtgttggggaagatggaagagttgagtcaggccctggctagtagcttttctgtgtctcaagatctgaacagcacagctgccccacacccccgcctatcccagtacaagtccaagtacagttccttggagcagagtgagcgccgccggaggttactggaactgcagaaatccaagcggctggattatgtgaaccatgccagaagactggctgaagatgactggacagggatggagagtgaggaagaaaataagaaagatgatgaagaaatggacattgacactgtcaagaagttaccaaaacactatgctaatcaattgatgctttctgagtggttaattgacgttccttcagatttggggcaggaatggattgtggtcgtgtgccctgttggaaaaagagcccttatcgtggcctccaggggttctaccagtgcctacaccaagagtggctactgtgtcaacaggttttcttcacttctgccaggaggcaacaggcgaaactcaacagcaaaagactacaccattctagattgcatttacaatgaggtaaaccagacctactacgttctggatgtgatgtgctggcggggacaccctttttatgattgccagactgatttccgattctactggatgcattcaaagttaccagaagaagaaggactgggagagaaaaccaagcttaatccttttaaatttgtggggctaaagaacttcccttgcactcccgaaagcctgtgtgatgtgctatctatggatttcccttttgaggtagatggacttctcttctaccacaaacagacccactacagccccggaagcactcccttggtgggctggctgcgcccctacatggtgtcagatgtccttggtgtagctgtgccggctggcccgctgaccaccaagccagactatgctgggcaccagctccagcagattatggagcacaagaagagccagaaggaaggcatgaaggagaaactcacacacaaggcctctgagaatgggcactatgaattggagcacctgtctactcccaagttgaagggttcttcccatagcccagaccaccctggatgcctcatggagaattaaagagagaagcctccttaaggagccacaggatggtacctggccccaaaaggaatcctggagaggaggacagtgacaacaggtgacttcattctttagagtgaactttccaaacccagtccagctggaaacagcttatctataatctgaaatgctggctcaaacagttatggggaggttcccagattgcgtagcattcagattgatttgagcagctcctactgtgataagtgtatcccagatccacaatgtaaatatatgtgatttgtaagaaagaa

SEQ ID NO: 588910 - DNA, 152 bp, Homo sapiens
aggagggctacacgcgctggaccaggaagaaaggcagacttaacagtttatctgctttttctttctgctttcccctgctcctgccagcctgactccacttcccttgttaggaccacacacatagtgaccttgaagtcccagcaacctcacca

SEQ ID NO: 588911 - DNA, 1078 bp, Homo sapiens
ggtgtgttgttagccgggttgttcctgctgtggcgcgcgtgggcgctcccgggtgggcctgccgcgttgtagatcttgggggcattgggtttcggggaccccgccgcggggagtattccttggggcttgtatctgcggcgggagggttctctggtaggttgtcggggcacctccatgtggcgaggcctgctggtggcgtcggtgctcaccgcggtgtgcagggctctctccggcatggccgtggccgtgggcgtctctctgcgcctacagctgcgcggcgtcttgtgttggcccgcgcgtgtctgcagtggaggagtatgcatcctattctggctgcggtggttctagttgctctcgtccgaacagtccatctggggctacataagcttgcgggggggcgcgtttcaacttgtcggccgggaagcttctcttgctcgcagcagtaagtagcatggcgtagcgcttttgcaggttctaagacgcgggagcaacggccttaggtactcctcgaaactcttggggggttgcagtgccgtcccgcggtcgttgctcctcagatggatactagaatgggggcgacgctgcctgttgaccatcgcgggaagttcgcatgtgcgtcttatcgtgtagatgtgccacatcaacgacacggtctgagcggagagttttcgagcatctctgtacggagcacatcgcagtcttatctttgtctcgccctttctcagcgatgaaggatgtcttgatgcgcgacagcgtgtggtgagtatagatgcgctgctccgaggctagacattcctgcctggagggacacgcgccctcctcgtccctcttgatgaatttagaccccagctttctctccaccctacttgggccagattgcgcttgttacctcaccacacacacacacacacacacacacacacagacacacagacacatacgcacatacgtgcacacatgtacaacatcggatacacacacatacacaccacacacacactgcatatctgtgccgcgcccctcgcactggtctcacttggcaccttcttcaggattttatattgaagagttttactat

SEQ ID NO: 588912 - DNA, 705 bp, Homo sapiens
ggcgcatgcgcgtgaaggctgccgtggaccagaacatgtcctgtccttgtagagtaaaagcttccatgggagccttccttcctaatcaagatgcaaataatagggcactcgcgaaacagacacgtaaaaacgagctctcatctccaaagaaacccagtgctgtgtatcaccagtattgaggacaattagatgctggggaacaacgtttaaatgacatggaaggccttccaggccagccagtggatctcttgtggacccattacctttgcatttcttccatcagatgggatcacctcccacccctgagggtccccaaagacttggaaccagttcttcagtgatccttaccagaaagacaccctctccaaacaaaggcagcatttatatacagtccatgggctctctaggaaacaccagaattatcagtgacagacatatttcaattggctcacgggcctacttgtaaaagcatatttctatggcttgagagtaaaacctctagaaaccgagtcctgttttctggtacacaaggatggtccctttagagtcattgagaacacacaaaactacaatatttcatgcagggggactatcctgaaagttcttgaaaaaagaagaaaccctgaaagatgccttctggtgtggtgggaataaccaatgattgatctttaccccaagagaactcgtggcaatttggtctttgga

SEQ ID NO: 588913 - DNA, 800 bp, Homo sapiens
atagccggggcgtgtcccgaaattcgggactccccgggcaatgtatttgagaaacaaactttgcgttataggtcggggccacccccccaaacaccacgctgtcccttaggggagaattttacagggcaggttcccacaaggaaaaaactcagggaacgggccaccgatgacgaaaagctgggtggagctggcccatcctttctagagaacccccctctcccacggtaggggcgcccctggtgccgggtcgcatggacgcaagaccgtcctgttcgcgacagccacaagtggagaagccccccacctgccggcgaagaaggtgcgacagcgcgtggacccggaccacggacccagatatgtgttataaaagccctctgcccccacctttctctcaaacaaatgtcgagatacacttccagttaaatattcaggtagtcgcccttgtcaaactacccggagagttctcccccgagcactttttttaaagggctttctcccccgcggatttcagtaaaaacgggcagctccacggttgctgacgaggccgaagattccccaggagtgtgtccagcgtacagtgagagccagcgacgacatcttctgctgtgatcttcaacgctcaagcgatgtcgtgactgtctttcggcgatgccgctccagcgagtctctctattctatgtctgcgcggaataagatctaactgtgcgcccgctccaatcgagatcgaggtctgagacccatgcctcttggtaacaagaagaaccacgaggagatatgtttctacaaacaaacataacaca

SEQ ID NO: 588914 - DNA, 1468 bp, Homo sapiens
ggactctggctacttaaataggaatcaagccaggtccctaccattgctcagcccgcagccgagtgggaaagaagctcgcaaaagcagcaaacaggcagtaatcggggaagatggaagagttgagtcaggccctggctagtagcttttctgtgtctcaagatctgaacagcacagctgccccacacccccgcctatcccagtacaagtccaagtacagttccttggagcagagtgagcgccgccggaggttactggaactgcagaaatccaagcggctggattatgtgaaccatgccagaagactggctgaagatgactggacagggatggagagtgaggaagaaaataagaaagatgatgaagaaatggacattgacactgtcaagaagttaccaaaacactatgctaatcaattgatgctttctgagtggttaattgacgttccttcagatttggggcaggaatggattgtggtcgtgtgccctgttggaaaaagagcccttatcgtggcctccaggggttctaccagtgcctacaccaagagtggctactgtgtcaacaggttttcttcacttctgccaggaggcaacaggcgaaactcaacagcaaaagactacaccattctagattgcatttacaatgaggtaaaccagacctactacgttctggatgtgatgtgctggcggggacaccctttttatgattgccagactgatttccgattctactggatgcattcaaagttaccagaagaagaaggactgggagagaaaaccaagcttaatccttttaaatttgtggggctaaagaacttcccttgcactcccgaaagcctgtgtgatgtgctatctatggatttcccttttgaggtagatggacttctcttctaccacaaacagacccactacagccccggaagcactcccttggtgggctggctgcgcccctacatggtgtcagatgtccttggtgtagctgtgccggctggcccgctgaccaccaagccagactatgctgggcaccagctccagcagattatggagcacaagaagagccagaaggaaggcatgaaggagaaactcacacacaaggcctctgagaatgggcactatgaattggagcacctgtctactcccaagttgaagggttcttcccatagcccagaccaccctggatgcctcatggagaattaaagagagaagcctccttaaggagccacaggatggtacctggccccaaaaggaatcctggagaggaggacagtgacaacaggtgacttcattctttagagtgaactttccaaacccagtccagctggaaacagcttatctataatctgaaatgctggctcaaacagttatggggaggttcccagattgcgtagcattcagattgatttgagcagctcctactgtgataagtgtatcccagatccacaatgtaaatatatgtgatttgtaagaaagaa

SEQ ID NO: 588915 - DNA, 1962 bp, Homo sapiens
  misc_feature (286)..(286): n is a, c, g, or t
  misc_feature (1805)..(1805): n is a, c, g, or t
agcggaaggcccgggaagatctgcgggaggcggcagggcccagggcgttgaatgcccggccacaagatcagcctcctcccattggcgaaaggagccccgaagagcttgtgttcaggagggaggcctcggcctggtcaagtcatctagcaggaagagtcccggacagtgcaaagcaaatgcaagaagaccccctccctagccgatgggaaatgccccagccgttgaaggcggaaataacggcctgtaggcaacggaactcccagcgttcgcaaaggagcggaggagncggaaactcagggcgcgaggcctgtgggcccagcggtgaggcagcagctgggggcggggggagggcggacctagcttcccagggcaggtgattcgtcggccccggtggcggcggcgcgtgcgacggtcacctcggtttggggaagatggaagagttgagtcaggccctggctagtagcttttctgtgtctcaagatctgaacagcacagctgccccacacccccgcctatcccagtacaagtccaagtacagttccttggagcagagtgagcgccgccggaggttactggaactgcagaaatccaagcggctggattatgtgaaccatgccagaagactggctgaagatgactggacagggatggagagtgaggaagaaaataagaaagatgatgaagaaatggacattgacactgtcaagaagttaccaaaacactatgctaatcaattgatgctttctgagtggttaattgacgttccttcagatttggggcaggaatggattgtggtcgtgtgccctgttggaaaaagagcccttatcgtggcctccaggggttctaccagtgcctacaccaagagtggctactgtgtcaacaggttttcttcacttctgccaggaggcaacaggcgaaactcaacagcaaaagactacaccattctagattgcatttacaatgaggtaaaccagacctactacgttctggatgtgatgtgctggcggggacaccctttttatgattgccagactgatttccgattctactggatgcattcaaagttaccagaagaagaaggactgggagagaaaaccaagcttaatccttttaaatttgtggggctaaagaacttcccttgcactcccgaaagcctgtgtgatgtgctatctatggatttcccttttgaggtagatggacttctcttctaccacaaacagacccactacagccccggaagcactcccttggtgggctggctgcgcccctacatggtgtcagatgtccttggtgtagctgtgccggctggcccgctgaccaccaagccagactatgctgggcaccagctccagcagattatggagcacaagaagagccagaaggaaggcatgaaggagaaactcacacacaaggcctctgagaatgggcactatgaattggagcacctgtctactcccaagttgaagggttcttcccatagcccagaccaccctggatgcctcatggagaattaaagagagaagcctccttaaggagccacaggatggtacctggccccaaaaggaatcctggagaggaggacagtgacaacaggtgacttcattctttagagtgaactttccaaacccagtccagctggaaacagcttatctataatctgaaatgctggctcaaacagttatggggaggttcccagattgcgtagcattcagattgatttgagcagctcctactgtgataagtgtatcccagatccacaatgtaaatatatgtgatttgtaagaaagaaaaaaaaaaaaaaaaanaagtcgtttccgatgtcggggcgatcatgaattaattaagattgtcaccccccggaaatttcggaaccggggccggcggggggcggcccacttcctcattttatggaagggcggatttaaacattttggggtagtacatggggacaaaaccgggttc

SEQ ID NO: 588916 - DNA, 612 bp, Homo sapiens
  misc_feature (388)..(388): n is a, c, g, or t
  misc_feature (395)..(395): n is a, c, g, or t
gcagtaatccctcaattttaaaaaaggattgaaaattgctaaatgtctttctgtgcatatttttggtgtgaggagtcaaaagtattttatgaaaaggagaaagaacagccgtcgatttttagatgtagtcctgttggattttttatgcctcctcagataaccatgaaatgttgtataaaaaactaatgtgtttgatggatgttcaaggctagactattatacatggctctgaaatatctgacacaaagtgtaagacgagttgcatggcgacgctgcatgtttcatggttattgtatttttcagacaaatggtggactgaatttggaagagcttttcatgggaattttctggagctggtgccccctggcgaatttgcaaccggaagttnggaattngagtcagtatcaaaatcaggtttataattgtttgtaaatttggtactttcagaagtctagtatgttcaagggcgcacattgttctgcgactactatgttgtaatgacattaaaggactaagataatcttgtcagagatgctggaaacaaatgcattggtgtgatatggtttcgttgagaatagcaatgaagcatagaatggaaaattagtgatagta

SEQ ID NO: 588917 - DNA, 165 bp, Homo sapiens
acaagcctgcgactgagtttgagggggtagactctgagctcagctcacagcccctccttaagaagccattgctgtccatgctgagctcacacacactgaagctggcacgtatggagtctttgacagtgtctttgatctcctgcacatggctgctcaggaagctgt

SEQ ID NO: 588918 - DNA, 2489 bp, Homo sapiens
  misc_feature (286)..(286): n is a, c, g, or t
agcggaaggcccgggaagatctgcgggaggcggcagggcccagggcgttgaatgcccggccacaagatcagcctcctcccattggcgaaaggagccccgaagagcttgtgttcaggagggaggcctcggcctggtcaagtcatctagcaggaagagtcccggacagtgcaaagcaaatgcaagaagaccccctccctagccgatgggaaatgccccagccgttgaaggcggaaataacggcctgtaggcaacggaactcccagcgttcgcaaaggagcggaggagncggaaactcagggcgcgaggcctgtgggcccagcggtgaggcagcagctgggggcggggggagggcggacctagcttcccagggcaggtgattcgtcggccccggtggcggcggcgcgtgcgacggtcacctcggtttggggaagatggaagagttgagtcaggccctggctagtagcttttctgtgtctcaagatctgaacagcacagctgccccacacccccgcctatcccagtacaagtccaagtacagttccttggagcagagtgagcgccgccggaggttactggaactgcagaaatccaagcggctggattatgtgaaccatgccagaagactggctgaagatgactggacagggatggagagtgaggaagaaaataagaaagatgatgaagaaatggacattgacactgtcaagaagttaccaaaacactatgctaatcaattgatgctttctgagtggttaattgacgttccttcagatttggggcaggaatggattgtggtcgtgtgccctgttggaaaaagagcccttatcgtggcctccaggggttctaccagtgcctacaccaagagtggctactgtgtcaacaggttttcttcacttctgccaggaggcaacaggcgaaactcaacagcaaaagactacaccattctagattgcatttacaatgaggtaaaccagacctactacgttctggatgtgatgtgctggcggggacaccctttttatgattgccagactgatttccgattctactggatgcattcaaagttaccagaagaagaaggactgggagagaaaaccaagcttaatccttttaaatttgtggggctaaagaacttcccttgcactcccgaaagcctgtgtgatgtgctatctatggatttcccttttgaggtagatggacttctcttctaccacaaacagacccactacagccccggaagcactcccttggtgggctggctgcgcccctacatggtgtcagatgtccttggtgtagctgtgccggctggcccgctgaccaccaagccagactatgctgggcaccagctccagcagattatggagcacaagaagagccagaaggaaggcatgaaggagaaactcacacacaaggcctctgagaatgggcactatgaattggagcacctgtctactcccaagttgaagggttcttcccatagcccagaccaccctggatgcctcatggagaattaaagagagaagcctccttaaggagccacaggatggtacctggccccaaaaggaatcctggagaggaggacagtgacaacaggtgacttcattctttagagtgaactttccaaacccagtccagctggaaacagcttatctataatctgaaatgctggctcaaacagttatggggaggttcccagattgcgtagcattcagattgatttgagcagctcctactgtgataagtgtatcccagatccacaatgtaaatatatgtgatttgtaagaaagaactggttgtggttcttaagctttagatagccatgaatctccccttcccatctcagtcccctgggctacttcaaccatggctgttcaagtcttggcccatttcactctttttagtactcaaagattctgctgagtttccagttgctgctgccgccgaaaggttttaccaggaactgcaattctgggtatttgaatatgttccctcttctgagaagacaagtgtgattttcttggtttagacattgccagagataaaatgcaaatgtagttcattcactccttcagcaaacatttgtgcctaccaggagataagcttgtcctaggcccctgccaagtagaggggttatggaggtggacagtacttagtccctgcccttgaggagctcacactcctgtgagaaaagaagcccaccaggacagttgggagaagaggctggagagagatagcaggttttagatttgtgtcatggatgaaaggagctaagaaagaactttgagcaggcaaggtctcttgagattgtgaactggaggtctttggcagctgtgagaatggcagatgtgttggaaactgactaattagtttctgcttgtattcaggacatggatcccacttcctgtgggttcagtcaggtccaatattgcttcccatcttctaggactctgtcctggtacacagtacttacaattcctccagagctagtt

SEQ ID NO: 588919 - DNA, 533 bp, Homo sapiens
  misc_feature (33)..(33): n is a, c, g, or t
  misc_feature (57)..(57): n is a, c, g, or t
  misc_feature (295)..(295): n is a, c, g, or t
  misc_feature (461)..(461): n is a, c, g, or t
tggggttgggccttcgggcccaaggttgggggnaggctctgggcccgtttatttgcngtgtggggagccggttcccccgttgcattgccgggccctgtgggtgggtcggtgggccctagatttttggggggtcgcaagccactctgggcgcagggcccatttcttctttttttgggggcgttttaatgattccccttcccccaaactccagggaatggaggggggacccgccagccaaaacattccccccattcccgacccccctctcctcttctagcccatgcccttccccggnggagggagggagcagggagccctcactctccacgccccttgcttgcatctgtatatagtgtgagcagcaagtaacccttctcctccctcccccctcccccctcctcaatgtagtggccttggatatcctgtttgttaataaagacaattcaaccagctcccaccangcaggccgcatgtccttgctttctgtcagtactgtagactaggcagagagagcccccagggtggggaaaaaa

SEQ ID NO: 588920 - DNA, 961 bp, Homo sapiens
gctattctctacaaatcactgagacattcggaacacatatagctattatagcggcgcatgagctggagttctaggcatagctctaagcctgcttattcgaaccgagctgggccagacaggcaatcttctaggtaagcgaccatcgtctacaacgttatcgtccacagcccagtgcattgtaataatcttcttcataatagtagccatcataatcggaggcttggcaacgtgagtagttccgctaataatcggtgccccgatatggcgtttgccccgcataagacgaacataagcttctgactcttacctccctctctcctactcctggctcgcatctgctatagtggaggccggagcaggaacaggttgatgcagtctacgccatcccgttagcaggaacatactcacaaacctggagcctccgtagacctaaccatcttctccttacacctagcaggatgtctcctcgttatcttaggggccatcaattgtcatcaccaacgagattatcaatataaaacccccgtgacataagccaataccaaacgccccctcttcgtctgatccgtcctagtcacagcagtgctacgttctccgtatctctcccagtcctagctgctgtcatcactatactactaaaagaacggaaacttaaaacaacttgttcgacccgcccggaagagagaacccatttatagcaaacctattctgatgttccgctcacctggaagtaaatcttatactacagggttggataattcccatatggacttacgactcggaaaaaagaacatgtgtactagttgggcgaccatgaatcatgctccaggttgggggcacaccattttggtgatatagtaacggattccccacaataaggtcccggggagatatgggcacgaaaaatatggggtgaagaaacttcggggggtgaaaccaacacaagacacagggaggaaac

SEQ ID NO: 588921 - DNA, 697 bp, Homo sapiens
atattctagagcatccccttaacaggctgatgcagcatgacatggttcaaggtgtcgcagactatcaagcctatcatgcagtgccaggtcacgggtggaccagcatgtaccggatacccaatggagtggaccaagaaggtcatcacgaacatcgcctggtcgggctacgtctccagtgatcggaccatcacgaagtatgcacgggagatctggggtgtggagccctccgacctgcagatcccgccccccaacatcccccgggactaggcacaccctgccttggcgggaccagcgggcatttgttttcttgctgactttgcacctccttttttccccaaacactttgccagccactggtggtccctgcttttctgagtaccatgtttccaggaggggccatgggggtcagggtggtatagagagagcagggtaaggaaggaatgtgctagaagtgctcctagtttcttgtaaaggaagccagagttgacagtacaaagggtcgtggccagccctgcagcttcagcacctgccccacccagagtgggagtcaggtggagcacctgctgggctccccagaactttgcacacatcttgctatgtatagccgatgtcttagtgttagcctctgaatctgggtctggccagtggcatagtgaagctgggaatagtgttctgcagctctggctgccgcacggga

SEQ ID NO: 588922 - DNA, 1525 bp, Homo sapiens
  misc_feature (286)..(286): n is a, c, g, or t
agcggaaggcccgggaagatctgcgggaggcggcagggcccagggcgttgaatgcccggccacaagatcagcctcctcccattggcgaaaggagccccgaagagcttgtgttcaggagggaggcctcggcctggtcaagtcatctagcaggaagagtcccggacagtgcaaagcaaatgcaagaagaccccctccctagccgatgggaaatgccccagccgttgaaggcggaaataacggcctgtaggcaacggaactcccagcgttcgcaaaggagcggaggagncggaaactcagggcgcgaggcctgtgggcccagcggtgaggcagcagctgggggcggggggagggcggacctagcttcccagggcaggtgattcgtcggccccggtggcggcggcgcgtgcgacggtcacctcggtttggggaagatggaagagttgagtcaggccctggctagtagcttttctgtgtctcaagatctgaacagcacagctgccccacacccccgcctatcccagtacaagtccaagtacagttccttggagcagagtgagcgccgccggaggttactggaactgcagaaatccaagcggctggattatgtgaaccatgccagaagactggctgaagatgactggacagggatggagagtgaggaagaaaataagaaagatgatgaagaaatggacattgacactgtcaagaagttaccaaaacactatgctaatcaattgatgctttctgagtggttaattgacgttccttcagatttggggcaggaatggattgtggtcgtgtgccctgttggaaaaagagcccttatcgtggcctccaggggttctaccagtgcctacaccaagagtggctactgtgtcaacaggttttcttcacttctgccaggaggcaacaggcgaaactcaacagcaaaagactacaccattctagattgcatttacaatgaggtaaaccagacctactacgttctggatgtgatgtgctggcggggacaccctttttatgattgccagactgatttccgattctactggatgcattcaaagttaccagaagaagaaggactgggagagaaaaccaagcttaatcctgtaaggcctggtgttaggatcactgagttccttatggggagtagtgtggattggtctgttatctaaatataatcattatgtatgaaatgatcttttttgaggcagcatggtataaagggaagagtatcaatcatgtagatctgaattccatttttggcttttattattactaatttaacatcctatgttctcactcataattgggagctaagctatgaggatataaaggcataagaatgacacaatggactttgggaactctggggaagggtaagggggatgagggataattgggtgcagtgtacgctgcttgggtggtgggtgcaccaaatctcagaaatcaccacaaaagaacttattcatgtaaccaaacactacctcttccccaaaaacctattgaagtaataataactaaa

SEQ ID NO: 588923 - DNA, 533 bp, Homo sapiens
  misc_feature (33)..(33): n is a, c, g, or t
  misc_feature (57)..(57): n is a, c, g, or t
  misc_feature (295)..(295): n is a, c, g, or t
  misc_feature (461)..(461): n is a, c, g, or t
tggggttgggccttcgggcccaaggttgggggnaggctctgggcccgtttatttgcngtgtggggagccggttcccccgttgcattgccgggccctgtgggtgggtcggtgggccctagatttttggggggtcgcaagccactctgggcgcagggcccatttcttctttttttgggggcgttttaatgattccccttcccccaaactccagggaatggaggggggacccgccagccaaaacattccccccattcccgacccccctctcctcttctagcccatgcccttccccggnggagggagggagcagggagccctcactctccacgccccttgcttgcatctgtatatagtgtgagcagcaagtaacccttatcggggaggagaaaagaaaataaagcaatgtagtggccttggatatcctgtttgttaataaagacaattcaaccagctcccaccangcaggccgcatgtccttgctttctgtcagtactgtagactaggcagagagagcccccagggtggggaaaaaa

SEQ ID NO: 588924 - DNA, 900 bp, Homo sapiens
gtagtaaaatctgatggatatgcgtgagctggaacctcttcgagaatactagagaaacttggatcagaagaacagataagtgtatcttctagaacatgagttatgcccttgcttcatgtattgctagaagtattttcatggctattggtgatagaatagtgtatacaaattttaaatgaatgacaggatatgaagagataactcgctatggcgcatgtgtgctactggataaagttatcccaagaggtaagggtaggtgtgatagtgctccgaatgtaaggaatcttaaggataaggcgaatctttaagtattgtgtgacccactctggtggttatcacatagtacatacttggtatgtccatatgtgatggttagcctgtcagctctataaatttactgtattattcttttactcatttactcagtcatttctttacaagaaaatgattggaatcgtgtttaggtgacagcacaggtggacataaagaaatttccatcaataatcatgaataagtttccagaacaaattttcctaataacacaatccagatggttcaactctttgatgtaccgaataaaaaatgtatttgccagtatccttgagatttagaacatctgtgtcagttcagatacaatttagttcaagttgatggagcgtgatagataagatacgtctatttgacaaattatgatgggtaaaataatatatgacgtggggtggagcaccaggtatttaggactaatttggcttattggatggtaattattcacataaggggggggatacaaaatatgtttaggggccagaaagaacataaaaagtggggagacaacatatagtcgaaaaaaaaaatgcacgaagaaatggggagatagagaaaaaaagggatagaagcaaa

SEQ ID NO: 588925 - DNA, 259 bp, Homo sapiens
aatttgtgtgggttatgcctaacaatggaatatatgccggaggtattaacgctatcggctaactgctctttcgtgtttcttcctgacgtatggacggagtatgcccgacggtgtaaacccttattaccaaaccaaacaagctaatgaataagcatagtctttcaaagtaaatctcatacggggtttcttctaaaaagaatgtttgaggatatagctctgttcttaaatacagtatagtaccataacaccacacaattcc

SEQ ID NO: 588926 - DNA, 333 bp, Homo sapiens
cctcccttattcgaccaggcaactacaaacgcacgcgctatcgattgagctttgaagcaacgctgacagcctgctacttttgcactactactcttcttcactaagctgaaccaccaaccagcacgcaacaacgcaggcctttgcagcatctcatggcaatgcactcccaccattgccaacagcacttacaccagctttgacctgtgctacgctaaaacgcacaaactttaacggggacgctccttcaacacttacagcgcagtatgaatatcaatgccttggcttttctctttcttccttttgcgtcccagggcacatgcgcacgaactggct

SEQ ID NO: 588927 - DNA, 182 bp, Homo sapiens
gtgtgactccagaggattccatgttatcgcccaacactaggaacacccaaatgtctgtaatggtgaatggttaaagaacctatgggacatccataccatggaatacgatccagccataaaatggaacaaacctttcacacaggcaacaacttggaagaacctcaaggaaattatgctgagtg

SEQ ID NO: 588928 - DNA, 418 bp, Homo sapiens
ctggccccacctgtcggttgtctgtagaactgctattattcatcctatgtggcgtattgtggagtatgctaatcattttgcgtagctcgcggtttggtgggggtagtggaggggatgagttgtcctgctggctgtgatgtcccttgttaaatataagggggtagtgcgtggacaggtggtacttacccacgattctgtgccctgattatgcctggactttgatgctacacatgaccatgcttgggatgtctctagctggtctggggatagctggagcacttactcaagtggctggtgaaatgacacctcagaaggaatgagtgctatagagaggagagaggagtgtactgcccaggtctttgaccgatgtaattctcattcaattaaagttgccgtgttctggtcaagtggaatactc

SEQ ID NO: 588929 - DNA, 500 bp, Homo sapiens
cgacctagagatcctcagcactgagctggtcaggcactgagctctctccggaagtatccacgtaatgtctaactggcttaataaatgttgagctgggggaaggtaataaatacttacatgccttgcatttttaaattgactggattcatcattttaaattaattcacaagaaacctttcaaaattttatctttttaagtgtttcttccaaaacaacatttagtcattaattctgggcttttggcctattggaagcattgaaaagctgaatggaatccagaaaaagttctggagaatagaagcttccagcctttagggttcggtgacccgcctgtgggaaggatgcctgccatccctcccctctgtaggctcacactcctcttacttcttcctcttcctctttctcccacacacaaatgcgtgccatgctcctctgcccaggccttgggttaaaggcagcactaggccttccaccaagagacatgagtgaatgatcaggcc

SEQ ID NO: 588930 - DNA, 277 bp, Homo sapiens
gggctttatggaagagtggccaaaaaaagcctattcttaaagaagaaataagctaacatgtttggggttcgctcaaaaggcatgagggaggcttcccaaacatatgtaagaaggtactctggtcagatgagaccaaaattgagctttttggccatcaagaaaaatgctatgtctggtgcaaacccaacacctcatcaccccgagaacaccatccccatggagcatggagatggcagtatcatgctgtggggatgcttttcatcgacagggactggga

SEQ ID NO: 588931 - DNA, 289 bp, Homo sapiens
gatgtggaggggtcactgtggtcaagagcataggttctgaggcatatttcggtaaaatatataacaacatttttgattttgaccatttgtaagtatacagatcagtggcattggttacattcataatgcaatataacccactgtgcccggctgtggatttctgttgatgtggaaatatagttgttccagttccatttgttgaacagactcttctttctctgttgaatggatttgccttctgtgtcgatttttgacctaaggtctcttttgtctgatattagcagagcca

SEQ ID NO: 588932 - DNA, 438 bp, Homo sapiens
gcagtaggaggttttgacggcacaacatacttgaagaccattgaagttttcgatcctgatgcaaacacgtggaggttatatggcgggatgaactaccgtcggctagggggcggtgtaggagtgattaaaatgacacattgtgaatcccatatatggtgaccatgtagaagacagccttgtatacgctctgtattctggagagctttgactttggagctttgtacagcttgagaagacattagaacaaattttattctttgctggtgcctcaacatatggaaatacaaatccaatgaaaatacttcacctgcaagacgccacctttgcacaagaattttcagttctgtgcagaatatttatttggggttttaatttatctttttttgttgttgtttttgatcagtttgtaagtttgtatttttttttactatgcttcct

SEQ ID NO: 588933 - DNA, 428 bp, Homo sapiens
caggtattagtttatgaggatggtgaaaagaccaaaggaaaggactcactcacaattctgtccaacaataaatagagttgactgagatggcagtgtttttttccagctgaagttgctacctggctgggtgtggtggctcacgtctgtaagcctagcactttgggaggctgaggcaggtggatcacttgaggtcagaagctcgagaccaggctggccaacatgatgcaaccctgtctctactggaaatacaaaaaaaaaaaaagaaagaaaaaaattagctgggcgtggtggcagacacctgtaatcccagctacttgggaggctcaggcgggagaatcaatcgcttgaatccaggaggcataggttgcagtgagccgagattgcaccattgcactccagcctgggcaacaagagtgaaactctgtctc

SEQ ID NO: 588934 - DNA, 152 bp, Homo sapiens
ggtgactgcgggggcgcgatcactggatgtagcattcattagtgtactcctcgagagcgctcaggaagctgaccttgaagctctccagcacggccagcaggccttggtgaaggtcctcgagcgcgggcttggccttctccggtggacgtggt

SEQ ID NO: 588935 - DNA, 465 bp, Homo sapiens
  misc_feature (10)..(10): n is a, c, g, or t
caatgccaanggacactgaaagcttgtgtgcatatgcctattgaaggcattgtgtccagtgtttgccagagtgcattctaggtaccaaaactgtagattcagtgtgactgagattataaggagaaaggattacagttgctttgaagtgtcaatgccactgcactctgtaaacaagcatatagatgagagtggtgcctggtggcttgtagcagaccatatgctatcatgttgtaaggtactcagacgggcatttgcctagagtgggatgtatagatcagcatttaaaaagctgttaccaggttctcaattgtctcaaaagctgctatatgttgctacttagttgggttttactcatttgccccctatagactttatagaattaaaagtggttggtaatcatcaaacaccttacgttctacgataatcaaactcacagtggctgttcacacaaatagatatttcagc

SEQ ID NO: 588936 - DNA, 439 bp, Homo sapiens
  misc_feature (218)..(218): n is a, c, g, or t
  misc_feature (235)..(235): n is a, c, g, or t
  misc_feature (240)..(244): n is a, c, g, or t
  misc_feature (246)..(246): n is a, c, g, or t
  misc_feature (249)..(249): n is a, c, g, or t
  misc_feature (251)..(251): n is a, c, g, or t
  misc_feature (254)..(254): n is a, c, g, or t
  misc_feature (256)..(257): n is a, c, g, or t
  misc_feature (262)..(262): n is a, c, g, or t
  misc_feature (279)..(279): n is a, c, g, or t
  misc_feature (290)..(290): n is a, c, g, or t
  misc_feature (293)..(293): n is a, c, g, or t
  misc_feature (297)..(297): n is a, c, g, or t
  misc_feature (299)..(299): n is a, c, g, or t
  misc_feature (306)..(306): n is a, c, g, or t
  misc_feature (310)..(310): n is a, c, g, or t
  misc_feature (312)..(312): n is a, c, g, or t
  misc_feature (314)..(314): n is a, c, g, or t
  misc_feature (316)..(316): n is a, c, g, or t
  misc_feature (323)..(323): n is a, c, g, or t
  misc_feature (325)..(325): n is a, c, g, or t
  misc_feature (328)..(328): n is a, c, g, or t
  misc_feature (330)..(331): n is a, c, g, or t
  misc_feature (341)..(342): n is a, c, g, or t
  misc_feature (348)..(348): n is a, c, g, or t
  misc_feature (353)..(355): n is a, c, g, or t
  misc_feature (382)..(382): n is a, c, g, or t
  misc_feature (394)..(394): n is a, c, g, or t
  misc_feature (396)..(396): n is a, c, g, or t
  misc_feature (404)..(404): n is a, c, g, or t
  misc_feature (419)..(419): n is a, c, g, or t
  misc_feature (432)..(432): n is a, c, g, or t
aacggccaggccatccgggccaagtacaaggaggagtcagatagtgactgagccccggccagcccagcgaggcgacaagatgcctggatgctttccccggtgaccgtctgctgaccttcccctgttatattcagatttttcttacaagcagagatttcctgttcatttgtttacatatttttttaaaggaaaaccaaaactgagggtaaatttaaatntttagccaaatttattntcatnnnnncnacnanaananncattnaaaacaattttcaacanccaaatccttnttnacananaattcanatanancnanatttcantnatnannaaatttcacnnttttantacannnaattatttactttttattccttataancattcacttaancnatatcacnttaatccttaatacnatattccgcatcnatacatc

SEQ ID NO: 588937 - DNA, 118 bp, Homo sapiens
accctgtctgcagtgcctgtgggctctactacaagcttcacaagtattaagcagacccctggactatgaagaaggaaggcatccagaccagaaaccgaaaaatgtctagcacatccaa

SEQ ID NO: 588938 - DNA, 102 bp, Homo sapiens
tgtgtgattgaggatcggaaccgtaggcgggtggggtgttagtcagtatggaggtgaggtgagatgtgggtacgagtcgaatcgtatatgcatagctgttct

SEQ ID NO: 588939 - DNA, 392 bp, Homo sapiens
  misc_feature (3)..(3): n is a, c, g, or t
  misc_feature (5)..(5): n is a, c, g, or t
  misc_feature (16)..(20): n is a, c, g, or t
  misc_feature (27)..(28): n is a, c, g, or t
  misc_feature (30)..(31): n is a, c, g, or t
  misc_feature (35)..(37): n is a, c, g, or t
  misc_feature (40)..(40): n is a, c, g, or t
  misc_feature (47)..(47): n is a, c, g, or t
  misc_feature (60)..(60): n is a, c, g, or t
  misc_feature (64)..(64): n is a, c, g, or t
  misc_feature (69)..(69): n is a, c, g, or t
  misc_feature (74)..(74): n is a, c, g, or t
  misc_feature (78)..(78): n is a, c, g, or t
  misc_feature (81)..(81): n is a, c, g, or t
  misc_feature (85)..(86): n is a, c, g, or t
  misc_feature (90)..(90): n is a, c, g, or t
  misc_feature (92)..(92): n is a, c, g, or t
  misc_feature (94)..(94): n is a, c, g, or t
  misc_feature (107)..(107): n is a, c, g, or t
  misc_feature (110)..(110): n is a, c, g, or t
  misc_feature (112)..(113): n is a, c, g, or t
  misc_feature (121)..(121): n is a, c, g, or t
  misc_feature (133)..(133): n is a, c, g, or t
  misc_feature (151)..(152): n is a, c, g, or t
  misc_feature (154)..(154): n is a, c, g, or t
  misc_feature (159)..(159): n is a, c, g, or t
  misc_feature (179)..(179): n is a, c, g, or t
  misc_feature (183)..(184): n is a, c, g, or t
  misc_feature (193)..(193): n is a, c, g, or t
  misc_feature (205)..(205): n is a, c, g, or t
  misc_feature (239)..(239): n is a, c, g, or t
  misc_feature (252)..(252): n is a, c, g, or t
  misc_feature (261)..(261): n is a, c, g, or t
  misc_feature (265)..(265): n is a, c, g, or t
  misc_feature (268)..(268): n is a, c, g, or t
  misc_feature (276)..(276): n is a, c, g, or t
  misc_feature (278)..(278): n is a, c, g, or t
  misc_feature (283)..(283): n is a, c, g, or t
  misc_feature (300)..(300): n is a, c, g, or t
  misc_feature (313)..(313): n is a, c, g, or t
  misc_feature (317)..(317): n is a, c, g, or t
  misc_feature (320)..(320): n is a, c, g, or t
  misc_feature (323)..(324): n is a, c, g, or t
  misc_feature (326)..(327): n is a, c, g, or t
  misc_feature (352)..(352): n is a, c, g, or t
tananaaaaaaaaaannnnnggggggnnannaggnnnaantcaaganctacaaggggggncttngggcnccggngggnaanaggnngggnananggggggggggggnagngnngggggggnaaccagaaaggnacagacccagccgcccgnngnccagncccccagacggggggggcanaggnnagaccccgnggggccccgggnaccggccaccagcccttgggcgcccccgaaaaanaaaaaaaccaggnctgtggggncctnggncccaacangncaganaaaggggcccccaaggnccccggggggggnaganagnggnngnngccagggggggggggggaagggggngggggggcgggggggggggggggggggggggcggggcccg

SEQ ID NO: 588940 - DNA, 193 bp, Homo sapiens
catttatttaatcttctggccatgctcctgaggaaagctggtggccatcacactccccgtctgttaccgtgggccctgggccaaggcactgggacaagcgggcgatttgatatgttctggcacatggtgcagggcttgtcttgccaacggtgtcctggccctgtattacttggccagcttggcaatttccttt

SEQ ID NO: 588941 - DNA, 132 bp, Homo sapiens
atagagtggtcatgtgacgtgccgtccgtgtatgctgtggctacaaaaaatgttgagccgaagatgccgtcggaaatggtgaagggagactcgaagtactctcgagtgcttgtaggagggtaaatagcagac

SEQ ID NO: 588942 - DNA, 307 bp, Homo sapiens
  misc_feature (7)..(7): n is a, c, g, or t
  misc_feature (23)..(23): n is a, c, g, or t
  misc_feature (199)..(199): n is a, c, g, or t
gtttaangtaagttcatgatacnttgcattgtaggtagaaacaagtgactaaagggtgggcatagtggctcacagttataatcccagcactttgggaggctaaggcaggaggatcacttgagccctggagttcaagaccagtctgggctacatggtgagacctcgtctctacaaaaaatttaaaaattagctgggtgtngtggtttgcacctgtagtctcagctacttgggaggctgaggcaggaggtttgcctaagcctgggtggtcaaggctgcagtgaaccatggtcacgacagtgataactcc

SEQ ID NO: 588943 - DNA, 231 bp, Homo sapiens
  misc_feature (195)..(195): n is a, c, g, or t
cacgaggcggcacgaggcccgtcggccccccgtatcaccgcgatgccctcggccacctggggcgggctcaggatcacggtgccgatggccgcggtccagtggggcttgccgtcttgcccgtaggccagcacttccccgtcccgggtccccaccagcaccaggtcccccccggcgccgaccccgccggtgagcggntttccggtgtccacccgccacacggtttgcccactg

SEQ ID NO: 588944 - DNA, 335 bp, Homo sapiens
attgagcactcactttcctacaacttaaacgtatttaatgtgtgatataacacctcaaatattttactgcgggaatttctcagttcttcacttggggcacagataaaagtacttgggacctcattaagtataacagatgaaacagccagggttaggaatcaaacccccagtccctgaggattttgtaggatagagttgggatttaatgcattgttagtttggatggggaactttggtgattattttgaagatagccacaatgttgccttgaaagcgtgccggggttcattatgaatatgcattcctgctcaagttcatgggctctctgtggattg

SEQ ID NO: 588945 - DNA, 141 bp, Homo sapiens
gatcctgggcgcctttttttagtaggagtactacggccaggcaggtacagtggctcacctggctcactcttgtaatcccagcacgttgagagggtgaggcaggcagattgcttgaagccccaaagggagctttttgaagga

SEQ ID NO: 588946 - DNA, 256 bp, Homo sapiens
catctatcagatgcatggatatgcatcatgtctgacactccaataggtcacgtaaaggagaaacaatatgtaggggacaaagtgagttatgctgggtaatgaatatctacagtgtaaaatgaatacattgttcgaggaaaactcaatacataattcgcatagagataaatcatagttattatcaaattcaaattcaggctgggggcagtggctcatgcctgtaataccagcacattgggagtccaagtgcgtgtga

SEQ ID NO: 588947 - DNA, 321 bp, Homo sapiens
gcctgaacatttgggccctgattttgggcatcttcatgaccattttgctcatcatcatcccagtgttggttgtccaggcccaacgatagatcaggaggcatcatttaggccaggagcttctgcccgtgacctgtatcccacgtactctattttccattcctcgccctgcccccaaaggccaggagctttgcccttgacctgtattccacttactcccccttccattcctcgccctgtccccacaaccgagtcctgcatcagccctttatcctcacacgcttttttacaatggcattcaataaagtgtatatgtttttggaa

SEQ ID NO: 588948 - DNA, 361 bp, Homo sapiens
agcactcccactcgagattattagatctcaaccgtagagaatcacattaccccataaagcactcggctttaggcagagggaacccggctcatacgaaatagtatcgtatgagaaggataagttattatgaccacacgtagcatatggaggattatacgactataacttgtgcatagtggattaactactctgacctggttaaagctgacacgcgtacatgtcagttagcatatgtgaagagccatgtggtagcaggacagaatctagcgcgcctagcgatatgtggatgaacctgatagactagtaccaggactcttgcttgtccagagcaccctgtggataccctggcattcacctagtc

SEQ ID NO: 588949 - DNA, 430 bp, Homo sapiens
  misc_feature (412)..(412): n is a, c, g, or t
gcgggcacctgtaatcccagcctccacctcctgggttcaatcaattcttctgccaccacgcctggctaatttttttgtatttttagtagagacggggtttcaccatgctggccaggctggtctcgaactcctgacctcgtgacctgcctgcctcggcctcccaaagtgctggaattacagatatgagccaccgtgcctggcactaataatttttttttttttttttggagacagagttttgctctgtcgccaggctggagtgcagtggtgcgatctgggctcactgcaacctctgcctcccgggttcaagcgattctcctgcctcagcctaccgaaaagcagggattacaggcgcctgctgccatgcccggctaaatttttttggtatttttagtagagatgggggtttcancatgttgggccagcatgg

SEQ ID NO: 588950 - DNA, 1354 bp, Homo sapiens
  misc_feature (1354)..(1354): n is a, c, g, or t
agcggtgctgggtcgggccgacgtgtccacccacccggagtccggtgagtgcagccgcccgccctccgtgtagatctgcgtgccttggctggagaagttcgggaggggacaggaagggatggtgctgggccccgggcccgtcctccgtctcagtcgcctgcggaggtgctgcctcacgcctggaggcccccatctgaaccttcagataccgcgtcttgctgccccgtcatccccgtgacctccgaggcatgagttcgggagaacgcggttggttcttaggacacccactcacgctcgaggtcacttcggacacgagaagcggctggagcagaaccccatcactcgttccctggtctgggcgcaggccgcccatgactccgagctcctcagtgtggcccgccggggcccgtggacgggcctgcaaggcgttgtggccgctggccatcttacagctgacttcttctgtcagtccctttccagtgtttctagtctttcaacggcatgttggcgaatgagggccgcgttatgctttccccgaccttgttcaatcatcccatatacataaagtccactacatctgaaacatggtgcgcacaaagtgtctcgtgaggactctaccagggacctatgtgtgcaatttctactaagaatgggaaaagggcctctcatcccccacgaatagagcttccctacagtagcgagagcgaccggactccaagtgcacttcccttaccatgggttcaacgcgggacttgcccacgcactgtgggcctggttccgtgttgacagagcacttttaaccaatttcgggattcctcagcggtctgagggaggtccagggcacgggctgggtccccagaactagcggggggcatgcgcgtgcagagaaaggctacacggacccagccgcagcttgcgcagcgcctaggcgggaacacgcggaccggccagaggagccggtggacgagcactggcgatccctaggaattggtagacccgaacggagaaagagtcgggggcgcccccgtggaaaatttcgcgaaaccacaaaacccccacgcaacagaaactgtagcacacgcaaaagggatcgggggcacaacaccagatcgggggtgcccagcgggagaaacacctgagatcgagcacacagaggcagacgaatgaccccaaggggggcagcacagcaaccagcacaccccgcagaacacagacagaagagacaaaatagaagagagaaaggaaccacaaaacagaaacgagaggagaacgaccaagcagacgagcagagcaaccactagcccaagacaagcagacaaaaaagtgcgcagtcagtgccctgcaccagcagaan

SEQ ID NO: 588951 - DNA, 958 bp, Homo sapiens
cggcaaatgcttttttatgtaactgcatttgatcgggaccgagcaattgcaaagattacttgataccaacccagaaattcaaccagtctgattctcaagatagcagagtcgcacctagactgggctagaaaaaaacgtactgtgaaccgagaggagctgctgaaacaggcggagtctgtgatgcaggacctcggcagctcacgggccattgtacgaaatccagtatgaacaatgagcgttggtacaggtctcgggcctacactggcgtttaatgcgcttgtatctcaggaactacagagagctgacttgggtcttgggagcaggtgaagcaagtaactcttagcaatccacaagggagccaatgaagggaccaagtactattcaaaacctccagggcctgtcatgcgcttcccttgggtaggacagcaacagccaagctcatatcgcacagcgttcaagatgaagtttcgcttctaagcgaaaattcaatggcaaggctatcatggatctcagattggtggaccttccccttggcattacccttgtataaatgcgatgctacgcgcagaaacttcacctggcatcacacgaattggtcgacattcgaccagttgtagccagatcagttatcacctacgagacttggcagacctaacgcaaacagacttgcacaagattacattccaatgaaccacaagcgaagtttacagtctgccttaacacacctgtgctatataaatgggatggccaactttgaacatctagcagcggtatttacacacttgccaagggtattcccaacattcgacctctcatcacggccggcgaagcgataaacacaggacatttattccccagtctaagccgggctacttataccacggctgtaattcctgggaccaacaactcagctctctcaccaatctcataggtccaacgtaggcattactataccgtc

SEQ ID NO: 588952 - DNA, 248 bp, Homo sapiens
tggagagtggaggggattccgggaatatatctgtcgacgatgacatcctcagcgatcctcattctctctgttcattcagaaactctcccatcggcggtagacagtgaagtagttgttcaacaattacagttgcctagtaactacactaagaactataatttaaaatccgtgtcaaggacgcccctgtggggcctatggtgcagtgactcacgtcctgttaatccctagcacttacaggaggccgtagg

SEQ ID NO: 588953 - DNA, 422 bp, Homo sapiens
ttatgatgagatgactttactctcagaatacgtctcatgctcctatgttctgcattccctgcagcaaacacttcctatgctgtctgcttccctgtccactcatacaggaaagggcttcgatgttatagagtcactcttattgctcctgctaactgctgtcctgataacaatgggtcttttgcatgggaaaagcattatagagtgaaaggatcactgatagcagtcaaaaaaacacattttactatgtcttttaaaatctgtgggatcttagacaagtgacctatcccatgtgagcctgttttctcatctgattaaatggggttgttacttgctcggtgaatgcttgtgttgtcacccagtgaaataaactccagggaagtttagttagctttcccttctcaatttacctgcagatactgttt

SEQ ID NO: 588954 - DNA, 217 bp, Homo sapiens
cgtaatatgtacacaggttacatgtctagaatagaatccttcttctaatttatggaacaatcaaaaccagctaaaataacatttgggggtgcttcataaatggcttctgaggattaccaataaaaatattctttggtaatcctttcttggccacaaggctaccattcttacttatattaatcccaaaggaaagggttttcggttaccatattacggg

SEQ ID NO: 588955 - DNA, 444 bp, Homo sapiens
ggcattggaagatccacagctaacatgccaggtcccctggcagcctagaaatggtgagagtgccgggtccgacatcccgagaaggggaaggggctgattggaaccggtgggaagtggctgtggcgggactccggcctccccgcagtcagctccacaatctgcgcctggagttctttcccatctcggcctcagtctccttcagccataagatggcgaatgcgctgactgcgggaccctgggcgacctgtctcctccatgcgctgtgactgtgccctggcctggagccctctctgggccgctctgcacaccgcatggccgcgtctctccgagattgtgcagggaccacgggaggggcgtcaggggagaatcctgatcttcggatgcgggttcatgaatgggaagagctttggtccagtgaggtttccagtccctcttttcttctgt

SEQ ID NO: 588956 - DNA, 381 bp, Homo sapiens
gatgacatgatacgatcgagctcggtcctcttgtgacacatgatatgctgaggtgatgaatactccattctccgtaatgtgattattacatatgaatacctgtatcaacatattacatgtaccccataaatatatacacctataatataccctcaaaaattaatttttttttttggagatggagtctggcggtcacccaggctggagtgcaggggtgcgatcgcaactcacggtaacctcggcctcccaagttcaagagattctccggcctcagccttctgagtagctgagattcacaggcacgtgccaccacacccagctaattttggtattttaagtagacatggggtttcatcggctatggaaacttctaaaactagg

SEQ ID NO: 588957 - DNA, 130 bp, Homo sapiens
  misc_feature (58)..(59): n is a, c, g, or t
tcgaagagacctcaatcaccgtttttcaggatgtttgatcacaatacgaagatgacgnnatccaatttcagaacaccacagggcactggcacacagaggggattattacagaaccactgagatgacattt

SEQ ID NO: 588958 - DNA, 494 bp, Homo sapiens
tgtactcgagtcgttataggcgaagatgatgaagcgggccccgggacggaggaattctaataaacggcagacctgtttagagctcatgactgttaaaattccgcaaacctgtcggctccttgtggcacatctaaaatagatttgattctaatggctaacaatcagtatacactgcttggacctggtctagtgattacgcacgctagaacggacggggaccgactggggccctccttgagacgactgtgatcagacctctcgtacgaccggactgtgaagttggacaccaacgcatcttaccctatcgtggtggaacttttggtaactgtaccactaggggaccctgaccaaccacttttgacaaccccagacttagaactactaaacgctccaccaaaactctttggtgggactgtactggcaacaacgtctcactgggagacacgttggcttattaaaacggcagtaatggactttggcaccacaagaacagt

SEQ ID NO: 588959 - DNA, 162 bp, Homo sapiens
tatagcgctagttcacgagtactgggtagtactattgaccagcgatgggggcttcgacatgggcttagggagtcatacgtggagtccgtaaagaggtatctttagctataaacagctattgtgtaagctagtcatattaagttgtcggctcaggagtttgac

SEQ ID NO: 588960 - DNA, 686 bp, Homo sapiens
taattgatgttgtattaagccacttatttgtggtgatatggttacaacaatagtggaaaataatcagttcccaaatgggagcatgaaataagagtacaaaataaaaattttccatacatgataataaaagaaatcttattttgcatctgagaaaactagaacctctactatttacaccttcttattaatgatacacaagtatggccgggctccgtggatcacacctgtaaacccagcactttggaaggctgagggaggtggatcctcctaagctcaggagtccaaaaccagcctgagcaacatggtgcaaccccatctccaccaaaaaatacaaaaaattagctgggcgtcatggcatgtgcctgtggtcccagctacttgggaagctgtggtaggaggatcacttgagcctgggaggcagaggttgcagtgagcagagattgtgcccatgcactccaaccttggtgacagtgtgaaactctgtttcaaaaaaaaaaaaaaaatattgcttgtgtttggttcctttaaaccattttccaattatcgataccacaggctaaatttgattaaccagggtgatctcacttggcccgattataaagtaattttctagggcaattataaacgattacactcccagaaaaatgtactcctcaaaggtccaccaatcatcttcatttatcaag

SEQ ID NO: 588961 - DNA, 468 bp, Homo sapiens
  misc_feature (354)..(354): n is a, c, g, or t
  misc_feature (362)..(362): n is a, c, g, or t
  misc_feature (375)..(375): n is a, c, g, or t
  misc_feature (396)..(396): n is a, c, g, or t
  misc_feature (420)..(420): n is a, c, g, or t
  misc_feature (445)..(445): n is a, c, g, or t
  misc_feature (453)..(453): n is a, c, g, or t
tgatatggagtctcaccctgtcacccaggctggagtacaatggcgtgatctcagcttactgaaacctgtctcccaggttcaagtgattctcctgcctcagcctcccaagtagctgggattacaggtgtgtaccaccatgcctggctaattttttgtatctttagtagagatgaggttttgccatgttgcccaggctggtcttgaactcctgggctcaagagatccacccactcagcctcccaaagtgctaggattacaggcatgggccactacacccagccagtaattctttttgtaagtattattctactttatgcgtactacttatggaccagaatttcagaagggcaagtnaccccctngcagcatatgctnaattaaatctttccttggatnagtgtattttttttttttttgagntaggggttttaactctgttggcccngggtggantttagtgggcaaaat

SEQ ID NO: 588962 - DNA, 236 bp, Homo sapiens
aaaccactagcaccttcaactggtaaatccagtcaagtaaggcaaactacaaggggctacgccactaactggaaggcacaggaaggatcgcagaaggaggaccaacaaggctgtccttagccttcactatagcaaaaatcattttgaaggcacctcatacagattccagtgcgttaccacgaagagcattgaagctcgaggtctagaagactgcaggctcgatcatgccttcatat

SEQ ID NO: 588963 - DNA, 183 bp, Homo sapiens
actcgcagggagctactgtagaaggtggtagatttctcactcaggcctgctgttgtggtactgccaggtaacgctgttgtttcagatgagcctgaactgatgcgtgacattgtagattctccaccacgtgctgatgttgcagagccagatgagaagagtgctgcactagcagcacctgtgctg

SEQ ID NO: 588964 - DNA, 103 bp, Homo sapiens
aacttgcttatgcggtcgatctagaggctcccctgttcagaatctaatcaacccacagactcactagaaataacaaattattgttttaagccacgaggttttg

SEQ ID NO: 588965 - DNA, 299 bp, Homo sapiens
tagaggatccgcaaacaccgcaatctgttattttttaaccccacaatccaggttaaactgagctatttttaatgcccagagtaatttctaatatttcccactgccaaacagaaattggagaaaggggactcccaagaagtcggggggcttatacagactcttcttagaagtctacttttcttccctgtggtaactattcaaggcccaaaagtggaggaaccttttaggaagtatgggggaaaagaagattaaccttctggaaatttaagaccttaacttggattccaggtggttccacc

SEQ ID NO: 588966 - DNA, 118 bp, Homo sapiens
ttttgttttttttaaaaatgaaataaagacccagggggaaaatgggtgttgtatggggaggcaagtgtggggggtccttttcccccccccctttgtccctttgcaaatatattttgga

SEQ ID NO: 588967 - DNA, 525 bp, Homo sapiens
gctctgggccttggccctgattatcatcagggggatggtacagatatgcaaaggagagtagttctggctggagccaaagaaggcattggagaacttccaggaacctgacatcggcctcgtcgcacgggctttccttcagggctccttggcctatggaggctggaactttctgaattacgtgactgaggagctggtggatccctacaagaaccttcccagagccatcttcatctccatcccacgggtcacattggtgtatgtcttggccaatgtcgcttatgtcacggcaaggtccccccaggagcggctggcatccaacgccgtcgctgtgactttgggagagaagctcctaggagtcatggccgggatcatgcccatttctgtggcccggtccacattgggaggagtaaaggggtctctcttcacctcctctcggcggttcttcgctggagcccgagagggcaccttcccagtgtgtgggccatgatccacgtgaagcgctgaccccattcccagtgtgctcag

SEQ ID NO: 588968 - DNA, 399 bp, Homo sapiens
tgcgcagcctccttccctcgtaacctcttgttatcatctaaagtaattctagttgttatttttgtatgctgttttggttaacacactcctttttaaatattctgaatcccaagtaggacgatgaccattcataagttcagtacgacacgttttagacttgcggtttatatgatggatgtgcttattctcttggcattttgttttgcaattttattgttttcttgccggttttgttttttattattattatttttttaatggataagtgtttcttctttggaaaaaagaaataagatacctgctaagacaattagctgatggccatatgtaaatgacttgctaaaaaaaggaaaaaactgcctgttaatgtcacttctattccaaacgcgcttcaaggca

SEQ ID NO: 588969 - DNA, 241 bp, Homo sapiens
tgaagtatttactgtcgttgccagctgaggaacatgatgtgtggcgagtttaggcaccgggatgccactggaaaactggttcatgctacaggatttctccaaaatgccattgtacaactttgcttgccggactagcagatcatactcttcagtttctgtcagacctacaccagtcgggcagaaccccacaggacacatacacagttacaggcgaatcccctcgggaggaatcctctagggg

SEQ ID NO: 588970 - DNA, 407 bp, Homo sapiens
tcagatatgattatcgccaactagcgaacccactgtgtgagtatagctcatgtactcggagactccacgagcgcgcagactcacgagcacgctagcatgcatgcatattcagaggaaactgttgtgacacaggagatgttgactggtcaactccttctccactgagtctgcattcctcgcccttccagcagcttgcgggaagtgggcggatctccacgtcccagggcaggcttgggtgtccatagagcccctggtactcacggcaggcagccggggccattgtcctgcttgtgctttctgcaggggcctcctccagctcgggccagcttgttcctgtgcatccttgaggggccagctccccacgctgctcggaatccgcaatggcgttctgcagattggcgcactga

SEQ ID NO: 588971 - DNA, 199 bp, Homo sapiens
cgaatctataggatcccgttcaggcatcaagccactgcttaatatttaagcaatcactttatatgtgtgtcgaagagttggtttagtatgtcatgtctgggtacaagcagatgcagtataaactcacaaacacagatttgaaaataatgcacatatggtgttcaaatttgaacctttctcatggattttcgtggtgtgg

SEQ ID NO: 588972 - DNA, 194 bp, Homo sapiens
tttgttgatggagatgaagctctcgttcaggcgtgacgagttgcggttcagcggcggcacccacatctgcaccttgaccgggtacttggtgcttgccacgaactcgaccttggcgtcgatgttccacaggtcggcgacttcatcctcggtcaccgcgaagccgatgaagaagatctgataagccgcgaccgcca

SEQ ID NO: 588973 - DNA, 348 bp, Homo sapiens
ggaatcgtgatgctgaggtgatctagaggatcccagtcgacggagactctcttcagtcctcctcagcctgctgtaagcctagcagctccttcgtctagacagagctcctctcaccctgatgcacctgtctccctaaaatagtatctgatattcatgatacccataatgtggcctcaaacggtcgtaacaatcttatctgcaactagtgctgctggatctctacctttgcagttgcgttctaagtgcgttactcgtattgatgcacccaaatcgcatttagagttctgcttcctgtggggctcgtctcatgatctgctctcttttggagggccacccccaaaagagagt

SEQ ID NO: 588974 - DNA, 626 bp, Homo sapiens
ggatgcgatgtggttgcctatggattgagtatggaaccgtgtgctatgaccttgcactcattcgcgctcacgtcaattgaagcagctggagaggggacgctgacccctggaggctcgtgcgggacagcatggagggccggcgcgacagcatgctagagatggccaagcactgttacacaatcagaagcccgctgcgagggctgatgggtgacgaggaggagtggctcatccacgtacatgcctggagcataggtgtgctgagaaagctagcagcagcctaccctatccgctttacttgctgcaatctacaggctaggctggtcactaccttgcgacgtaggagtgcatgccctgtttaccctcgaagaaagatccactatcactaagccacctgagctgggccatggtaggccctggaggtgacatccatgctggcccagggctggggaagcccgggcaggggcagcgcctggatatctgttatctccctggcgcgagtgatggctcaaggttccagtgaccgtccttcaacctgccgcaaacttatctgtgttggagcagcttcagtgtgcaattgaattgaaatacatcatttcctctcttttagagaaaagaaaagagaaaaa

SEQ ID NO: 588975 - DNA, 313 bp, Homo sapiens
  misc_feature (294)..(294): n is a, c, g, or t
gcgcctggcttattattccttttttttaaaaaaaactttttttggggggcaggaccatgggatctcgctttgtcgcccagctggggcgacagagcgagactccatctccaaaaaaaaaaaaaaaatagggccagcctggccaacatgacaaaaccaaaccctgtctctactaaaaatataaaaattagccaatcccagctactggggaggctgaggcgggggaatcccttgaacctgagaggcgaaggttgaagtgagcccagatggtgccattgtgctccagcctgggtgacncagtgagactctgtctcaa

SEQ ID NO: 588976 - DNA, 438 bp, Homo sapiens
  misc_feature (41)..(41): n is a, c, g, or t
  misc_feature (59)..(59): n is a, c, g, or t
ctgtgtgaaacctggtgaacgcctaggggccctcatgttantggaaatcaccacagttncctcccccttttgtgactggcctgaatttccatgtacccataatgtccctcaaggttcaccccacatgacatgttacatccttcccttttaaggctgaatcaggctgggtgcagtgactcatgcctgtaagccgagcactttgggaggctgagacgggtggatcatttgcgatcaggagttcgagaccagcctgggcaacatggtgaaaccccatctccactagaaatgcaaaaattagctaggcgtggtggccagcttacttccaagtaagtcccagatacttggaaggctgaggcatgagaattgcttgagccaagatcaaggcagaggttgcagtgagccgagatcgcaccactgcactccagcctgggtgacaga

SEQ ID NO: 588977 - DNA, 111 bp, Homo sapiens
tagaggatcccgaacatgttgtggctctagccaagcaatctcccacctcagcctctaaagtgttgggattacaggtgtgagccactgtgcccagctctcagaacactgtta

SEQ ID NO: 588978 - DNA, 104 bp, Homo sapiens
ggtaagtcttacaaagcaaggtgtaaagaaaaacggcctgccattcaagaaagtaatacaaagagaaaggtgctctgaagaataaaaaaaaactaaacccaaaa

SEQ ID NO: 588979 - DNA, 110 bp, Homo sapiens
tctagcctcgccagtgtcctagcctcgccagtgtctagcctcgccagtggaagctccgtcatagcctcgccagtggaaacaagtgcatagatgtgaattggtttttaggg

SEQ ID NO: 588980 - DNA, 1157 bp, Homo sapiens
gctctgaggaggccaccattgagacggttatacaccacatagatcacgttggtgaattgggaggaccacgcaagagaccagggtgcccatcatcctagatgggcaaaaagtgagacctggtgtacggggagctcaatggaggccgtgcatcccgcagtcatgagccagattacccgagatagagaacatgcgtggagctgtcggccaagaacctgaggaacatctcagcagctgtacatagctacgccgcagaaaggccgaccatgacatccgagaagacgccgcatctatgaaccctgaaggacaaggacagatgaaggccccgcaggatgcgccacagggcagcatgacggcggccattacttccaggactctcaggaatcagagaccatgaggacaagggcgcatcaagtgagagaaggatgctcaaaaagactttacccaggacaatccttgcgtgtacgggcaaacacccatgtgaacccccagcaggagccccccaatggaccgacaccgtgacaagaaacggtgatgaggtgcttgccagaggaaaccggtagagctggcgacaggagtagccaggagaacgagacccgaggcttggaacacccgttggactggggaaacccgatacaatacactgcaaaccacaggacatcaaaacaagtacaagagagacgggcaccggcactaaaagaacaccaagacaatgagaaacaccaaatagcataacacaaaagccaaacacggagataccagacagagatgaccccaagcgaagacctgaccagacaggaaccaacacgacaatcgcgacgataagaaacaccaaaggaaggaccacagccgagacatgaaacagacccaaggaaacaacaccaaaccaagcgggcaacacaaaaaacaaaagcaagaaaaaagaggtagagaagaacagcagacggaaccaaaggaaacggcggaacgagcacgcggtaacacgaccccagggtgaccagatgaagaaacgacaaagacaaaggaggtgaagcccacagcagagagagacacatgaagagcacgcacagacgcacgaacaaggacaacagatacgaacaaagaaagacgcaggggacaaggataacccctatagactgcaaaccgtcaccacacagtgg

SEQ ID NO: 588981 - DNA, 134 bp, Homo sapiens
tccagctcggtacccaatataataatgtaattttataataataataataataatgaaacatcacttaatgtagcctactttaaatgtgctcaggatgcttacactagcctgaagttgggcaaaatcatctaaca

SEQ ID NO: 588982 - DNA, 434 bp, Homo sapiens
agggcgtgcctgccaggctcgctgctctgtctcgtgttcctgactgcagcacgaacgcgtgtgccaggatcgtgctgcgatcttcaggacgttgctggaggcttgtgacaggttgcgggcgtgcgccagggtccgccccgcgcagtgtccacgctactttctgtggccggctatcccgctggtccccagcctgagcagggcgctgtcggccgtggctctcggttataatcaccagggctgttaccctgttatcaccaccgcaaagacgggccccaagttcttcctgattcttgcgccccccttgggcaattcttggtcctgttgatgcagatcccacttttccacctcatgggggtcgtccaggagctgcggcagaggtcgaggggcctgcgaggctcgagggtaccgctgcgaggtgcttctgctgaggctga

SEQ ID NO: 588983 - DNA, 270 bp, Homo sapiens
  misc_feature (26)..(26): n is a, c, g, or t
  misc_feature (37)..(37): n is a, c, g, or t
  misc_feature (40)..(41): n is a, c, g, or t
  misc_feature (81)..(81): n is a, c, g, or t
  misc_feature (87)..(87): n is a, c, g, or t
  misc_feature (93)..(93): n is a, c, g, or t
  misc_feature (97)..(97): n is a, c, g, or t
  misc_feature (136)..(137): n is a, c, g, or t
cagctgcgggccagtttgcaacgcgnatcagcatgtngannctcaacagtggaaaagtacctgatataaaagacatctttnggagtncccgtngtanctcagtggttaacgaatccgactaggaaccatgaggttnngggttcgatccctggccttgctcagtgggttaaggatccagcgttgccgtgagctgtggtgtgggtcacagacgcagctcggatcccgcgtttactcaactgcgcgtttgcgcacatggggatctctctagag

SEQ ID NO: 588984 - DNA, 733 bp, Homo sapiens
aacaaagaagttacatattggtgggaacaagagtaaatcctggccatatgggatacggccaggtcaagagagattccatgcatgggtccaatttactacagagattcacctggagcgatttagtctatgacataacagcatgaagattctttccagcacggtaacaacaatctggcgtcagacacgcaacttcacggagaaatgtctgggacatgaccgatctgttttatgtatagtcggtaataaaatagacttggcacaaggagagacatgtttccattcaagaagcagagtcgtatgcacgaatctgtgggagcaaaacattatcatacttcagccaaacagaacaaaggaattgaggaactctttcttgacctttgtccacggatgatagaaacagcacaagtggatgcagagagcaaaaggcaatggctctagatcagccgggaactgctaggcgaggttgtacagattattgctgatgaacctcaagcccagaccagtggtggagggtgcgtgtcttctggataactgttcacgcctacagaaattacacagacagaacaaaactgtggatcatttgccctcataatgaagactgccatattccaagtcacattatttaccaaatggaacttatagaatttacccgtcttttacattgacgttataacacttgcagagaagcttaagtgctaaacttagaggaggttgtgaccagagcattgggctc

SEQ ID NO: 588985 - DNA, 1334 bp, Homo sapiens
catttggcctccgtacactgttggttctttgcttgcgttgatttctcgcctctttgttccctgtttctatctctctcttttagagagtttggtcgcccttcttgctgtgtactatgatcctccttttggcccttttgcttagtctcccctggcgtccgcctttaggtgtttttacccaaggttctcccccatttccgcctctgctggagtgtgccgatctgcctggactgttgcccattgtccttcttgttgctactccagcttcactttctaggcctggccaggtttgtccagaataatggtctcatcatattgcggcattccctcctagagcaactatccgtatgggcccaaagtattccaagtaccagtttcgtatttcccaattattgtattttctcctccccacaccatctttcgcacatttatgtttcggtaccaagaacatcgtttgtcatactcgcccttacccagtaccaatcctttatgttgtaaggattacctctcggaaagatcacttttctaactttgtggttagttaaatgtttcctgtctctttcccagtagtctgtccaaggttgtataaaaggtgcttaccttaatgaccatgagccaaaaccccagatattaagttgctgagaattaaagtgggcatttagtaatcctagtaagaccatcgttcgattctcaaggagagtcttatcttaaagtagtgcgagagagtgcaatcagtgccagccacattgttagtctaatatcatgttattaacaacggcgttgtcgactaatgaaagccgtggctgttgtttaaagaaagaagttaaagatggcagcaattccagtaatacagttatagttgatatttgttagagagaactagtaatttgatgggctaaacatgagttaaagtgcttcagtttgtttagcagtcttacaacgcttcccctgtataatcacttcttaagtggtgtagatttgcctcactcctatgactctgagatcactgccgagagtgagaaaaatctccccaaaatacaactcttcaagtgcattgtggaaacccacaactttgaacagtaattccagtctcactaatcgtttagatcacaccattgtaaatgtgttacgggtccatttgttcctggaatgcgtttaattctaaagtcagtttctccctgttttggagattttgtagttaattaataaattttggctaattgttttggaaaagatagaagcatgtctgtgtagatatgaagtatagtttgttccataaaacagatgtttattttgtaattgagagagagaatacacaacatgtactttgtttacac

SEQ ID NO: 588986 - DNA, 222 bp, Homo sapiens
gaccaatgaaatgttggctgagatgagggagaagggaattcaaaaacatttaatggctatggagggtcaattcaaaagggtaggtacaactccaatggtggagaggaagtttggttaagaaggtccaataacaagcaacaggggagtttccgggaaatattaagcacagggtttagctagtatagttagcacatttttaaatgtgcatgtcttttgtcgacg

SEQ ID NO: 588987 - DNA, 420 bp, Homo sapiens
tcgagctcggtaccttccagccacgcaaacagtacttatcccctggcatgtttcagtgtttttgtgaaggactaactttctataagatttctcggccgggcgctgtgtgctcacgcctgtaatcccaacactttgagaggccgaggcaggcggatcacaaggtcaggagttcgagaccagcctggccaacatggcaaaactgcgtctctactaaaaatacaaaaatcagctgggcatggtggcacatgccctgtaatcccagctactcaggaagctgaggcaggagaatcgcttgaacccaggagctggagattgcagtgaaccaggactgcaccaccgcactccagcctgggcgacagagtgggactctgttctcaaaaaaaacaaaaaaattagggtggcggggattcacctctaaga

SEQ ID NO: 588988 - DNA, 147 bp, Homo sapiens
agacgcgatcgatagtgatgaccgggcgtttgaatggaaacgtcgatcgcgccgaatcgatcccaagcctgacgataaaaatcaaccacctgcgcctcatcggtgacgtcgaggatcaccggcagaatctccacaccataacgctgg

SEQ ID NO: 588989 - DNA, 1395 bp, Homo sapiens
gacgcgacggcggtccgcgcgcccatttcctgcctctggttgatggctcgtctgtagttgcacgccgcgggcccagttgatatccctggacacctgaaccgcaggaaggacagtcctaataagattcacatttgaaccacgcgatacaaattccagggtgagcaccaagtctcaaaagtctcctagacgcgatacagttaccagtatcatttagaagcaacacagaagataggcagtctaatagtcgataacatcttcacagaagttgaccatggggacggacaatccctacgtagactagacaatccctcaggtccaaacaatggatagagcacaatatggaaaaaaacgcaagtggaatcgcaaatgctacaaagtcgattcactaaggtacaccacgccaagtgataatcactaagggaccacgacggggaaccaaggatgctgaaattctttcccgttagattagaccaaaatagaagacgccttcaccttcaaaaaactgtgactttggaacacagcacagagcgaaagtcctcttgtaaacgagacagaataggaaccttaggacccaagggaagttcacggacttagtccataaatactaaagagcggcgtagagaagactcccatggcgccgcctgaactcaccggcaggtcggacaaatcgtcggaaaacaactttagccgcgaagtaagacactgaaggcaagaatccccagatcgaaacgggtaaacgaggaaaaacgctatcagagagagccacatgacccagtaacacgcgttaactcaataccatgggcagaaagtggggtgcatatatcgcgagaaaaggaaaattagaaatccaattacgctgcccgttatcacaacgagatgtgtgatgccagatattgacggaaatacacgcacaattggcgaagggagagcaacaaagggcgaacagcccttgaacattcgaagtgtgtcaagcatataatgacacaatgccatgagcccggagagaaggctgcaaagagaacatagagagaaaaaagcctcaactggaacagacgaacatggtcagtcgccattccaggccaactttgaccccgcgcacatgtaaatcaccaatataccaaatgaagtacgcagcatcaattagcgaatgaacatcgtggagaacccacacccaaagcaaagcaatgaaactgcatcgactacgaacgaaacttcgtagccaccaaaagtaagagaacgcccggaagcgaaacgtccctaggaagagaagcaatggacatccgagataggccaaaatgtcacaggaatacatttaccactaagatgatatagtgagagcaacatggtagagcacgaaacgtcgaaatgaaggcattaaaaagtggacagaaaaat

SEQ ID NO: 588990 - DNA, 834 bp, Homo sapiens
gaggcgcatgctctggggcagttccgaggcccggcggggatgcgccgggagttccttgtgtgccgatcgtgtcaccaatggtacgacggcaagcatgtctacccaagcgcatagctaacatatggtccccgcccacatgcaatatgccatcctctaaaagcaagaaggtgaaggtctctacacaggtttcctacagaggacgagaacccggtttggttgctgacactaggtcccagggtcgaacgtgggtccagtcgtggtgtgctgcgtgtgcagagatgtgtatgggatggaggcatagatagccgggccctggttatccatatcctgagtaggtatgtatgtaggtcaaggcttgagggcattggtgtgtgcctagtgctcatcagcgagtgtccgtaagcacagagatgtgcgcgcaggtcatatgtctcgtgtctaagtcgtgctaattgaatgatgggtggcgcctgtccgaaagggtgacaactaatcaagagtggaacggggcctccgcgagaattgggtccccctggggcaccagagtaagagacgactgccaacagaatggacactgtgcttgaggtcaccatggggatggattcgaggactagcgagaagggaaccagaagttctgatcaacaagtgtcgacgtcgctcggtcgaagcgctgggacttgagacttgtgcccaggggtggtactttgtccgcgtaccgtagggaggggcctccccttttttccccagggcgtacgcgaaaataaaaaccccgggaggttaacctccgagaaccttcgcgttgggggagggcctcaaattgtaagtgaacacgta

SEQ ID NO: 588991 - DNA, 200 bp, Homo sapiens
  misc_feature (195)..(195): n is a, c, g, or t
tggtgaaaggaataagcaactcaaggtaaataaagaagaaagatgaagattcttagaatcgtagaaagactgcagggggaaataattaaagcagctttattccttacggcattcatcattcgtcgagctggaaagcactgacaactttgtaatgagttttttgcgcttaactctgtcaggtgatttatatgaatnactta

SEQ ID NO: 588992 - DNA, 197 bp, Homo sapiens
  misc_feature (175)..(175): n is a, c, g, or t
atggccaatcaggccacacagcattggctcaagcagggcagtgggtgttgcagggttcatgcagcagtcagctcatcacatgcacaccagcgcatcagtcatacattcccttctcaggccatagtcagggcaggcaccatgcaggtgtgcagcgcatcatcactcagtcattccntcagcacagtgcagcataggtc

SEQ ID NO: 588993 - DNA, 309 bp, Homo sapiens
caaacgccgattggtgagatgagccccattgtgttgtggtaaatatgtagagggagtatagggctgtgactagtatgttgtagccctgtaagctagagagaagcgatatttgatcacggagaacggtggttactacgccacagaggaattctcccagataggttacctagctgggcgagtaacggcgaggattcgcgagtgctctgccttagaagttcatcaacaaatgctattaagtggggcagtacgatgttttgaaaggtcccttgcagcagtacggaattaattgactggcggacctggtcgacc

SEQ ID NO: 588994 - DNA, 368 bp, Homo sapiens
gtcctaagctgcatgccagcaggagcgggatgagctggctgacgagatctgccaacagcatgtggcaaaggagccctggcgttagacggagaagcggcgtctggacggcccgcactcgcccgagctggagggaggacgctggaggaggaccagggcaacacggcagctgatcaacgagccggctgaagaaggccaacctgcagatcgaccagatcaccaccgacctgaacctggagcgcagccacgcccagaaaaacgataatgctcggcagcagctggaacgccagaacaaggagcttccggtcaagctgcaggagatggagtgcactgtcacgtccacgtacaagggcctccatcagcgccctcga

SEQ ID NO: 588995 - DNA, 431 bp, Homo sapiens
  misc_feature (68)..(68): n is a, c, g, or t
  misc_feature (164)..(164): n is a, c, g, or t
  misc_feature (166)..(166): n is a, c, g, or t
  misc_feature (400)..(400): n is a, c, g, or t
tccggcataagccccttccccacaaacccccaccagcaaggggctggggccagggagcagagtttccncaagacattttgaagtcatcattccttttttagggggccttgcttggtggcaaaagggaatgtcagcaggcccccatcgccatccttgtgtctttncncgttgtattgtgtatccccgggggcattattttcattgtaatgttcatttcccccccctgctccagcctggatttggttttattttgagcccccattcccccaccccagtttcttggggcccaagtgtttgtgcatgtcccccaggagcccccgtggggagccgatagggaggggatggagaaccaagccggggcttttttcaggcccagtggccggtcagcctatccagggcncgcagccaataaaccgaaagtgttacagcca

SEQ ID NO: 588996 - DNA, 170 bp, Homo sapiens
tggaaacaatgcttatcaggcacattttaatcacagtaagatttctgtatgacagaaacaacaaaaggtgtctgtcttctatgtaatattgtttttaggacacatgactttgaaattaactggactatacaatatttttccttgtaattgctcttgttatcatgtaattt

SEQ ID NO: 588997 - DNA, 711 bp, Homo sapiens
  misc_feature (1)..(1): n is a, c, g, or t
  misc_feature (63)..(63): n is a, c, g, or t
  misc_feature (158)..(158): n is a, c, g, or t
  misc_feature (175)..(175): n is a, c, g, or t
  misc_feature (185)..(185): n is a, c, g, or t
  misc_feature (245)..(245): n is a, c, g, or t
  misc_feature (256)..(256): n is a, c, g, or t
  misc_feature (262)..(262): n is a, c, g, or t
  misc_feature (295)..(295): n is a, c, g, or t
  misc_feature (341)..(341): n is a, c, g, or t
  misc_feature (382)..(382): n is a, c, g, or t
  misc_feature (395)..(395): n is a, c, g, or t
  misc_feature (415)..(415): n is a, c, g, or t
  misc_feature (426)..(426): n is a, c, g, or t
  misc_feature (431)..(431): n is a, c, g, or t
  misc_feature (456)..(456): n is a, c, g, or t
  misc_feature (507)..(507): n is a, c, g, or t
  misc_feature (526)..(526): n is a, c, g, or t
  misc_feature (553)..(555): n is a, c, g, or t
  misc_feature (557)..(560): n is a, c, g, or t
  misc_feature (563)..(563): n is a, c, g, or t
  misc_feature (699)..(699): n is a, c, g, or t
ntctgcgcgctgtaatcccctgcacatggcatcttagctgtgaaggagaaagcagtgcacganaaggaatgagtgggcgggccaacggcctccacaagctgccttccagcagcctgccaaggccatggcagagagagactgccaacaaacaaacagcnagctaacagagtctctncacagctggngtctgaaagctcgagtagtggcatgtgtgaatctgacgaaaattaaaagtgtgcatagtncattacatgcntaaaanactaataataatcctgtttacgcgtgacgtgcngcaggcaggtccagctccaccactgccctcctgccacatcacatcnagtgccatggtttagagggtttttcatatgttattcttttnttctgtaaaaggnaacgaaaatgatacagaacnaaactttcccnttttnaaactaatgttacaaatctgtattntcacttgtatataaatagtatatagctgatcattaataaggtgtataagtncaatgtattctaaaactgntaagcgaaaaaaaaaaaaacaaaaaannngnnnnggngtcctcctcccccactcacgctggtgatcactgtgctctctgccagcggcgtggggtgacgggaggagggagtcactgtgtgtgcgagagtgcttcagactcaatttccaaaataattttcacccctctaagcatntaaatatacaaa

SEQ ID NO: 588998 - DNA, 461 bp, Homo sapiens
  misc_feature (20)..(20): n is a, c, g, or t
  misc_feature (29)..(29): n is a, c, g, or t
  misc_feature (51)..(51): n is a, c, g, or t
  misc_feature (236)..(236): n is a, c, g, or t
  misc_feature (308)..(308): n is a, c, g, or t
  misc_feature (313)..(314): n is a, c, g, or t
gccctggagccccccgccgnaatcccccnaggggccaaggggcctcccccnttttgtggcaggcaaatttggtggtagttggaggttggccattaagcccaataaaacctcccacctttaaaaggccttccaaggaaaaaaaccccggccccgggccaggcaagggggggttttccggttggccccaaccttctcttttttttttttaaaaaaaaaaaaaaccttttaaaaaaccnccccctaaaacacaaaacattcttggggtttggacaaaagaattttccaaattttgtgggggttttgttttnaaaannaggaaatttttccccccaaaaaaccccccggtttaagcccccccaaatttaaaggttggggaatgggggaaggccaggggttttttttttttttttttaaaagggggggggacaaaaggaaaaaaaaccggggccggggccctttta

SEQ ID NO: 588999 - DNA, 322 bp, Homo sapiens
cgttacggatcgcatgtccctcaagcccttcagaactctgcttcccttcgttcttgggaggctctcctcattgcagtgggtcagtacacccaattttgtgggacgcaggtgctcctgctgttattctggcagaccggtgccaggacattcccacccctaaaaaggagccatgctctccagtaaggatgatgggctcctctccctcagctggtacctgtcgtccccatgcaggtagcaggaatgatagggtgtctggaagcgagggcatcttcatacgagatttgttcttgggcttggtaagcatggggaaaccgggaatcct

SEQ ID NO: 589000 - DNA, 233 bp, Homo sapiens
caaggtatttggtaagaggtggaatctaagtgttgtatgtccaatttacttgcatatgtaaaacattgaatggcacagcaatggtttacatatgcaagtaaatggacatacaaaccattgctgtgccattcaatgttgatgcataattggaccttgaatcgataagtgtaaatacagctttgatctgtaatgcttttatacaaaagtttattttaataataaaatgttgttct

SEQ ID NO: 589001 - DNA, 915 bp, Homo sapiens
  misc_feature (131)..(132): n is a, c, g, or t
  misc_feature (796)..(796): n is a, c, g, or t
gccgttgcccggggatgggtccctgacacttggggaagtaggagcccgtgtgatcggcgtctgagtctgggctgagaccagtcctggccaggcagttaccaggacggtctccggaggccgggattcgcggnnggtccagcagcaggaagaaaccccaggaggaagaaacctcagacagatcgccggcgaggcagcgcgggatcccagcctcaggcgtgcgcggacggtgtgcgggtggaaacccccttcccatggggtgaagcgcagtctgctccagagacccactgttagggtcggggatgtcacagaaattaacagggcagccaattcccatccagaggggcccaggatgaccccgaaccctctagctcagccccaagctcgggccagggagtgaagcctttgtccccaagcaacagagtgagggtctgtctctaacccggtgggctccagtgaaaggaaaatggcctggaggtgcccacaggagggcgccctagttctgagacaggtctacggctcccagactgcgtccccatgagtaacagagggacacgcagaggggcatactgagtgcctataggggactcacagactgcagatgcatgctgcggatccagaagccggtcagcgcacacaaccaagcttaggagccgactgttaagatgccccagtgacacggacaagtttctcctctgcaacccaatgagagctgtgaccacgagagcatcgcgggaccgcaaaggattctggaaaatgtggtcccgggtggccagtgtgcgctgacttcactgaaggnacggttgaaggaaacttctggagggtggggtggtgttgaagagaaggcacaattgtcaccattttgttcaacatgggcgttttctttgtgcagtgattacgcattggtaaagattcata

SEQ ID NO: 589002 - DNA, 1116 bp, Homo sapiens
  misc_feature (353)..(353): n is a, c, g, or t
  misc_feature (964)..(964): n is a, c, g, or t
tgcccaggatcgctggtcccctacatgcccaacggctgttgatgcatggccagtgaggctgtatacaaactcgctgaatcatagatcttctttgcgggaaaaaggtggcaggtgccctacagaccatatgagatcctccctggctcagatacaagtctcacccagcatctgtgtgcggcttcaacgggggcaaagagctgacacgtggctcctcgcgtggcatccattctataccagtgacagtctggtggcacgagggaaagttatcgctgaatggtctccatgatcgccgcgctccaagattcctggtaataatctcgctagggcagtctaccgcctctatccactgaagncctgagaaacaatggtattcctacaaggggaaccacttatcacaggaccgcgtagtcattcgttgccatgagtagttcgggataccgcgctagagggtgggctatagcagctcgaatatgcaatggggccccttgcgagtagaaaactcttgggataggagctagcggggacaccctcgcgcaaggccttgggcagcggcattgtcccattattggggcctaacctctggctcggggaacattgaccccctttacatcccattgttaagacgctacattgctcgccctttttccatggccgccccgtacgttgaaccactaggagctttgggcccccggctaatttcaattgacgggccaattcgagagcgcgcaatcttgtccttgagaaccttggggacccttacgcatgaaggaaccattcgttgggggaaacttctgtcctttggcaagtgcgaaggacgttagtttctgaggtcccccagttagctttggttaattacacattaggttaattagaaacgccggaaggggcattaacgacagcgaatttccaacctttgcggagggacaagattcacgggggaaggaaaatatttagcgcggttggnccggcggaaaaacccgcccggtgtcaccccattgggagaagcgcttggccccttgtgaaggcccgcgagcggtgtatgggacacaagccccgtccatgcatattacccgggtacgcaatcggctttaatcccttacccttggtgaagaaacc

SEQ ID NO: 589003 - DNA, 215 bp, Homo sapiens
tggagacgggttctgggtcggtcacccaagggggagtgcagtagcaccatcatagctcacggcagcctccaagtcccaggctcaggcaatcttcccacctcagcctcccaagtagcggggagaacgggcacttgtcaccacaactagctaattttttattttttcatagagacggggtcatagttttgtggcccaagcgggtcttgaactccgga

SEQ ID NO: 589004 - DNA, 196 bp, Homo sapiens
atgcagataaggagtgataccccggaggagccacaatccagtcattccacccacgtcactgaagtccacgatacaaagggtgtctacttacagctggacttaaggcgtttccgctgtttgtgtaagtgctatgacgttattctctattgtggtgaggatgcccttttccatcatggccaaaagttactagcaactg

SEQ ID NO: 589005 - DNA, 716 bp, Homo sapiens
ggccggggataagcactggaagctttttctggggataggaattctgctgctcctgttcatagagatactgggggagccctggattaggttaaccatcaaggccaacagtaagccctgacgtgacggccttcggtcagagatggagagacgcaatggcacccatctgctgcaacaagagctgaccgaggcccagaagggctatcaggatgtggaggaccaggccgacacctgcaaccacactgagatggacctaacgggttacctggatgcatagaaggcccaggcacaaaggaaagtgaaggagcttgaggcagagatcactacattaagccataagcttcaggacgcgtgtgcatgaggcggagcgactgagatgagccagggcttaagcgtgagaatcgtgcacataaagtactacaccagatcctaggactacaggtccgatgcggagccccagctgatgattgcgctgctgtaccttagcggttttgctgaatggggatcccaggacgctggaacattttggaaggtccggcccgatcgcgtttttcgcttgcacactcccattggtctcattaagttgtgatcggcccaaggtggcatcaacctttgacgcacttagttcgtgcttaacccgcagaaggttcccgggtagcaaacttggaggcatcctggaggccccgcgtttctgcgcaccaccttggcacctccgcgcg

SEQ ID NO: 589006 - DNA, 311 bp, Homo sapiens
  misc_feature (28)..(28): n is a, c, g, or t
  misc_feature (53)..(53): n is a, c, g, or t
  misc_feature (61)..(61): n is a, c, g, or t
  misc_feature (70)..(70): n is a, c, g, or t
  misc_feature (140)..(140): n is a, c, g, or t
  misc_feature (149)..(149): n is a, c, g, or t
  misc_feature (252)..(252): n is a, c, g, or t
  misc_feature (283)..(283): n is a, c, g, or t
gtggatcacctgaggtcaggagttcganaccagcctggccaacatggcaaaantccttctntactaaaantaaaaaatttagccaggtgtggtggtgggtgcctgtaatcccagctactcgggaggccgaggcaggagantcacttgancctgggaggcagaggttgcagtgagctgagatcccactgttgtactccagcctaagcaagaagagcaaaactccatctcaaaaaacaaacaagcaaacaacancaagaaattagccgggcatggcttgcatgtncctggagtcctagctacttcgggaggat

SEQ ID NO: 589007 - DNA, 584 bp, Homo sapiens
accccaactgatgcctgctgcagacttcctgcagctcatttacaatacagagggatgcagaggaaatgtttcttaggaggcagatgacaggaaatgttttgacttttggaaagaagggatgaaggaggtacaaggaaagagaaaagcagccaactggcacatacttacattggtcaggggggcatgtgcaaacatagaaaatccttcaaagatatactcgtgatcatcgtattctataacagttggcctgtcagttaaaaagttcgtaggcggggagactgtgatccggtagtggaaaagtctgccagcattgtaggtcataggacgacagggcttgatggcctgaggggaaaaaaacgaaaatcagtttacaagtaaagcaagagtacttttacttaaaaatatattgtatttcctagattcacatctaacaaaacaggttatatgtctgttccttcacagactggtaggaaagaacagtattggctttgccatacctagaccaataaaaaagggctggccagtctccagctctcagccgcttcctcaggtgctggtgaagcaaggatgaccaataaggccgc

SEQ ID NO: 589008 - DNA, 520 bp, Homo sapiens
  misc_feature (489)..(489): n is a, c, g, or t
ttgggtaggctttcttaagggagccctcccctaaggtagaatggtgctccctgaagaagaataacagtcttagtttttgcccaggattgagaagtttccctgaacatgggactttgagtgttaaaactgtgccagccatgggaaatttgggcaagttcactcttaagcatggaccttgcccctgtcaatcacatggaaaaaactttggaaagactaaaccaacaagaggtcaggtgtggcagctcacacctgtactctcagcactttggaagtccagggcgggaggataggttaagtccaggagtttgagaccagcctgggcaacatagtgagaacctgtctctaaaaaacaaaaaaatttttttaattagcagggagtggtggcatacactggcaatcccagatgttcaggaggctggggcaggagctcacctgagcccaggaggtcgagtctgcagtgtgtcatgatcacaccactgtactccagtntgggcaacagagacagtgaaaccctgcctca

SEQ ID NO: 589009 - DNA, 1368 bp, Homo sapiens
agcggaagaaatcaagacaccaggcagcaggacacacacacactcacatacagcacacacacagaaaaaccagggcaaaagacaagcaaccgaggaaaccgagaaaaactagacgatcaagacgagaaggaaacaaagacaaagcacaaagatgagacatgatgacaaaagatggaagtctgactgagcgttgaggagtcgaagaagactagagacagaaagcgtgcagggagtacgaagaggaggaggaacggaggacgcgattaggtcactgatgctgaaggggacgagaacttaaatggatagatattaataaacgcaatcgaagaagaaattaggatactagagaaacaatgagaaatgaataactcggtaagccgagcaatatctgaacgatactttgaaggataactaggcctaggattacaaatggatgacatgagagagatgctaagatagtgaaaaaccagatttgaaagggctttatgtattgagggcagaagaatctcagagagaaaagaagggtggaggattgagatcgtgagaaagacagattatcgaaatcctgaagtcgaagcaatcggatcgatggcaaatagctaaagtttgcaaaaaaataagagagaaaaaatgggccagataaaagaatccgcccgcgggaacgaaaacttcaaagatgaaaccacccgagctcgagcgaagacaatctctataccagctattaaatcaaacgggggcaacacacaaatcagataagaaggagagacagcactcgcaagcaggccggggcgcaccttggacatggccaagatcaagatacacaaaggggcacgatagcaagtaacaacgcagacaagcatccgtcaagcacgcggacgccgaaaacgcggggattgcccaaatcttgaagaaagcgagcgccaggggggaacgggcgcgggacactcgaatcgaccgcgatgacagacttgggaacccaaatccaacccaaccgaaaccattctaacccggacttccaatgctacgcatgtgggaggaaaattcatcgaactgggcacaaagtgaccgggaggcccaagggacggcttactcctaaggtcaaggaaacctcgccgacctaaccgggtaagaacccaatgttctcaggaatagtttgtctcgcggctatcgattgaattgaagatgcccggggaagaagaagacgcgtgggtggccacaactggattcggcaaacctgatttatttgccgaaaattggcgatcttggcgtcttcgcggaagagagtgggagcaccgaccccgggagagaaagcaccgagagaatcgggagagtccatttagaaccgcgcagaggacactcgtcgcgctt

SEQ ID NO: 589010 - DNA, 595 bp, Homo sapiens
  misc_feature (16)..(16): n is a, c, g, or t
  misc_feature (22)..(22): n is a, c, g, or t
acacatgtagtgtgantccgtntatatgaatggtccagaacaggcaaatctatacagacaaaaagtagattcgtggttgcctagagctgagggtgagggtggaatgggagtgactgctaatgggtatggggtttctttttagggtaataaaaatgaattagattgtggcgatgattatacaactctgtgactacactaaaaatcactgagaattacacgctttaaatgggtgatactagaattatatctcaataaagctgttttcaaaaaataacaaaatctaatttcctggcattacccacctgtagcgcatggagtgctcatgtgcgttcaggatattaagttgttggtggaagcatactacaggaagttagtagtttcctcacaaaaaggactcagtaactcatgcctcttgctttttgcccttgctcatcttcctatctggaacaagctctaggcccttggggtccctaagaaccacagcatgctaaagacggcagagcagcaaacaggaggagactggcaatggatgacaccctgggatcactgcattagcattggtttatctctctctggagctgtcatgcgagaaaac

SEQ ID NO: 589011 - DNA, 1542 bp, Homo sapiens
  misc_feature (170)..(170): n is a, c, g, or t
  misc_feature (380)..(380): n is a, c, g, or t
taaaaaaaaagagtttatttaaaaagtatcatagggtaaacaaacaattggtcccccttggattttctgggaattacaagaactctcggtgagtgcaaagctgtgaagttgtggtgtgtgttcaccaagaactctctttgacaggtgtggtgctttctctcttagggagnggtgtggagtttttttaaaaaaaagaaattactcgtggtgacaccatcagcggtgatttccatctaaagaattctccttttagaggccagagaggcggtggcgtccgagaagtgcggtgcgtgtgtatactctctctctgtgcctctctcagacacagagaacagagataaatagagtgtggtctctgtgtgtgttctctctcagagaantctcctatacaccaccgcagtgttcactgtgtgggccgcacagtatatctctcacacattctcccccttgggcgctgtaatgctgggaagtggtgtggtgtgtacacaaagtgtgtgtgtgagatgtgtcaaacacgtgtggggtctatatctatgtcggagaagtataagcctcggagtgcggtaaaaagggtagcaaaagcaacgctatatatctatatctcttcatagaaagcgcctaataaagcacgcgtgtgtgatgtgtggtgctctatattttcccaccagaggggaggagccaataagacaggggtgtgcttatacatctcccgccagagggggacccaggcgatttagagatgtttcaggagggacacacaccgggcggcggtatactcacacaaaagtcgtgtggcgcccacagaggcgcgtgtggccaacacagctcacaaggggggcgcctcaagaaagaccagagccccccccatatggggcgacttattcttggggcctctgagagggtccctttgaggagataatccccaaatattgtggcgtttacccccaaaattatctgctcaaatataacctatttgcgacacaacaggggctgcccgcaacccctctcccgtttgggaaaacggctgatgtaaccacaagaggcttattttaaggccaaagagggctcttcctttaaaaaaagagggggcgacccatcactcgtggggaggaagacgacgcgcgaggatacacttctcaggaaaaaacctttcgttgaagaaaaacctttcttaaggtctaaggggggcgccccttatcacaaagacaagggggggcgttagcaaagagaaggaccttcccccgtggtgggataaacccccagggggccggggtgcacaaagaagcccccctggtctctgaggctgtctttggttggcaccccccccagggggtgaacccaaccatcacacacacgttggggcaatctctaccccaaccgaggaggcttcccaagtgagacgaacacacaccgtggagacaaattggaacgcctccgagcgaagcaatattctacccatggagctcaaccaccttactacaaaggggggaacggaacctccaccaagagcgtacatctggtgcggcgcaccagcgacgactg

SEQ ID NO: 589012 - DNA, 209 bp, Homo sapiens
tactgtggtgtaccgtccattgccgtctgggcagtgctgatataggtctgggctgaactcagatatgacatggaagcattatgaatgcaatagcaattcagtcatagcaccgaggctgtggaaattttgccacgagttgttcaggattcattattgggcagagtcgtatgttgaatatatcagtgaatttttgtgtaatttgaaatacc

SEQ ID NO: 589013 - DNA, 900 bp, Homo sapiens
gcaggtggatcacgaggtcaggagatcaagaccaacctggctaacacggtgaaaccccgcctctactaaaaatacaaaaaaaattagccaggtgtggtggcgggcgcctgtagtcccaggtacttgggaggctgaggcaggagaatggcaagaacccgggagacagagcttgcagcgagctgaggacatgccactgcactccagcctgggcgacagagcgagactccgtctcaaaaaaaaaaaaaaaaaaggacctctattttccaccaaggcctaatccttcccagaaaattttcctcaaatcatttctaaacttttttggaaaattcacgggcgcttgggccaagggcgggtacaagctaataatcggagccttggggaagctgaggcgggggggtatcaccaggggtcgggagtcaagacaagcctgcccagtgatgggtcaaaccccggtctctcactaaaactcacaaaattggagggcgggaccatggtgcggcattgcgggaaccccaagtaactccagaggctgcggaaaagcaattgtttgagcaggaaggggggaggtcgcgtggacagattcacgcaatggactccagcggggcgacagagcaagactttcctaacacaagacaaacagcaggatacccgggccgggggggcccactggcgcgtttcatcgggtcaacccggtcaggattcgggcctccacccagggtctggctaacaaaaacaaaaaggggtgcgcgcggcgaagttaaacatctgggcggcaagtgaacggaaggtcagaaccgccgaggcgcccaaagcggcacgggtaccgcgggcggcagcccccgcgccgcgggagagcgcccacgacggaagacagagaacacacgcacacaccacggaaat

SEQ ID NO: 589014 - DNA, 416 bp, Homo sapiens
  misc_feature (25)..(25): n is a, c, g, or t
  misc_feature (40)..(40): n is a, c, g, or t
  misc_feature (67)..(67): n is a, c, g, or t
  misc_feature (99)..(99): n is a, c, g, or t
  misc_feature (110)..(110): n is a, c, g, or t
  misc_feature (116)..(116): n is a, c, g, or t
  misc_feature (134)..(134): n is a, c, g, or t
  misc_feature (146)..(146): n is a, c, g, or t
  misc_feature (179)..(179): n is a, c, g, or t
  misc_feature (182)..(182): n is a, c, g, or t
  misc_feature (189)..(189): n is a, c, g, or t
  misc_feature (193)..(193): n is a, c, g, or t
  misc_feature (195)..(197): n is a, c, g, or t
  misc_feature (207)..(207): n is a, c, g, or t
  misc_feature (210)..(211): n is a, c, g, or t
  misc_feature (213)..(213): n is a, c, g, or t
  misc_feature (215)..(215): n is a, c, g, or t
  misc_feature (217)..(217): n is a, c, g, or t
  misc_feature (233)..(234): n is a, c, g, or t
  misc_feature (236)..(236): n is a, c, g, or t
  misc_feature (241)..(242): n is a, c, g, or t
  misc_feature (254)..(254): n is a, c, g, or t
  misc_feature (257)..(257): n is a, c, g, or t
  misc_feature (259)..(259): n is a, c, g, or t
  misc_feature (282)..(282): n is a, c, g, or t
  misc_feature (297)..(298): n is a, c, g, or t
  misc_feature (303)..(303): n is a, c, g, or t
  misc_feature (310)..(310): n is a, c, g, or t
  misc_feature (316)..(317): n is a, c, g, or t
  misc_feature (323)..(323): n is a, c, g, or t
  misc_feature (339)..(339): n is a, c, g, or t
  misc_feature (353)..(353): n is a, c, g, or t
  misc_feature (360)..(360): n is a, c, g, or t
  misc_feature (363)..(363): n is a, c, g, or t
  misc_feature (375)..(375): n is a, c, g, or t
  misc_feature (377)..(377): n is a, c, g, or t
  misc_feature (384)..(384): n is a, c, g, or t
  misc_feature (390)..(390): n is a, c, g, or t
  misc_feature (393)..(393): n is a, c, g, or t
  misc_feature (395)..(396): n is a, c, g, or t
  misc_feature (399)..(399): n is a, c, g, or t
  misc_feature (405)..(406): n is a, c, g, or t
  misc_feature (408)..(408): n is a, c, g, or t
cccgcccccagagtctggctttccncggctgcccgcctcncgcgtcttccctgcccgggtctcctcnctgtcgccgccgctgccacaccatggccttcntcaccaggcanttcatncgtcccgtgtcctcctcntccaccgcctcngcctcggccaagaagataatcgtcaagcacgtnacngtcatcngcgncnnnctgatgggcnccnncntntntccctaggttgctgcnncnactcnncacacagtagtnttngnacaccacacacacgacatcctgncaaaatccaaaaacnnaattnacgaaanccttannaaagtngcaaacaagaagtttncacaaaaccctaangccggcnacnaatttgtggagnanaccctgnccaccncancnnccngcaccnncnccccctcc

SEQ ID NO: 589015 - DNA, 313 bp, Homo sapiens
  misc_feature (28)..(28): n is a, c, g, or t
gaaagacagttgataaataacccatctntgaccatgcattgtttaatgatggggatacattctgagaaatgtgtcattacgcagtttcatcgttgtggaaacatctagagtgtacttgtatagcctaccacacttctagactatctggtatagcctattactcctaggctacaaacctgtacagcatgtgactgtactgaaaactgtaggcagttttaacacaatggtatttgtgtatctaaacatagaaaagggacagtaaaaacatggtataaaagatggataaaatggtacacctgtattagggcactta

SEQ ID NO: 589016 - DNA, 132 bp, Homo sapiens
atccagttctcagcatgtccctctcctcatgagattggtgaagaaagtatttggcaaagtccttcaaagccacatcatcgcggtcaaagtatctggcggttgatggcggcctctgagtcctggtggtatcag

SEQ ID NO: 589017 - DNA, 675 bp, Homo sapiens
gcttcccgagctggcggggtccgtggtgcgcggatcgacgattgcgggctatggcgcctgcacaggttctttcgtcagatacatgggatatccccgattggtcatccgattgccaccgtcaagagtcctatcagcagccaaccagtatttgctcatgcggtcgctgcgactgttagccgaccgcatgcctacagagtctaacactacaaatcactccgggacatccttccttgaagtgagtgggctaacggttaggagcaactatcaccgttcaacttgcatgcttgccttgtctgggggccccgttcgttggggggctcatcaagctgtcgtcatgcgcccatgtcgcgcgaagaagcccgatcgagtcccctgagacgtactgtgcctcggtggctgagccaggagggcttgtaggtctgtgtgcagtctcgtcatcggctacgaactacgtggattggcgccgccgcctgcgtgtactcttggcatagcggtctccctggctcacgcatgggccggctggaggtgctggggacggtgtttgctggacccaaggtgtgagccctgttgcttgccggggtccttccagacctgcctgaatggcggtccagaaaataagcccctgttgtcctgtgacgcaaaatgggagccaacaaccttgaagtcgcaaatgtg

SEQ ID NO: 589018 - DNA, 551 bp, Homo sapiens
gacttcctccgcggtcctcggagccgctcgacctcttcagggacttgctgagaagggctctcgggcgtccagacccacgaaaggtgtgtgggatccgccgagaagttgttggccccaggagcatccctcggggccgaatgcgcagtgacgattgccccttctgacccaacagatccaagacgaggatgatcagtacagcctttgtggccagccttgacaacgtaaggaatctctccactatctgtgaaagctattcatttcggagaactatgccagcgtgttccgcaagtaaaaatggtatcaacgtaacagtggaaaattgcaacgtgtgtgccaagcaaatgcttttatcaggctgaattatttcagggagtctaaaggttccaggacgagtctgtcactttgcgaaattaatttaactgtccttttagagtgttatctatttgtgatcaggtcctatgccagggacttttaaagtgcacttcgatgtgtgttaccaagggtaatgggttacccttggatgctgttcctggaagaaggaggagtggtga

SEQ ID NO: 589019 - DNA, 237 bp, Homo sapiens
ctagaggatcttcgtacgaatcatcatgcattcggacaggaaagctcatgtgttaagaaattttttaaaaatcaggatacaggagttcccgttgtggtgcggtgggttaagagtctggcgtgtctttgtggcagtgcaggtttgatccccagcctgacacagtggattaatgatccagcaatgccgcagctgtggtgtaggtcacagctgtggcttggattcagtatagtaattcgg

SEQ ID NO: 589020 - DNA, 603 bp, Homo sapiens
ggagcaccaactcttttgtcgtgcattaaatatgtcacacacgcgggtgttgataaataatactgttgctcttcttgccgttcacacagacctgctctctctctaggtgcgcatcctcccgctggggcgatcatctcttttattcttaactgaaggctgagggggctttcatttccatgtctgctgatgctcgcgttgtgaaacgcggcctcgttatagttgttacctcttcggctccagcctccgtcctgcctccgccgcttcactctacaaaattgttgcgccgcggctgctctctttctatagtaatagagttgtggtggatatatagagcccgcgctcgtcgtgatatatatatatagcgggcgataatatattttggttgagattcgcgctctcttagtggtgttgtctcttctagtatatgacagccctctctttatttcaggtaggggcagagcagcgtgttgtgcagcggaagacaagtggtgacacacgcacttatttttttgcgtggcgcgcctttgatacgccgcttttataatatgttgttacatgatgttggtgtgtctatcgaccacacaacaattgatacaagaaatc

SEQ ID NO: 589021 - DNA, 91 bp, Homo sapiens
agaacaagcgcctgacgaaaggtggcaagaagggagctaagaagaaagtggtcgatccattttctaagaaagactggtacgatgtgaaagc

SEQ ID NO: 589022 - DNA, 223 bp, Homo sapiens
ctatcaaggtccgtgtggttcttgcagaaggaggatgacacacacacggtgtagaacacaccacacacacacacacacacacaccacacacacacactcaaacaatgcacttccctgaaagcgacacaacttcaggccgtggtgaagaatcaacaacttcccacagcagcacaacacacacaatatcttcagcttctagcaccacatctgcaaggaacccagg

SEQ ID NO: 589023 - DNA, 821 bp, Homo sapiens
ggcacaatgacagcaagaggcttcctggtgtgggtgaacgaggaggatcagctccgggtcatctccatggagaaggggggcaacatgaaggagggttttccgccgcttctgcgtagggctgcagaacgcattgagggagatctttaagaagagctggcacaccccttcatgtggaaccagacaagcctgggctacgctgctcacctgccgcatccatagcgtgggcacgggtgcgtgcgtggaggcgtgctatgtgaagctgtgcgctacctgtagcagagctaccccaagttcgaggagatcctcacccgcctgcgtcggcagcaagaggggtacaggtggcgtggagactagctgccgtggggtcagtatttgacgtgtcggaattgactgatcggctgggcttcgtccgaagtagaacaggtgcagctggtgggggatggtgtgaagctcatggtggaattggtgaagaagttggagagaaggccagatccatggacgtacctgttccccgctgagagtaggcgcctggccattgtcgcgtaatgctggaacccagctagggacgggccagtacctaaagagtcctggtcctcataaccgaggcaccgcaccatgtgacgtagtccgacgggtcgagtacgcaccgtctggaagagcagtccaaggaaaatcggtcacgggctaaacctcggatccgtcacagagaatgcccgcaagcctttgctaccgaggcaccaaaggatcacaggggaccagaacagaggggtggcacaggaaaactggggcaacaaaaaccgtgccagcaagcacagggggca

SEQ ID NO: 589024 - DNA, 194 bp, Homo sapiens
cctcggaatacaccggacagagacagcacatatatgcaacagagccaaatatatatgcttcttcactgcagcatagttagtaatagcaaaagactggaaacggtgtactgtctatcagtgtaacggtacggtgccaagtatctttacttgctgatcgggacgtaacagtcacacaagaggtataaaaatggccg

SEQ ID NO: 589025 - DNA, 139 bp, Homo sapiens
tgatgttattaaaaatctgttctggtttgaatttggagagtctgagatcaaagaaagcgtactggttttttgagcatcacacaatatcccattgtaataaacctgcacatgtactccctggaccttaattaagaattga

SEQ ID NO: 589026 - DNA, 590 bp, Homo sapiens
  misc_feature (66)..(66): n is a, c, g, or t
  misc_feature (255)..(255): n is a, c, g, or t
  misc_feature (257)..(258): n is a, c, g, or t
  misc_feature (583)..(583): n is a, c, g, or t
tcccccacttaaaaaagaacccccccccccccctttttttttcccaaaaaaaaaatacccccgganttttttttggtcctcccccccccccaaaataaaccaaaagggggtgggtgtttttcatcttaagaaggaatgttttttttcacaaaaaaaaaagtttcttcctggggaaaaacccccccaaaaaactccctccccccacaaaaggttttcccccccggggtggggggagttttttcaataaaaacctcntnnaaacccccccccccacaaaagggtgggtttgtttttttatttctccgcccacacagaaaaaatttcttttcccacccccccccccccaataaatcccccccgaggttttttcgttggaaaaccccaaaaaaaaggtttttttttcccccggggcaaaaaagaggccctcttttgtggggccattaaaccccccccaattgggtgtttttcccccgggcccccccctttaaaaaaagggcttttttgccccattttcccccttccccattttccctcagggcattggggttttaaggtccaaggcctcaggtttgcccctttatanggaaggt

SEQ ID NO: 589027 - DNA, 1021 bp, Homo sapiens
tgtgacccagaatggtacgctggccttacatagttcaacggatctcgagcgtgaatccttgtgactcgcgttggtggtgattgccacgatctgtcaatataatagtctggagcctcacttacatgtcgaacgaatacacagtgttcttgaaagactggaaggaacgataacgaggaaaggctgacattccctgtgatgtggtatgatcttgagcggagagggttggcagaatgttggttactgaaggtatcatcactgggaccgtttttctcgactcatggcgcgggccaagacacacataaacaattgcgcactcttgacttgaaccagaccgagctcagagcgagaacatgctcccgagaggatcttctaatggaatgtgctgcgacagaagtgacgactaagatgtctttggccagaccctacaaggacctgttgagtgctgtgtgttgtgatctgtgagagcggctcttgcagagtactgacgtaggcaaaatctgcaatcaagatgtccttgtgcctcgaaacgcgacaagagtagtccatgggtgtctcagctcgctgggtttcatgcagacacgatagttctcctgccatgaacactgttcagttctgtctctaacatctcgtccttggtgactgtattgatggatggtaacctacgggcggtgaggggtggttaaccccccatgttcaggtgtgtcccgtgtaccccccacaaaccaacaagtttggtcttctatctccacaacgtgagcctggaagaggagaaaaatgtggctcctcttggagcttggacagaccacttgggtccggtcttggcgtgaatgtccctttagcccaaagacggtgaagacacgggctgaaatcaggtggttctgcaccctgaggccttaaacccatggggtggctaatcccactggacttgtgacagcactataataattccataattatttgggagaatgagggacctggggtggcgtagttggctggtgggaactgccggggttgggttggc

SEQ ID NO: 589028 - DNA, 155 bp, Homo sapiens
  misc_feature (91)..(91): n is a, c, g, or t
gaatgtcgaaacgctttaggcagtcctcacaccttactacacataagataattcatactggagagaaaccctacaaatgtgaagaatgtgnaaagctttctaccgattcatttaccttactacacataagagaattcacactggagagaaaccct

SEQ ID NO: 589029 - DNA, 133 bp, Homo sapiens
tcacgccatgtccacaatggggcgggcatggaggcagcctcccgacgtcttcacggtcaggatgaggtgccggagatgacgttaagcagcctgacagctctcaattgtgtaggagtgttgagaaagcgtccgc

SEQ ID NO: 589030 - DNA, 283 bp, Homo sapiens
  misc_feature (129)..(129): n is a, c, g, or t
tcgggggcgagtgggcagctggcgggtctggccgctcgcttcggaggcagtgaactggcaccgcgcctcgcgcccgcccagccgagggctccaacccgatccggaccacgtcccggctgccctccgaanccggcagtccgcgcaggaatcctctgccttcccggggccttcacagatcctcccccgggccggcagttcacgaattccaggaacttactagagcctgggaagcccgggaagcgcctcccgccaggccgcctcccccaacccaactccgcggact

SEQ ID NO: 589031 - DNA, 156 bp, Homo sapiens
cccaacctcaggtgatctgcccaccttgggatttgcctcccaaagtgttgggattataggcgtgacacgttacggcgcagcctaacaaattctaaaagagctgtaacactgacagtctcttcatggtcccagttaggccaaagggacttctgctct

SEQ ID NO: 589032 - DNA, 321 bp, Homo sapiens
tttaggtatagctctaagactcctgatccatacttttattaactggctttcgtaggctgtgggcttgaactaagtacagaagcctaggagttcatatctagactgcagagaagtaagtctcattctaaaacattgcaactactgttagagtctaccccatgaagctgtttctgattgtgtatctttgactgaattctatgagtatatgttgttcagactatatacaaatgttgctagctaggttggctgtgctgtctcagtacgacgttgtgactagccagatcttcctctggagaccttggacctaagtgccacatgcat

SEQ ID NO: 589033 - DNA, 297 bp, Homo sapiens
  misc_feature (52)..(52): n is a, c, g, or t
  misc_feature (99)..(100): n is a, c, g, or t
  misc_feature (109)..(109): n is a, c, g, or t
  misc_feature (226)..(226): n is a, c, g, or t
  misc_feature (267)..(267): n is a, c, g, or t
  misc_feature (270)..(270): n is a, c, g, or t
ttttgaccaagttgtttccattaaaaagtactgattttaaaactaataactnaaaacgccacacgcaaaaaagaaaaccaaagtggtccacaaaacatnnttttcgttnctgaaggttttcgatgcattgttatattacctcttttactactaaactggacggccaatgaaacaaacagttctgagaccgttcttccaccatgattaagagtgaggggcaggtatnagggataatatctaaaccttttgagctctctgggcagactngtngaccttgtcagctccagcagcctcttg

SEQ ID NO: 589034 - DNA, 170 bp, Homo sapiens
  misc_feature (4)..(5): n is a, c, g, or t
  misc_feature (125)..(125): n is a, c, g, or t
  misc_feature (129)..(129): n is a, c, g, or t
ccgnngggacaggataactgttacgcatatatgacttgaacaacctgaagcgaacctaaggaaattagtggtcatacttcttggtataaaaaaaagctctgtggtgcagtgaggattaacagatncttnctgctgatgacaaaactgtacgacttggagatcatgctact

SEQ ID NO: 589035 - DNA, 249 bp, Homo sapiens
ttcagctcggtacccctaattggttcttcgatgacggcaccacttactgaaaatacttttctctattgtatattcttgcctccattgtcatagattaattgaccataggttcatggatttatttctgggctttctatcctatttcactgtttttgtgctaataccatactgtcttgatgactgtagctttgtagtgtagttagaacgtcatcgaagaaccaattaggggtacgagctcggttgtccaag

SEQ ID NO: 589036 - DNA, 473 bp, Homo sapiens
gcacgagcgcatgagctgtgcaactatgtgaacacacggggtaccacgtgtcaggcgcgcgcacacactttacacacgcggacatgagctatcttgagagagagcgtatagtgggacctttctgtggggggcccaaggcacacccagagaggtatggttaccgaggacctggagctggctggaaggtttgatagcgcgggaaccatgggcacagtgtgccaccattgagagcagagaccaagggttctgggggttctggtgggcctttggggctgtggaaggcatttctgagcggatctggattcacaccaatgggcacgtgaacgtggaagtgttcgcggaggagctcggtacacagctgtggcagcatgtgtggggaccggtgtgatggtgggtattccggtgaagcttggaacttttggacaagctccattccttcctgtgagcgccacattacggggttccgggccccg

SEQ ID NO: 589037 - DNA, 375 bp, Homo sapiens
  misc_feature (259)..(259): n is a, c, g, or t
agaagcagagtttacagtgagttgagattgtggcactgctactccagtctgggtgacagagtaagactctgtctcataaaaaaaaaaaaaaaaaaaaaaagcaagaaacaatggggcaggtaccagccagggtttcctgaatctcaactaaaaaggctgtagtctcatcagctaatctgggtctctatatgttaatgtaagaaccatattattttcccttaacatctacactcaagactagacaaaaaataattcaggngttatgaacctacagttattcaagacagcatgtggtacgggcattaagtacagacatttagataaacgggaaaaaagctgagagtccagaattaaacccacacgcttaaagtcagg

SEQ ID NO: 589038 - DNA, 905 bp, Homo sapiens
agtgtatagtacaaatgtaattaggcattgcctcctggcgaggttcttgatgcatgacttcgatgctggctgctgactgaggtgaccactgtcagtattgtactttggcatatgttgtttttaggaaaataatggaatgccattccttagattaacttactgtttttgagttggcacaaacccatacaaagcatgcagggtattatcaagatatgcccaaatatttatacccctacaaaaggattacagaaaaggcagcagggccgaaacacaaaacaggccagttatgcattttcaatcagcgtctaatttttttttgcactcggaattttgtggacactagtcaattgcataatttaacatggaggagctttcatttaaaagaagttctcagctactatattctgccattaaaattaaccatgcctgttaatttctacattgcttgacgatactcgtcagctgccgtcaatattgtctcaagattttcttatagtttatgtttaaatggaaacagttacatatataatctatggtgcagggtcaggcattggccattaaagatcaagtttgatctaacttattttactgacagagactaatggtataccctctgtaagtactgacttattgtttcttggatctgtagtttacccccgaatgtaaccaggtcctacggttgaagtttccttaacgtccttcccatattctaaatggacatttggttaaaggcattcacaatctttgggacattcctattacctgtaaaagggctattttaccacaatagaagtgatgtggataatcgaatgtcaagcggcgtaaggaaagcgagagaagagaaaccaccgatgttacaagtgacggcagcagacgaatggacttgaccttgtcaaaatcgtcac

SEQ ID NO: 589039 - DNA, 281 bp, Homo sapiens
gcaggagaatggtgtgaacccgggaggcggggcttgcagtgagctgagatcgtgccactgcactccagcctgggtgacaagaacaagactccgtctcaaaaaaaaaaaaaaaggggaggggttccttaaaaaaaaattttaacccttgccccaaaggggaatttgggttttccttgggaagggggggaaccagggcccagccacacagccccttccaagccgggaaagccttgtggggaaccttttagagtcaccttgcggccttccaagttggccattgc

SEQ ID NO: 589040 - DNA, 271 bp, Homo sapiens
  misc_feature (49)..(49): n is a, c, g, or t
gtatcccagcctattatgtggaagaatcctaaatctgtgatgatcctgnccagacaattcaaccaaaatcagataagcagatgagcaacgcctcctgcgaacagtcaccttgtcactcaagggcggtgtctctgtgtggtcatgcctgacgtcgccgaatgtgccacacgttttctctgtactatggccgtgagacagctgagaagcatgcttaatagagagtgtatgtgtcagatcattggctgctcatatcaaactccacatggcaggg

SEQ ID NO: 589041 - DNA, 325 bp, Homo sapiens
  misc_feature (9)..(9): n is a, c, g, or t
  misc_feature (138)..(138): n is a, c, g, or t
  misc_feature (218)..(218): n is a, c, g, or t
ggcccccgntggatgagtccagaagcttctgacaatagtagatacacgggatggatagaggggtttccgaccaccactactactactacggaaaagccacactgtggcttctattctcctcacacatattatcccccnggtttggactccccttctttcatccacgtcagacaacgtggccaatcatactgttgcacgaggttagccaagcagctggnaaaaggctctagaacattagaatgggccttccatatttccttatttggaccactcatcttcacggtacagattgacatggtccaactgccgcttctaaaagcaacaa

SEQ ID NO: 589042 - DNA, 325 bp, Homo sapiens
cagaggctgaatggactgcacttttccctttttgttctgacacctgcacttatcatgtgtatttctagcagagcaagatattattattattattattgagatggagtctcactctgttccccaggctggagtggaatagcgtgatttcggctcactgcaacctccacctctcaggttcaggcgattctcctacctcagcctccctagtagctgggattacaggtgcccaccaccatgcctggataatttttgtatttttagtataacggggttttgtcgtgttagccaggtagtctcaaactcctgtcctcaggtgatccgccca

SEQ ID NO: 589043 - DNA, 1502 bp, Homo sapiens
atttaatgtatatacaccagaaatctatttttcaaagctttttttactgcaaccaatagttgaagattatattttacatatttctgaaacgacacaaggcttaagtagaaataaactgcttgtgaacaactgcttagcttattacttacaaacagtgcctaggaactcaagctggtatcagccaatttctcatatgcacacagacactataggcttgtaatgtaactctcaggaactagtaacttttttactcctagtcgcgggggtctaaacggcaccacgttacgcaacacactcagcacgacgacaagcacgactggccccagcccctctaccagcaactcggcacttcctcacatgcaaaatagcgcctctacaagtcatagagacaccccagacataactacgcctagctcctgttctcctctgtgtctcactctctagcagcgccctactcagcgctactgcgcggcacggcgcataccccacgcgcgacctcactctgccgagccactctctcgacctctctctcactctacaacgcgcccccctgtggctccccttctccgcttactccctcctcgtccctgcctctctccacagctctcctcaccacacctagcttgccgtgcgcgcttcccgcacgtgtgactctcacagtccttacttccacaccactgcgcccgtctctcccagctctcgcctacaaggtcctcttcacccctctctctagctcgccgtgtcctctcctcccccaggctcccctcctactgtgcccccctgggcctttcacaccgtcattgtggctaccctgtctgtctcccacactcaccaacaggcacaccaccgtcgctttccctaatcgcactcactccgcctcacctcctctcacgggcctcaatcgtacgccctacttgggagcgtggccaccacactccggctccctcattggcccttttcttatccccctctcctcccactttcgtcggcctgggctcctcctaatcgccacactccttctggtccctctgcgaccccttttatccacgcaggcgctcccctttccccatcggctcgcctggttacctcacctcttagttccaaccgcgcctcccgtgttctccaacccttccccgtttaccctattcacgctctgcctcttccccgcgctatatccccggtccctcagacggccccccatgcgcccaatttctccaaactcccccgtgtattacaagttttccccttccaccttaacaacccctccctgtactatcactcccgatcgcacaacatgtaacatatatgctcatccgcacactctctctcaccaccgtgcggcggcgacgcaacccacctatatagcagcacacagcctcttaccaattgcacacacccgcgcgcactaaacatcgtagttatactttcacacaatcggcgtccctgatcagcaacccctttatatttgacaagggcacctctaagacccgacagtattacac

SEQ ID NO: 589044 - DNA, 222 bp, Homo sapiens
ccggatcatgatttgtatttttgtgtggagctctaaggatgagtaagatgctggataacaatgatatgcctatgggcctatccttttcctttgcttaggagacacattccactcccatgaagaaaggttcccagcatgaaggtcagagcctgagacgagaaggttggattagaatagtcacgacagcatatatgtcctgtacgagaggtaggacccagtggt

SEQ ID NO: 589045 - DNA, 597 bp, Homo sapiens
  misc_feature (15)..(15): n is a, c, g, or t
  misc_feature (30)..(30): n is a, c, g, or t
  misc_feature (234)..(234): n is a, c, g, or t
  misc_feature (398)..(398): n is a, c, g, or t
gtccgaattcggggnaatgtgacacgcgtncgaccagcgtcccgatgatcaagggatatccagagggtatttgacaagtattaatctgaacctctgggtagcttgaagatgtctgctggtatagtaagtgcatgagaaccatctgcatttttgctgaagctctataatcgatgagggctgggcacgatgatacacctcatcagagtgatgtttctcgacagaaatgacatgtgnatatcgggcacactcaagagactctatgaaagtctctgtctcgtcatcagggtgacacatcggagactcaggaaagtactgctgttctctgtgaggagatgattaaataaaaatccagaaggacagaggattctcacccttgaatttttttacttcatttttcnacactgctattatcattatctcagaatgcttatttcccatttaaacgccctcagctgcctcctagaaaaaaggctggctgtattattattcccctataattagtcattatggtcccttaaagctggacctgcctttccaaggttattagaaattaatggaggtttttaagtaggaattaatatggattccctggtttta

SEQ ID NO: 589046 - DNA, 255 bp, Homo sapiens
tgattctagaggatcccatggaactcccgacgttaagagggagacagacgaatcgcaactgcgcagccacagtagggcccagacagagaatgagggaaaatgactgtaataggcaccaaactcagtgcctgggtctgagaagacagtggatcctgtagcgattattctgttcagctggactgtgataggctatagtccctcagagacacctgccatcctcgataatcacactgcctaaggtgcacatcctagggt

SEQ ID NO: 589047 - DNA, 1660 bp, Homo sapiens
  misc_feature (1)..(1): n is a, c, g, or t
nctttctcttctctctttttttttttctcccctcgcaagcatcgaacgagacgaacgacgaagcacgtgaacgtaagtcagatcatggctcgtgctggttacgcgtcttcatgctagctcagtttacctatcgatacatcgaagatgatgcatcctttctcctccctcttatgaggagatgcctacagtgtgggggacgcctagctgtgttgtcatgcctgcctcctcaacaaagaggaggtcgttctttctagtgaacgcaacatgggtgctgttttccttctgcccgccctgtgtgtgagcagccactctttttctctgctaggggtaccaacccaagaaagtgtttgtctccaccccccctcccggtgtcttccaacaagtgccttctcctgtcagcacacaacaacgtgttgtcagcaccccgtgctccaagagttttcctccaccacaacaaacctggtggttcttcctggagaaagaccttctttgccacacacccacggctcgtgcacagcttagctgggcccaacaacaaagaaaggaactgcttgtggtggccgcccaccccctcctcggcgaaacaatcttgtggtggctctatttgtccacccccgggcggttttttctccacagaaaaaactctgttcccactccgaccctctctttttttgagacgacctgtcacacaaaaaaattcctgtgggtgacaaaagagtgctgtctttctcactcggcagtcttgtttcctgaggggagagttactctctctctgggagagatggggcccctctctcctgggtgttcccccaccactctctcgcacaaccacagtgtctcaccacactgtgtgggtgagacacaccgagctaccccccccgctgtgcttgtgaggaaatacccccgccccccacacatctttgtgtgtgaaaatcccaccacacaaaagagagtgtggttttgaacacacgcgcgcgcctctcgtggggagccaccccccccccctctagggagcgcgctctccctctgtggcgtcacacacctgtgtgacccacccacacgcgcgggcgtctttctctctcttctctgagagtctctctctctcacggtgctctacccccccctctctctctctccacacctctcttgacacacctgctgtgggcggtgtgcgcgtcttttcgtcaccctctcatccgagcagcactctctcttttctccacagaattccactctctctctctcgctgtgtgtagtagacacacacacaaatctttgtgcgatgcacacacacaccaacacacaggtggtgtgtggcacaccactcactatgtgcgcacaccactctgtgcgcgccccaccacagaggtgtatagagacacccctctcggacgcccaccacccccctccaccaagcacacaacaaagtgagaaaaaagaatccctctccactccctctgcggaggtttctctcccccacacacacactcactcttcccccccccacacactcttattcttcctcctccctctcaccacctctctccccaccttaaaaccccctctctataaagggagagggcccttggggacacccccccctttctattgttcccccatcccaataaaaaatcccctcttgtgtctctctcactaaata

SEQ ID NO: 589048 - DNA, 178 bp, Homo sapiens
tacgtggtcatataactagaagtagtgaggcttgggcaggtctatccagcttcaaagttgtttggtgtgggttttgttccccttcatgagttacgaggtttctaatagaaggatttggttaggttagtaatgtagttaaccagctagatttatttgaaggactttaggttttcttttg

SEQ ID NO: 589049 - DNA, 1554 bp, Homo sapiens
  misc_feature (883)..(883): n is a, c, g, or t
aacgcagctggtgtgttgtgtcgtgtcgcggtcgtcgtgtgatatcctcgtggcggtgctcgtcctgcgggggtagttgttgttcgtgctgcggcgcaccgcccgccgcgctgtgtgtgtgttctcccggccgtggggtggtgtttagtgtggtggttgctacccctgccctcccgcgcgcgggtaggtgtgttgtccgtcctccgccgcggtgcggcttcgttggatagttgaggttcgtcgttgtttttccttcgccgcccccggcgcggggtttcctcctctatgttgtttgtttgtggtgggggttcgtgcggctcccgccaccccctcggtccttcgttcggtctggcgggcgccgcatctttgttttgtggtaagtggtgtgtttggttcttggccgtccgcacgactgagtgtgttttgtgggtggcctccgcctcactgtgtggtgtgtggttgatacgctctgttgtgttttgtttttctgtcccgtcccccagtgttgttgtggggtggcgtccgtctgcctgggctggggcggcgcacccgtgttgtttttgtttctgctgcacgacccgtgcgttctgggcgccgtctctttatggtaggagacttgctgcgtcgtgtgtgtgtgttaactacgcatgcgggacgcgcgctctcgtctgtcatgccctcctccgtccggttgttggtcgctgcgccgcttccctctcacacggtatttgtgtcgtcctcctctctctgcactatagtagttgagagcgcggcgtgatgtctctctcgtccgcacacatagtagagagcagctgctgctgcgctgctactctactcctctcgtatgtatctctcgccccactgtgtgtctttactcgcgtgngcgcgtcccccgctctctcgggcgcctcgccactctctcgttcgcgcccagcgagtctctctctctctgtctctctcttcatctatgtgttatgtgtcgtcgcgcgcgagagaatattatatagtctctgtgtgtattctcccgacacacacactctcttttgtgtgcgcgcgctctctctcgcgcgcgagtgcactcccgccgctctctcttctctcgcgcgctctctcccccgcgcgggcgcctctcacaccctccctctctcgtctcacactcttctcttctctctctctctctgtgtggggcgctctctctctctcttttgtttctccgcccccgcgctctctttatatataatatattttctcttagttttgtagtagagacacacactctctctctctctgttgagagcagccataaatattctctctatatatatatagagagagagacacacacaccctctcctccacccgcgcgggtggagaatatatatagagagagagacacacccccccacccctcccccccctcgttggtgaacacccgctcttactcacactaattatttttagacacacacaaaagagagagagagagagagagggcacccccccccccggggttgtttcccaccccccccccgtcctcccctcttttttttctca

SEQ ID NO: 589050 - DNA, 306 bp, Homo sapiens
ggtgttgagcagttcacatctttatgcaactttaaggaggcgcttgatgtcaggctcgatgtttactcgttgggaaggtgcggctgtagcgtcgtgaagggctctccctccggccctatgaggaacttctcacagttccaggcctcatctgagcggcgcacagggactccaatactgatgagcttgtgcgatcggtcctgacggaaaatgtggtcaatcataacggttggggagcttgtccttcaagtaggcgaagacaggatgctcgttctgcccattcacctcacatttttggacaagggtgaa

SEQ ID NO: 589051 - DNA, 667 bp, Homo sapiens
  misc_feature (49)..(49): n is a, c, g, or t
  misc_feature (156)..(156): n is a, c, g, or t
  misc_feature (621)..(621): n is a, c, g, or t
acgagattcatcaatgaagtattgcacatcaggaagtcacacgtgcagngtatgcgggtatgatcgacgtcgcatctgcgacctcttgctatcatcgtacatgtcgtatagatgctactgtacgcatagcagcgcgttagcttagctctgccccanggtgtgtattcctctgtcattccatccttcctggtccaggttaggatgtatagtagaagtcgaggtcttccattcatcacagttctctagtctgagctatggtaggctgtcttctggcccccctcccaatttcagccacagccgttcccaagcaccagcgtggctcctggtgccagtgacctgccaggaggccccttgtgattataaaaccgttcagttggaccgggcgcggtggctcacacctgtaaccccggcactttgggaggccgaggcgggcggatcacgaggtcaggagatcgagaccatcctggctaacatggtgaaaccccatctctactaaaaaacaaaagtgcaaaaagttagcctggcatggtggtgggtgtgtgtagtcccagctacttgggaggctgaggcaggagaatggcgtgaacctgggaggcagagcttgcagtgagctgagatcgntgccactgcactccagcctgggcaatagagtgagactccatctcaa

SEQ ID NO: 589052 - DNA, 314 bp, Homo sapiens
cccggaaatcgcacggagccccggtaatcgcacggagttctatacattaaatatatgcaaatcttttaataatctatgttatacaatgaaaaaatataggattctaatagaaaacccatcaattcagaactgctggacgtttcccatatttggaggataatttttatgtaaataatgtattgatcttgtgaataatgggttatatatcatatttagaaaacaatctctgatggcttcttacagaaccttgtcagtctcatttttatttatgcaagcctaaggtatagaagatgtttatgatgactaacgatttg

SEQ ID NO: 589053 - DNA, 398 bp, Homo sapiens
ggctagtaacaagagctacagctgcaggcctgcaccacagccacagacacgccagatccgagccatgtctgcaacctacaccacagctcacggcaacgctggatccttaacccactaagtgaggccagggatcaaacccgcaacctcatggttccgccgatgggtgccagtgaacccacaaacagccctttgtgcagacagctgtaaaagcagacgactcacctttccttcagagagtcttataagattcaatcacccctaaatggacaaataaatcaatctacaacagaacctggaagaggaagtttgcatgtaatgcattcctcccaactccgagccaagcactgtgcgtgacccatcggcgtgtgacccatcggcgtgtgacccatcggcgtgtg

SEQ ID NO: 589054 - DNA, 108 bp, Homo sapiens
atgagactgcagattccatcatcataaggctccctcttgtagctctttaatagctacatccacttacctcctgcccgcacccgctccattatcctggcaatcaagctt

SEQ ID NO: 589055 - DNA, 221 bp, Homo sapiens
acttcccccggggaaaaaaaccggcccccccttgggccggatagggggggaaacccaatttttaaaaaaaagcccccaaaaattcccccccccccgtttattggaaaggtgtccaaggttaatgtggatcccaaaaaaaaaaattttgggcccggtacccggtttttctttttttttaaaaaaaatggtaggggggcattaaacccgggttttttttttta

SEQ ID NO: 589056 - DNA, 214 bp, Homo sapiens
tctagaggatgccgttgtggtttattgaacactcacatggcagtgttaaaagtaatagaatatatgtttattgtgttggtgtgtatgtatatccacccacctcacaccactaaacatacccaggagaaaaggaatctcttctatttcatttattccaaagataatttagttcctaagatgcaatgatgagcaaaatgagtgtccttgttttgtt

SEQ ID NO: 589057 - DNA, 88 bp, Homo sapiens
taaaataataatctatccaatttatatgcattttcattttatgtccatggtatgtactttattattaaaatataaataatgaaaaaaa

SEQ ID NO: 589058 - DNA, 366 bp, Homo sapiens
gtgtgtgtgtgtggtgtaagtgtatgtgcgtgtgtgatgtatgtctatgggtgtgtgggtacatgggtgtgtatgtgtgtacacaggtacatgcatgtgcactcaagcccctaacaccaggagcctgctagaaggagatcccaaccattcattttgtcaatgatccccttgtacccatctatcatggatatttgggaaacctttccatacctaaaatccaccaaatgaatttatgcagagtcaatttgtatgtgtatactggtgtgtatcttgttcctcaagattccatctctcttgttatctgagacagattctatctctgaactccaagctgcctctctctcctcagcaagagggtgtcgacgc

SEQ ID NO: 589059 - DNA, 103 bp, Homo sapiens
acaagaataggacaatgtttctgggatcttctaagcttcaggggatttgaaatttggtgtcagagactgtttactagggtgacttttgtagacagctagaaaa

SEQ ID NO: 589060 - DNA, 361 bp, Homo sapiens
  misc_feature (1)..(1): n is a, c, g, or t
nacccggaaaatgcccagggtctgcgaggaagcccatagctgtggaatggggtctgggcactcaggggtggcccaggagagtacgcctatgggcggtcttgtgggaacatatggcacagcgagctaagggaggaagctgtgcagggtgaggtcatccccctcacgctcccccatgccatcctgcgtctggacctggctggccgggacctgactgactaccttatgaagatccagagggcccctcacccccatcatgaccaccacggccgagcgggaccatctcggtgggggagtaattacgcacggggtacatgtggcccttgcgggagaggcggaccgccagcaccacagtgcacacgaa

SEQ ID NO: 589061 - DNA, 116 bp, Homo sapiens
tcttctggtgagcactgtgcgggaaacttaggataaactcgtgagctgcatgccttttaaaggcatagcctgtctcctcacttaagttcatgtccatcgaccaaagccctatactg

SEQ ID NO: 589062 - DNA, 364 bp, Homo sapiens
caaactttgttcattgtagatcacaagggtattgcactattaagtatattgtactatcaccagaacacaatctcacaacaaaagcactgttgattcttcttgatggacattgtcaacagtgtggggtttgagtgagtctcaccaggtatccaggtgaagttagaggttccactgtagacgttgtggccccattattggcagaaccaaacaagaactgcacaaagtgcttgtagaggccatcaaagttccctgcggtaggaacctcaggagcggcgagggacagtcctgcctcatcttcaacgcagatgtacagaccatagataactgtcaccttatcatagactcatagatcaattgtcgacgc

SEQ ID NO: 589063 - DNA, 531 bp, Homo sapiens
  misc_feature (489)..(489): n is a, c, g, or t
acgcgtccgggagtgttctgcactcctgacctgcccaatgggtttagctgattccaaagaaagactacgaatggtccaggccaggagcaatccctggtcagttgggaggagtcttaggggacccgttcttgtccagcctaggtctgtcttccttcagccaggtgaggatattattctcagagcagcaaatccactaggagagaggcaataaaacctgccttgacattcatttcaccctttgatttgataggaaaaggaaaagaaaagagctggtggttaaaaacagccccaaagagctaagaaaccaaagagcaaaaaagcccagtgcacttcacagtgagtgtgaatgtgcagacgttctcatggaatctcacatttcatttttttcaatctctttacactagaaagtctttattcaaaaatagtaattttcattcagcatttttcaagtatcataaagggattttaataagtcatattcaatggatntttccagttaacaaaatgtattcatgtgattactgttttatg

SEQ ID NO: 589064 - DNA, 377 bp, Homo sapiens
  misc_feature (8)..(8): n is a, c, g, or t
  misc_feature (29)..(29): n is a, c, g, or t
  misc_feature (91)..(91): n is a, c, g, or t
acaaaaanggttaaaaagtcattgaaggncctaacccttactgccctcctttgtatcactgtcttcctaaataattattatggctgggtancaggtgtcacgcctgtaatccccagcactttgggaggccgaggtgggcagatcacaaggtcaggagattgagaccatccctggctaacacagtgaaaccccgtctctactaaaaatacaaaaagaaattagctgggcgtggtggtgggtgcctgttgtcccagctacttgggaggctgaggcaggagaatggcatgaacccaggaggcagagcttgtagtgagccgagatcgcgccactgcactccagccggggcaacagagcaagactccatctcaaaaataaat

SEQ ID NO: 589065 - DNA, 569 bp, Homo sapiens
atccaatccaaggatgcccaaatcgtcccgcacatccagtttggcttgattgtcgtattaatgtgacacgtatcgcgaggtgtaagtgacggaggagttctcgagagtcgttttctaatggggagggggaacctgacggtgtttggcgatttagcttggtccgtcgcttcgactaatccgctgattttagcgcgaagctgattggtagtttattgaaggatctccgtctgctcttgggctggtttggggggggactggggattacttttggtgtattgaaatgtggcttcggtgggcgaagatgtttgtctgataattcgagggtggggtggttattgaccgacctatagttggaactgccgtggttacgtggtgggtgactttagcataggtggtctcgattattcggatatgcgggtttgggactatgctatattgaggtggggggatgaactcggaaggggtttctgtttttctgtgtagggggagaggtagtgttcggggtgatgtttttggatgatttctgggttatattcctttgggagatgttgagggtatctattgtatcg

SEQ ID NO: 589066 - DNA, 236 bp, Homo sapiens
  misc_feature (127)..(127): n is a, c, g, or t
  misc_feature (190)..(190): n is a, c, g, or t
ctcctttcccgtcacaagaaaaagtggtgccgcttcgcgacattatcacgcccaaccagtttgaggccgagttactgagtggccggaagatccacagccaggaggaagccttgggggtgactggacnatgctgcactcttatgtggccccgaccaccgggtggtcatcaccaagctcctgacctgccctnccccgcagggagagaaactacctgatttgtgctgccggagtcagag

SEQ ID NO: 589067 - DNA, 420 bp, Homo sapiens
cctacctgctgggagttcagtgtggctatgggacttggttttgccaaattaataatacccaagttggttttaaagtggaggaaggaaatggtttttccctactgtggccatcaaggaagggtatgtttataaaaaaaaactgtgagatcgaatggcatgctaagtcatcacgcaaggacagttgccctggatggcagccacccaaacccaaaagcagaccagggtgagctatgaataaacttgtataaatcctaagatttggggaatgttttttactgtggcatatctagcctattttgactatcagaactggagattttaataaacattttatttatttttttatttatttattttgagccaagattgtgccactgcactccagcctgggcaacaaagtgacactccatctcaaaaaaa

SEQ ID NO: 589068 - DNA, 196 bp, Homo sapiens
cctggtaggtgcagtgcagataggatcaaagcaagcagaggacatggaagggctagactggctaagtcttctggcctccatctttctccattactggatgctacctgccctcgaacatcagactccaagtcttcaggcttttggactcttggacctagaccaggggctctcagaccttcaaccacagactaaaggc

SEQ ID NO: 589069 - DNA, 171 bp, Homo sapiens
gtgtgtacgagataagttcataaccattgtggggcaattgctttgatggtaagggagggatcgtagatgcgtcgtgctgttatagtaaaggatgcgtagggatgggagggcgatgaggactaggatgatggcggggaggatagttcagacggttactatttcctgagcgtc

SEQ ID NO: 589070 - DNA, 470 bp, Homo sapiens
  misc_feature (112)..(112): n is a, c, g, or t
cataaaacacttgttgtaaacttaccgtaactaaaacagtgtagtattgcgacaaggttgggcagctagataatgtaagagaaatgggaggccggagctagactcacacacnctatgaaaactgatataggccaggggtagcaggtcagttgcaggtcagtggccagatgtgagcaattcaataaatgttactgaaaaacacacattagccacatggaaaaatgaaattgtatccctgcctcacatcctacacagaaatcaattccaagtggttgaaaaacttaaatgtgaaaggaaaatctttaaatcttgttggggaaaatatagaatatctttaagggcttgggtagaaatagacaagtcacaaaaatcactaaccataacggcaaaaaaattgaagattggtatatttggttatactgcaattcaaatttctattcatcagactacaccacaaaaaggtgggacag

SEQ ID NO: 589071 - DNA, 161 bp, Homo sapiens
tcacagacctgctcaccctgtactacattgtccaacatgccagaggtgcgttcctgcttctgctggcatattaaatcaggaaaaaaaaatgcaggtcttggtgaggagggtcttgtgaggggcagaagcaggggcagaagaaggaaggcagaagcaggaag

SEQ ID NO: 589072 - DNA, 205 bp, Homo sapiens
acgatttctaaaaccacgtgacagtacctcgttagtgagccaaaaaaattggctcccatatggtcccatggttgatcccatattcgctttcacaatatcataacggtggtcctccagggctcgaactgccttggctctcgacactttggctggtgacatgaccaattcatatgtcctaactttcaaccccggttccatcgacctc

SEQ ID NO: 589073 - DNA, 737 bp, Homo sapiens
gctgagcaaaccatggggtatcacagaccttgccatctggccagtttgtagtaaccgatgtggaaggtggaaagctttggtgtttcacagtagatcgaggatcaggagtggtcaaatacagctgcctatgtagtgctgtgcgagccaaatttgtcaccgtgctggatgctgagggcaccgtctacttcatcgcaggagttagcctccatctggagaatcggccaaaagtgagcaccacctgggagggtggctttctccattggctctgtaggccctgatgggcagcgtgggtcgccagtacttagccacttcttctcggagaatgaggatttccgctgcattgctggcggtgtgtgtggatgctcgtggtgatctcatcgtggctgacagtagtcgcacggaatattctccatttgcctcgggtgggggctatagtgtccttattcgagagggacttacctgtccggtgggcataagctcctaactcctaaggggcagctgctggtcttggacatgtcgggatcattgcatcgaagatctacagttaccatcgtgagaaagataattccagcccataggggatgagaaatcatcagtttcttctgctgcccaagccaacttccgttccctgaagtctggggagaagtggacagtacagattagactcagactatgtcctgactccagctgagtaatttagaaataaaaagtcatcttcaagtggggttagtacgtcc

SEQ ID NO: 589074 - DNA, 305 bp, Homo sapiens
ccgggagcccgtaaccatcattaagtctgtgaccacccacaatagcagaatcggtccatcaccagtgacacagctccaaggtggggctggtcacgataggagatgaggtcggagcgcactaagacaggccacgcccgaggtcgcccacagagctggtgcggaagccgcagactgccaccttaggtgccagcagcaggaggaacgtttcgacgctatagaagccacggtccacaaagtccaccatgaagaggcagtcgttcgcagggacgtcgccacctactctgaacagctcttttatacatcac

SEQ ID NO: 589075 - DNA, 326 bp, Homo sapiens
  misc_feature (102)..(102): n is a, c, g, or t
  misc_feature (106)..(106): n is a, c, g, or t
  misc_feature (125)..(125): n is a, c, g, or t
cagtccaattgctatctatttttttatccagagggttaagtaaatgatgtgtggaaataatgtttgagcattaggccaatgtaattcttaatttctgggggnaaanatattccgaaataaaatanagggggggggaggggatagcaaaagtaatcaccaaaaccccctttcccatcttgcactgtttgttttggattgggtttgggggaaaaagatgtttttcttagttgtctactttgtttgaacacttttgttgtggttcaagtgctgttttgtgtgttgggaccaaacagttgtcaatacctttcaagcgagcatataaagaa

SEQ ID NO: 589076 - DNA, 424 bp, Homo sapiens
gtgaaagacgaaaataaagaattgtcccactatcgaccaacacggcacaggtctgtttctcgcacgcaacacacgggtattcatatcaagctcacgtcggtgacttcaggccgatagcaaatcgctcttctctctttcatcctgtgtttcgaggctttctccattatctcttctctagtttctgtatttcgcacaaaagagaacatgttctctttcttcgtcgtcgaaccttcggtgtgtgctactcctggtagcaaatatatatggagttttaccttctaactggtcttaaataaaagcgcagaggaagaggccacttgtccgctcttttcttcacctcaatccaccagacgtcttgtgataagtgacattataaaatacaaagaaaataacaaaataaccctaggcggccccgccaagctct

SEQ ID NO: 589077 - DNA, 637 bp, Homo sapiens
ccatgatcgtgggtgcagccactggaggcatcttgcttctgctggatgtggtcagccttgcatatgagtcaaagcacttgcttgagggggcaaagtcagagtcagctgaggagctgaagaagcgggctcaggagctggaggggaagctcaactttctcaccaagatccatgagatgctgcagccaggccaagaccaatgaccccagagcagtgcagccaccaggcagaaatgccgggcacaggccaggacaaaatggcagacttttttttttttttttttttggaaatggagtcctcgctctatcgcccaggagtggagttgcaggggcctcaactctcggctcaatttgcaaacctccgccctcccgggtttcacaccatttctcgggcctcagtctcccgagatagcgtgggactacgggcaccgtgccaccacgccgggctaaagtttttgggtatttccacgggagacggggttctcacggtgttagccacgagggtctccatctccgtgacctcgttgatctgcccacctcggcctcccaaaggtgcggggattacgggcgtgagccaccgcgccgtgccaaaatgcagacatataataagggggataaggagggcaaaggtaaagctatag

SEQ ID NO: 589078 - DNA, 221 bp, Homo sapiens
gcccctgtggaattgagtgtaagagtggaataaagttatcaaggacaatgccaagggtggggcacccccaaatttgactcttggagactcagccaaatcctatctggtaataaaatttcttttttcttttttttttttatattttttttatttttttttttttatttattaaattattaaataatatctaacattaattaacagcttacacataaacatac

SEQ ID NO: 589079 - DNA, 468 bp, Homo sapiens
cgcagtcacgacctgtaaagctgaatacggatgaatggtcatctgctatgcataactcaaattgtgactcgatcacttccgataggatagatcgttagatctagtgctacgactacttgtgatctaataacagagcctcatggttggagctccactaattgaatgacgactatgcgtctatgacgtgaatgatagtaagtgacatcagcgccctatgtcgccatcagtagcctattcgaaagttaaccgtctgtcctcatctggatgcatgcataaacacaggaactgcgatagtaaagcccttgagtcttttgaatagggagcgggctcctggatatgcagatccatggtcagcattcgtactcctcttgcgcatgatgatgcacgctgtgcaggtcattagcatcactaatcagctaactgctatcgagaacgtcaaacagcgggccgaaccgccgcgtgtcgtag

SEQ ID NO: 589080 - DNA, 425 bp, Homo sapiens
cacgaggaacataggcgagagtgtggcttcgcgaattcacttcgactggttcaccgatgagacccgccacctggtcccagatctcaccctggcggtcgcgatgacgtacaaagttcgaccaccaggctagttgctgttcttccgagacagctgactgtggcgcgagcaggtgaaggactaagaaggtgagggactcggacgaacccactctgggccgttccatcaagatttcgagcgccactagctccttaccttcagcggcttggaggtgccagcgctcgaagtcacggccaccgtaaagggcatccccctgatgctcagcgatgagagacctacgagtgacttcgtcggtcggacgctgatgccctagcttccgtgtagttcggttgcttggctgcactagaggcagtggccctgtcgaccaa

SEQ ID NO: 589081 - DNA, 625 bp, Homo sapiens
cgatggataacgttgtataaatagttaaagcagtgaggatctatgcaatcaccactggttcagaacgaatcaccaagggatctaattgaagaggcagtagttgacccatggggttactagaatgaacctctcaggattacttagacctgtgtatgacgagactttatgttcttgggctacccgctgcgcccttagccctaatataaagttgatatcagagagcaatatcgatgagtggtcaagccccgataatcgtcagtacttcaaccctgattggctactcgggagagagtttgaactctacgaatctcaagcggtagaattggctcgtcaattgaagttggacattgacgaaattgcacattttttccgtccgcgttctgagtttctcttggctccagcaagcagagttgcatattgccatttgtgcattcagtctgatgtagcatttaaaagatatccatcgtggagaaagtcttggtgctattcaacgaacgcatattgctttcagcatagatgtttgcttaggtttttaggtgacgctcttgtggcagataagcaatggaaagcattttggaagggggatgcaggtgattatcttccgggaaaaagagggtcgcacatt

SEQ ID NO: 589082 - DNA, 204 bp, Homo sapiens
ttttaaagtccgtatttcaaagataaataaggtgagaaatattttatgcttcacacaatatcttatggcacacattcttattcaataacattcatggggaatatgacaagacattcaagtttgacttttgttaagttacaacacagattcattaaagatattaattaaagataccacatatagattaagcttatcaatctattc

SEQ ID NO: 589083 - DNA, 130 bp, Homo sapiens
gagtatacgagtctgtgcttgtctgcttttgttggtgagaagaagcggaaagatcaaggagcccctcctactcccagaggatgacaccctgtacaagcgtcttctactatttgggtacctgagctcgaat

SEQ ID NO: 589084 - DNA, 334 bp, Homo sapiens
ggccaaacgtaccaacgaacagtcgggctcgtcggtcactacgggaccgctatggcgcctccctccggaaaatggcgaagaaaacttgaaatcacgcagcacgccaagtacacttcctctttctgtggcaacaccaagatgaacagacgagctgtggggatccggcactgtcgtctcctgcatgaagacagcgcctggcggcgctggacctacaataccacttccgctctcacggtaacgtcgaagcagctgaaagaccagtagacgcccctctactccttgagacatcactggcctctaataaatcgcttaatttctgtaacaacacaaaaag

SEQ ID NO: 589085 - DNA, 483 bp, Homo sapiens
  misc_feature (112)..(112): n is a, c, g, or t
aatcagctgggcgtcgtggcgtgcatctgtaatcccagctactcggccgactgaggcaggagaatcgcttgggccgaggaggtggaggttgcagtgagccgagattgcgccnctgcactccaacctgggcaacagagcaagactctgtctcaggaaaaaaaaaaatgttcttggttagggatgtttgaagaatagaggaagtgggctgggcacagtggctcatgcctgtagtcccagcactttgggaggctgaggaaggcagatcgcttgagcctaggagttcaggaccagcctgggcaacatagtgagacccccatctctacaaaaaatacaaaaattaaccggatgtagtggtgtgctagtccaagctactccaaaggctgaagtgggagattgggtagagcccaggaggtcaaaggctgcagtgagccgtgatcatgccactgcactccagcctgagcaagagtgagattccttatctaa

SEQ ID NO: 589086 - DNA, 133 bp, Homo sapiens
ctttataatgtcctttgtgttgtgaaaatttttcccctgaccccaaatggaaccggacaaagcccatccggggatatggaaaagtttcatgcccctgggtttactcagaaaaagtaaagtcctgaaacttcca

SEQ ID NO: 589087 - DNA, 1120 bp, Homo sapiens
ggttcttgtgctcaccatggacggccacctcggcctcgtcaatgaggacgatcttcagaactggtagccttagcacaggctgtgaatgctcgagccctgccagcattgcagcaaattaacctgtactaggacctcatccggaagctgtgcatatgtggtctgctggaggatctgagtcacccattaatatcgtcctttcatctgggggcctggcatgcaccaggaagtctatgcaaggcctgcatccagggaagttcatgccccatcatgcagtggcatatactcttgatgcccttgagatgtctccctgaggacaaagaggtcctcacatgaggacaagtgcctccaggcaccagaaccgcttatgacgggcacaggtggctgtgtttggctcagacctgcccgagaagctgggcaagcagaagtattgcctggtgggtgcggtggccattggactgtgagctgctcaagaactttgccatgattgggctgggctgactgagagggtggaaaacatcatcggttacgtgacatgggaacacccattgagagacggtcaaacatctgaaatacgacaagtatcatcatttccagggccctgggattgtcaccgaacgacaaaggtcatgaccacggcatgctgcaggctgtggcggccacaattgacatccacatatcccgaggtgacaaagccaccaagaaaccgtcgtgggagtccatagaaacgggaaagcggacatttcaatgaatggaaacgaaagcgtacacaacaaaagccgtagattggaagtggaccaaaatgaccatgagaaaaaacgtgggaatgcaccagagatagcagacaatgggaaagcccgaacaccgaaatgtagggaatccctacaatataccccgaggaaacaggtcgccaacatgtggcatgcggaactgatacacgaggagcaatccaccctgtggggagcacgaccaaacagaggcaaacattgaattagagagagtaggatagaaatccccaccctagacatcgagaaccggaagaactggaaaccaagtatcacccataccagaggacaccccgaacagtaaaaaaacgttcaacagaccaatcataggtatccat

SEQ ID NO: 589088 - DNA, 718 bp, Homo sapiens
acaagaaactaacatcaatactcggtaggaattatcttaattagagatacattggctatgattatctctggctatagatcgagatgtcagcgaataaggcggaatggagtaagtgacctaattgagaggctgcacgcgtcaggtaaagtccaatggctatagactcaagagtgtaggttgtcctacactctaacacgataaaatgagaacaatacatacaataccaacatgaccagagggaagatggaggtaggatagcagatgaaaacagacgatcagataggatgaccatatgatacgtagaagacacagtagaggctaggggagcaactggctttcctccccaaaaggcgggcagggttatccacactatgcccaggtccctgaagcctgcggctgagctcggggataacaggggccaagtcactggtcccagacacctaggaactattagagacaggaaccagcatatgagacaggggctgttaagtaggaggttggagaacacacgtaaaggtctaaaccgggggcccctctctttgcccactgagcccgcgtgctgcgtggtgctgagacttgcctctggccgcgtcagcttgggacaaggcctgagcggtggtgatcccacctggatgtccggggccgggtttccaacccggaaagccgggcaatcccgggacgcggtggggagaagtggcgcttgtcctttgccatgctt

SEQ ID NO: 589089 - DNA, 964 bp, Homo sapiens
gtgatagtatattcctcttgactctcgggacatgctggtgctgatgtgatagatgcataaaaccagatatgatgtcatgtgatgggtgtgatacagaaggatgtgtggggttacatggatgaaacatgactggagagagtgaggaatccagggctgacatgcatgcatacactctcgtggctattaatttgtagtgtatgtctagtagaacatcaattctttataagtaaggtaagggtagacggcatattaagtcagtagcaatttggaccagtatgatttgcattttattagaatctatttagacacgtatgggtagtcaccatcttaggtagaataataacatggcattaatgtagtagcgcgataatcgatttgtacatctataatgtgtagggtagaggaattgactgataagttgaccttgagggaagtggacgcttgttgcaaagaaaggggctgtatacgaatttagtatcctacatgagtaatttatggttgggaatgcgtagtacagataaataagaagtatgctcaattttggagtaccttggccattgctggaaaatcattactggcaatgagagctctctgaaggcgaaagaacaactctgttgactactgaaaagtggagaataaagaggatagtcttaagtgctgagttatgtacctatttcgttatataattgttacgaggcatcttgtgtagaaacttctcccagaaaaacgtgcgtgtctacgtcagggtgtgtttgaatattcacggaggagaaagtcgatactggtttatctcgttgagggggatttcatttgtcctgaattcattattcaaattatatttgtgtggaaaatgtgagttgtgggggggatcggggcccccctaaaaattgtggtaattggatgggggggcggcccaaataattaaagagggtggagtatgaaattggagagatgtggggtatgg

SEQ ID NO: 589090 - DNA, 179 bp, Homo sapiens
ctgacggatcattctcagaccacatagtgtctggactggtacacctctgataatcaggaagtgagagcctgctttgggttggattcttcttcctatgctgtcctgtgagtactcatggtatggagatcgggttatgtgtacactctatgtcaacagtgttccaactcactgtgtgacct

SEQ ID NO: 589091 - DNA, 127 bp, Homo sapiens
tagatcgagccggtaccgacagcatcctaaccagtacactcaccagagacaacactctgttttcagaccgcctggatggggggccatagcgacctcggggagcagagtctcagacactactcggaac

SEQ ID NO: 589092 - DNA, 604 bp, Homo sapiens
taccaactaagtttattctaaatctgttgtcatctcaacattgtttacactgtcttcaccacgagtagatttcatctcaagaaaccactttctttgctcatccttggaagcaactcatccactcacgttttctccggaggctgctgcagtctcgccagatcttcaggctctgtctctgattctagtgctcttgttatttccaccatatctgcagttacctcctccacagaagtcgtgaacccctgtgtcatctgtgagggttggaataatcttcccaacttctctctctctctctctttttttttcttttgcggaaatagaagtcttgcctgggcgctgggagtgcagtgacctgggagattgccccactggcactccagcctgggtgtgaccaaatgagtccatctcaaaaaaaaaagagaaacaagaacacactttggagacacatctttaatggcgtatttccacactttagaaaactctgtggaatccccaaaagcgtgtttggacccctgccaccggtgacattaaggattacgcacatagtaggtctttaccaaacgggaaacctgcaatatccctttttaataaatttaactcctct

SEQ ID NO: 589093 - DNA, 112 bp, Homo sapiens
tgaggcaggaggatcgctagagcccaggagttggagtctagcctgggcaacatagtataacccagtcgctaataatcaaacaaaatgacaccctcccccgcaaaaaaaaaaa

SEQ ID NO: 589094 - DNA, 220 bp, Homo sapiens
tccccgcactgtctgatgtgccgatgctgggcggcatgcgcacctttgagcacaggtctcagaaataacgccatatcgaactgatttttcatcgacgacctccgatgtaagcactcaccacatcgatgcggttatgccccaactcgtggctgatctgctgtcgcgcacgccgatcaggctcgcgatggtcgccaggcgcacggaccgccatgggacgggg

SEQ ID NO: 589095 - DNA, 147 bp, Homo sapiens
acccctttttccccccccagggcccaaggggttttggcaataaaaatagaaaacattgccccccctttccctgcataaggggggggggttcccccttttccctcccccattggttgggggaagggcataaaaatttttttttttgca

SEQ ID NO: 589096 - DNA, 393 bp, Homo sapiens
tgatgataagctaaggaagtttgaaattcgtgacatgatgggatttcaccatgtataggtacactgttgcccagtcagttagtcctgtagcccggccctagtggagagtgcctttggcgctttactcataaagctccctctttagcaacccctttgtcctcactgcctgtgtctctcagcccatctttaatggtctttgaattccacgccccaaagagggcagtccgcaccagtaccctcacccccgtggtgtttgccaccaagatctgcattggcgccacattgccatgacacctggcactccccccccctttgcctgcttttcaggtagaaaggcctggcttttcaacatttgcttccccccccttcccatcctcctcccagctgcccaaa

SEQ ID NO: 589097 - DNA, 619 bp, Homo sapiens
  misc_feature (232)..(232): n is a, c, g, or t
cagcatggacctgggacagtgaatcgacaatgccgatctctctgtcgtcgctgggggcaatccctccatgacatggcaggctctgtgctgccatggatcggcctgaatctcccttggtctgagtgaatccctctagaggagatgcttgcctccagaagacaggatatcaattcccagcttccgatgtagtccaaggatcaaagccaaatcattcacacaaaagtagtcaccncgcacgaacactagggcctgaagttacagcccctatgcagctcctattaaccggctcagactaggtcaagcactcatgttcctaaccatgacatcctaaataatctttcgttcgtccccgagtggagcatctgggtacagtccttagacaatgtcctctcgccgggggatccaaggcctagacactcacgattgaaataatcgcttcggtaggggcctttgcaatatttcaaatccctttccacacggatgaattccctggggaagggttttcagagaattcccactgacatgggcttatccatgagtaaacctcccctcgctggtaactcccgtccaaggacaaaggcccaggaacaaggcaccaagccgttccatagcttgaacc

SEQ ID NO: 589098 - DNA, 121 bp, Homo sapiens
acccaatgacgccagctccaaaagtactgggattaccggcataagccactgtgcccagccctgtagcattatatctaacaacaaacaattagaaaaattaaacactgcctatacttttttt

SEQ ID NO: 589099 - DNA, 334 bp, Homo sapiens
ttcaggcttcaacattgaatacgccgcgggcccctttgccctattttttatagccgaataccccaacctttttataataaaccccctccccggtacaattttcctaggaacaacatatgacgccctttcccctgaactttacacaaaatattttgtccccaagaccctacttttaacccccctgtttttatgaatttgaacagcatacccccgattccggtagggccaattcatacccctcctatgaaaaaatttcctacccctccccctagcattacttatatgatatgtttccatacccattacaatttccagcattccccctcaaacctta

SEQ ID NO: 589100 - DNA, 384 bp, Homo sapiens
  misc_feature (43)..(43): n is a, c, g, or t
  misc_feature (194)..(194): n is a, c, g, or t
  misc_feature (251)..(252): n is a, c, g, or t
cccaccttggccttccaaagtgctgggattacaggcgtgagcnatggtgcctggctatcctaatataaaacgaattcttttcatgctcactattttctcttcttgcctcctttcaaagaaattagtgtctctggattacctcactaaacatgtacagtgatactcatattcatcccaattttttaaataattgntttctctctgtaattttttaaaggagtttgtgcagttaatggtctgttatatgttgnnggaggggatgatggttcctagaaactcggcggtcatgggaatcttataacccatccacctattaatggacattatggccgtaaagtgttagcaccgagagagcatatgcagcctgctctatgggaagagaca

SEQ ID NO: 589101 - DNA, 1528 bp, Homo sapiens
gccacgatgagcagcagcttagctaagatcgcgtgagatagaagcagaagtataggttcgagagctcaaataggaaccaaggcacagcggcacaccgaatgagggctgcgatactcggcatccgatctctgtcctcacaagcctttcgctctgaggaactcatttactccgaatggtgcttggttggtagagtcgtgatgcgtccgaaggacgtacacggtattcagacttgtcggtactagtgatcaaggtagacttgtcctctgaagtgtgggattccgtcatgaggttgacccatacttggttgtggtgacatgtccaaactaccttggcctttagagaacccttggccaaggggtgctcatccatgtccctgaagagttagagcaggacgctacattgtacatcccaacatgacgtacgtagaacccgacttagttgaccacttggatagtccatcgtagcactacacagagccgcgttgcactcaaggaatctgaggtctccctgggatccgtcgccaaaggttaatcgaattggaaacaagggttgccccgaacgagtactagggcaatgagaggtcattcaaggtccagataccaaaacgattcaactctggacaatgctctgcgaccgcaggagacctcttggtaaagcattggcactcgtttggacttgggttcctcgggagactggtgcctgtcgcaaaaactcccgtgtttcggtgtgccaccccatttcacacgccgcatctgggaaagttaaggccttcttgcgaccagtgaataggttaaggcctctggttgacgaagaagttgcccctcctacgctgccaccacttcacgttgacccttgtgccacaccctgaggtcacgaagacaagcggcccacactgagaaccgaggtctagcggccacatcacatgacccgcccagagatcgctccatgtggcacacgccacgatggtgccaagcgtcttcgaattagaagacactgtcgtatgttacgaccccaaccaatcttaggccggacgccaagcgaaacgcttgggaagagaccgtagtgaacatcagcacttgggacacacatcacatgggtttgcagattgatgagaccaacatgtctgcgcttggaggactcttggacggcaattcaccgcgcgttacgaacatctttccaggttcacacagtgcgctgcttcggtagtatgtatagaacccctatccttatagcacggagaagcgcttgaacctattgccctaacgcctcggcccttgcacctatgggaagcccgttggcgtatatgactgtcgctagggctatgcgcgagaacttctgtgtaaatctagcacttgaaacggttgcgtactcttatgcgtacgccgcgccctagggcaccttcgtcttactatggttgtgatttacaaccagttaccctgaacttcacggaggaccaacgttgcacttccatgtagcgacatcttatgggcttgaggcaacgtgtatcggcggctgttatactacacag

SEQ ID NO: 589102 - DNA, 225 bp, Homo sapiens
tctagaggatctcgtgtcatcccccttcgtacagactcaaagcaaggcatgtggcacttctttatttcaaaacagaagtgtctccttgcacttaggcttggcagacccttgactcccggggagatgacctgggggaggaagtgggtcaactatttctttagggctgtttggctccgaagcctatatgtgcctggatcctctggcacgggttaaattttcaggtga

SEQ ID NO: 589103 - DNA, 302 bp, Homo sapiens
cttctgggtatatacccaccagaactgaaagcagttgaacagatatttgcacaacaaggttcatggaagcataaactgcaatagccagagatggaaacaacccaattctcgatagacggatggatggataaacaaaatgtggtacctacatacgatgggatattattcagtctttgaaagtaatgaaattctgacacttgctacaatgtggatgagccttgaagacatatgttaggtgaaatatgtcagacacacagggcagcattgtatattctccttgcatgaaatatctgaaaagtcaa

SEQ ID NO: 589104 - DNA, 360 bp, Homo sapiens
gagaactagactcgagtacaaccttatcctatctaactttaaacaaattgttattacacaaaggttggcacatagttgcatactactctactttgtacacaattattctcactcttcacagaacggctgcttaactggtcatctggtggtggcaagcactaagcagaccactgatccatgactattgaacccagtatcaggaatgatccgttatttattcaagattactaggtagaatactctgtacgtatggacaatgacgatagctgaccgttatatattgagtcaactgacaccagtaactgagggatatagcgattctcagtcagcctgtaacttcattgctacctgactgatctg

SEQ ID NO: 589105 - DNA, 114 bp, Homo sapiens
aatatagcgaccaaacttttaaacaatggattaacatatacatggtacacaggtcatgctgagtgctaactgtaatgcataggcagagggtgccagaattcacttttatgtcaa

SEQ ID NO: 589106 - DNA, 1866 bp, Homo sapiens
  misc_feature (1586)..(1586): n is a, c, g, or t
  misc_feature (1605)..(1605): n is a, c, g, or t
  misc_feature (1782)..(1782): n is a, c, g, or t
tagggttgtgtggtgatttctagcggtgtgtttttgttgagcgtgtgtgtgtgatgtggtctttgttgtttcttgcgtctttgtgtgtgttactggtgttgtgtgtgtgctttgtgttagcttggttacttgtgtctgtgtgttgttctgtgtgtgctgttttgggttgtgtgtgttggtttgggctgtgtgtggtagtgggtttgtcggttgtgtcttttgtttcttttcgttgtctttgtatggttttgtggtttgtttttgacgcgccgcgtgtgagtgtgtggtgtcacggcctgatcccacctggttgtattgacgcgattgtgccgccctcgtgtggtgcgttgtgtgcacaaggtgaacggacaccagtaatcgctgaggtttgtttagaggggcgtagcccactctgtatgttggtggagacctgtcctctgtggtaggggagatccactcaccccaaaagagtgtgttggttgacccgccgctaatatatgagcccactcgggccgctttgtgggtttggtaagtagcggtgcccgcgcccctctagtgtgttgtacttgtgttttgttgccggggtgtccctttaaagaggttttatgcgtgagggacccttgcgtggtgattgtgccgtagattttctcgggcctaagcgtggggggcccccgcttttcttgtgattggggggataaaccgctgtatagttttagttggttttgtttctccccggcgcgcccacccgtgggtttttccccacgagggtgtcgccagcccgctttttgggtgtttccccgccgcgcttaggtgtatattaggcttctgtatggatagtgtggctcctcgttcgaggagttcactcccgcgaggggtcttgctgtggcttgactacgctattggggtgtcctcccccgccgccgcgtgggtggttggcgcccccaccaaaagcaccggtgggagtattgggggcctccccccgcacggtgtttcttatatctgcatgcgcgggtagagggctcggcgcacccccagtcgccaacggggggcaatatagcaacaccgcacgcgcgcggtgctgctgtgtggagatgttatgtgttcccaccccggggagcacccttccacgtggttgtttcctctatgccgcccgcctggcttctcgcgggggtgcccacctgcgcccgtgcaatgtctctctcggagctctctcatcctctgggctctgtttgataccggcttgtttcactgtctgtgtgtatacctctgtgttgtccggcctgtcgctctgtctctctggtctgtctgtccacttgaggtgtcgtctctcactgtgtgtctcatatagggcgcgggatatagagaagtgtgtggagacacacacattgagtttgtgtcacacatatcaccccggagagaacctctctgtctgtgtgacacacagagagagagcctctcacttgtcgcggaggcacatgtctgtttcgaccactgagacctgtcctctgtgtgtctgtgagagacgtggtgtctctgctgtgacaccggacactgtgggtggacacacgtgtgctgaactggataantttgaggggacaccgcggnggagactgttgttgtataaaataaccacaagagtgtcgcgagagaggacactcgtgtggcacacagcacatgtgataacacccacaggtatgaactgttcctctaagtgttcttaaagtgtggttagaatttctgcgtgcgttgtttctgtggtaacaggtgtaatacacgtaagantgtaatatcttgtatagacgcgagagaccctgtatatatttttccaggaatttatatgtatagcgtggagacacaccaaaatat

SEQ ID NO: 589107 - DNA, 109 bp, Homo sapiens
  misc_feature (30)..(30): n is a, c, g, or t
  misc_feature (45)..(45): n is a, c, g, or t
gctcccaccccaccctcttcctgtgtctcncgcaagttttatacnctaatatttatatggctttttttcttcgacaaaaaaataataaaacgtttcttctgaaaagctg

SEQ ID NO: 589108 - DNA, 276 bp, Homo sapiens
gtatttccccaagcagccattcccttgtctctctcctctccttagagctccctattctctgagaaacaataatattgaaattagtaactcacaatggcctttaagtattgacgtgaaaggaagattctcacctctctcactttaaatcaaatgctagaagtgactaagcttagtgagaaaggtatatcaaaaatggagataggttgaaagctaggcctcatgtgccatacagtgagcagagtcgtaaatgcaaaggaaaagttccgttgaagccgt

SEQ ID NO: 589109 - DNA, 358 bp, Homo sapiens
gcatggagacgcatatagacgaagatgaggtcaggtcatgggcagaccttcggatacggaaatcccagtactctgtcattactcggaagttggtggaggtgatgaccaaatacaatgaagctcaagtggcacttccgagaacgcagcacagggcgaatccagcggcagctcgaaattactggcaacaagacacaccgatgagtgagctggaggcgcatgtgggagagtggccaacccggccatcttcacttctggcatcattgactcacagcatccccagcaagccctcagtgaaattagagggacgacacaaggacatggtgaggctgaagagcagcatcaaggcagctcacgacat

SEQ ID NO: 589110 - DNA, 155 bp, Homo sapiens
agtccgtctcacttcatcgcgtcattcaactcgattgcattggaatgagagatggaatggaacggaatggaatggaatggaattaacccgaatagaatggaatggaatggaatggaatggaattaacccgaatagaatggaatggaatgtaattg

SEQ ID NO: 589111 - DNA, 226 bp, Homo sapiens
acacggatccccgttacagccattggttgatgctaacccagagaatgcgctatcgcactaatctgccactgtatatgaagtagtgggttattaatcaccctccttaattcattgagaaaatttttgtcccctttgtgacatattgaactagtgatttgaccagattccagactgattcacaatatcgttttcttctatcccactttttactcagttcctctctgta

SEQ ID NO: 589112 - DNA, 235 bp, Homo sapiens
  misc_feature (44)..(44): n is a, c, g, or t
  misc_feature (50)..(50): n is a, c, g, or t
  misc_feature (55)..(55): n is a, c, g, or t
  misc_feature (120)..(120): n is a, c, g, or t
tgctgttctagaggatcccgagcgagatcacatcaccgggtgantgtaanggtcngggcctgccttggggggtgactgagggtccaggcctgcctcgcaaggtgactgagggtctggacngtctcgcggggtgatggagggtccgggcctgcctcggggtgactgtgagggtccgatggaagacatctgtagtgtcctgtgccatcagggataccgagtctcgaagttcgtaagt

SEQ ID NO: 589113 - DNA, 531 bp, Homo sapiens
tatccccagatgtggtctataaatacaactgcctactaaaaagaagggctccagaaagaaaggtcggattacccacaaagggaagcccatcagactaacagtgaatctctctgcagaaaccttaaaagccagaagagagtaggggccaatattcaacattcttaaagaaaataattttcaacccagaatttcatatccagccaaactaagcttcgtaagcgaaggagaaataaaatactttacagacaagcaaattctgagggatatcgtcaccaccaggccggccttacaagaactcctgaaggaagcactaaatatagaaaggaaaaactggtactagccactgcaaaaacaaaccaaaatgtaaaaaccatcgacactatgaagaaactgcatcaactaacgggcaaaataaatggcaagcatcataatgacaggatcaaattcacacataacaatattaaccttaaacgggctaaatgccccaattcaaaggcacagactggcaaatgggatggggataaaccgcga

SEQ ID NO: 589114 - DNA, 123 bp, Homo sapiens
agctcgcattccctactttgaccctgggtgggctctgtgcagtcactggaggttgaagccaagtggggtgctgggaggcgggagagggaggtcactggaaacagggagagcctgctggtaccc

SEQ ID NO: 589115 - DNA, 251 bp, Homo sapiens
cacacacacacacaaatatacatatatatcaaatatatatgtatatttgatagagatgatagcaattatgtgtgtgtgtgtgtgtgtgtgtgtgtgtgtgttagccaagtgtggtttctcatgcctgtagtcccagctactttggaggctgaagtgtaagagttgcttgagcccatgagttagaggctgctgtgagctatgatcatgccactgcactccagcctgggcaacagagcaaaaccccatctcta

SEQ ID NO: 589116 - DNA, 1094 bp, Homo sapiens
aatcactactacaagctgttcatcccctggacgaatcagaagatccagcaatgactttgcgtgcagaggaacatgttgtgagttcaatgcacatcagagggcttcgaccgggctttcgctgacaatccaggaccgatggttgtgtttgccatcgcctaggagatgctagcacgctgggcgagtccctgcatggatcttccaggaaatgggccgtgaagacgtatagaagtaacatggtcatcatgcccggttactgcgtgcatgggtcaccgtcgtgccaggaagatcctcagcggggcagcgggaagctcgcagatgtcaggggcggtcagtgtgcatgggaggtcaagatgtcaggtggagtacatgtcatgtcagtcggctagcacggcgggacgccaagggtcatcatgcggcttgtgtgtgggccaggtgagagccggagatgctgtgctgctggtgcaatgagtcggagggcactaagcaatgagtggacgttccttgaatgccatacacgagtcgatgcaggaggctccgtttatgctcgacgtggcgggtggcgtgggggtcccatccatcgagtgtcatgtacggggtcatgtccctggtgcttgcatggctcatctcattacccctcgggggatccatgggggatcacaatcttggctactactgcctgtgcctaaatggtcggcaccacggtgtgcacacgcttgcccacaaccaaggccctcgcagacattgcacccggttatcgcattactcgggcgtgagtgggcttgcctcgaaaagcgcggagcgatcggcggcaggtggtatggcggcgccttggcgcaatggggcgatggggcaaggggttgcatcgagggtgacgaggactgtgagagggtgaaaccggggcgcgtcatagtttggactcggactgcgtggccaaccttgtccttcccggcagcgggatgttgtccccctgtggagggcccacaagaaagtccttccgcgggtcacatggcagcgagcaattcccttggatgcgattgtaaggggacaaggcagtgatagttgccacaggaaacggtcactcttggagaatgggg

SEQ ID NO: 589117 - DNA, 1007 bp, Homo sapiens
gggggcccggggtgcgcgtgccgcggtgggctttccacgggcccgacatgtagacctgtggttgctaggctccctggtgctcggcttggaccgcgcatggggctgggccctggcctcctaacggcggctgctgtctggtgcgcggtaagcttgggggggcgctcctcgccgcctcgtgtgccgcgaggtcggaaatgcattctcctctaaccccgtcccctgtggcgggccacgtggcgggcggtgtctttctagagctggcggtgctactgactggtgtagcccccgggtccctgagtccgagggactgagtcactcgacagttggcgctcgttgctcgcatgttatccttcttcatgtgtcgttcattggcgtggccttcgtcgcgtgccctccctggacgtgggtacggccgtgacgcccagcgtacagcactatactttgactcgactctgcaacgcgggcgactcttatctacctcatgggatgtccgtagatcgacccccaggagggcccagggaaggactcctcggtgtggtgagccctgaagtagacgcgacgccctccccttttgggagggaaccgcgcttcggaaggtgggccctgccctacggagaggagaccaccttccagggggacgggtcggtagggtaccccgttgactccgcttgttatctgggagcacacgtatgcggctgtaagcttccactagagttaactcgcaccgagtctgtggtagggccttgccgtctatcgcgattcaagaagggcgtcttattcgcgccaagacccaagagagggaacgcagcacggctgccgttgacaggcgcggccagatccgtcctcctggcctattgggtaccccgttgtcagagcgtaggagttttgcacctagagttttgcgcgattgggtaacgacccggcgagtcctttcattaccgttcggacaagccgttccgccccttggggcttcgctgggaaccctttggggggcccttacgcactta

SEQ ID NO: 589118 - DNA, 139 bp, Homo sapiens
cttcagcaggtaagttggcaataattttagataaaaataatggttccggatcattctgtttggcaacggtataaattttcccgccattttcttccaccgtccaagtacggattgatccaaaaggttttgcataatccag

SEQ ID NO: 589119 - DNA, 340 bp, Homo sapiens
  misc_feature (165)..(165): n is a, c, g, or t
  misc_feature (334)..(334): n is a, c, g, or t
gggggtattttattttacatatgcggggcggggcgatgcagaggaataatcagtttacaatattcccccaaattaaaactttcttcttgcgtattgacggaagatctattcgaaaatgtcgacggagcgtctctaccacttacccggttactcattgacttaacnctgttcatctttacaagcagttgagggggtttgaaaaaacccacccgaccttttttcaaaaaaatgttttacccggaccccccttttggaaaccggtctttttgaaagttttttcccaaacttccggttttccgggtaaaaatttttttgggggttttttaagaggggnatacta

SEQ ID NO: 589120 - DNA, 233 bp, Homo sapiens
acggtaacgtacagcttgcctgggctgagtcaccctgggagctgagctccgggagtcatgtatcttgagtgaacgcagtgtctgggtggggtccacttgtgagttaaataccatcactgcatcttcatgaggtgctgggatctcctaccaccaggatcacacggacacctgagggtgcatatcagctccacgctcaaagattcaggtctcggcggttgttgtagctgtacctc

SEQ ID NO: 589121 - DNA, 574 bp, Homo sapiens
agcggaatctttagggtgcgcgggtgcagtatatctcgcgctctctcccgtttccccctgccctttccccaaccggggcactcacggtcggcaggcaccggaagccagaggatggacaagcgcctgtgcgcggctctcgagcagtgcaacgtggtgatgtcgctctgagtgtcatacttcggcaaccctgaactgactgatctcatacaggcgaatcagtcgtggtactcatcatggttcgtcgaccttactgaccagctacgagcggggtcacatgccgaagagatctgctcatccgcagcgcattcaagcgaagcccaacttgcccctcggactatcaataccccaccaagtccgtccactcgtgaaatccaagtcagtacagcgcaccccttcctgaacacccactactgcagcaatcaatcactctcacatgcaggctacacaagctttacgacaacatcgtgtaagcaatccaatcccaccctaccctgcgcataacaaccgtaggcctgcgtgaggcacacatggacggcctacaagctaacactgaagctgggacaaggatacttga

SEQ ID NO: 589122 - DNA, 704 bp, Homo sapiens
  misc_feature (57)..(57): n is a, c, g, or t
  misc_feature (86)..(88): n is a, c, g, or t
  misc_feature (91)..(92): n is a, c, g, or t
  misc_feature (105)..(106): n is a, c, g, or t
  misc_feature (128)..(128): n is a, c, g, or t
  misc_feature (135)..(135): n is a, c, g, or t
  misc_feature (138)..(138): n is a, c, g, or t
  misc_feature (141)..(141): n is a, c, g, or t
  misc_feature (188)..(188): n is a, c, g, or t
  misc_feature (246)..(246): n is a, c, g, or t
  misc_feature (254)..(254): n is a, c, g, or t
  misc_feature (299)..(299): n is a, c, g, or t
  misc_feature (305)..(305): n is a, c, g, or t
  misc_feature (307)..(307): n is a, c, g, or t
  misc_feature (317)..(317): n is a, c, g, or t
  misc_feature (350)..(350): n is a, c, g, or t
  misc_feature (374)..(374): n is a, c, g, or t
  misc_feature (403)..(403): n is a, c, g, or t
  misc_feature (408)..(408): n is a, c, g, or t
  misc_feature (431)..(434): n is a, c, g, or t
  misc_feature (467)..(467): n is a, c, g, or t
  misc_feature (484)..(484): n is a, c, g, or t
  misc_feature (503)..(503): n is a, c, g, or t
  misc_feature (511)..(511): n is a, c, g, or t
  misc_feature (537)..(537): n is a, c, g, or t
  misc_feature (573)..(573): n is a, c, g, or t
  misc_feature (592)..(592): n is a, c, g, or t
  misc_feature (596)..(596): n is a, c, g, or t
  misc_feature (623)..(623): n is a, c, g, or t
  misc_feature (687)..(687): n is a, c, g, or t
gtagtaaacaatttcattgatttttcttaaatcaaaccacctcataatcggaaaaantcaagaaaaaaaaaaaaaaaaaaaaaaannnaanncaaacacggaaannggcctacctgggctagaaatgnggcgccnggnctnggcatctggaatggcttttggacactgcctttaacaaatgagaaaanaaagcaccaaaacattgtgcttcagcagcaggttaggaaactccacaaagaaaggggngggggggnttcgaacacagatcccgagtgacccagttcagtcctcaaaacttntgagantntgggggggtntcctctccaaaactccctttcagagtgacttanagatgggggtccctttaggaaganccctcccacgaaccaggctgatagggatntgtgngcccacaccccagacacaggttnnnngggggccccaagcaggttcccagctggtcaganatgggtcaggaggggcnagggctttttctgggcgcncagccggngggccggggggcttccggtgcctgtngcctcactcctctcctcacggctccttcccattttnttcacgtggggatgaagantaantgctattggctggcaggacaagaaacncctgtaaacagcttgggtgctgctcacccaaatgtgcaggctcctttgtcagaaagcgattatngtcttagggacagggga

SEQ ID NO: 589123 - DNA, 815 bp, Homo sapiens
aaggctgtactggtctgggggtaatggatcgcgagctgttgcgtgggctgctgtgctagcgggcgcgggcgcgtgcgggttgcgagccgggaggcggcaggcgtagtacggagtacggcggcggcatggcggagagcgaggccgagacccccagaaccccgggggagttcgagagcaagtacttcgagttccatggcgtgctgtgcatgcctgcccttctgccgcgggaagatggagtgagatcgccaacttcccggtgcttgcccagcgacgtgtggatcgtcacctaccccaagtcctggcaccagcttgcttgcaggaggtggtctacttggtgagccagtgcgctgacccccgatgagatcggcttgagtgaagcatctgagcgatgcagctcccggtccatggagtacccacatgcggggcctggacatcatcaagggaactgacctctccccggctcatcaaggagccacccttgccctaaccgctttactgccctctgacctccacaatggagactccaaggtcatctatatggctcgcaaccccaaggatctggtggatgtcttatcatcagttccaccggtctctgcggaccatgagctaccgaggcacctttcacagaattctagccggagggttgactgactgataagcttgggctacggcatcctggtattgagcacgttgcagggagttctgggagcaccggcatggactcgacacgtgcatttctctcaaggtattgaggacagtgcatacggggacctggtgaccgattggtggaggcaggctggccagattcctggggt

SEQ ID NO: 589124 - DNA, 207 bp, Homo sapiens
tacacattttccaccccttttttttaaaacaaaatttgggaacgcccgggaaaacccatctatgggcagggaaaaaaaaataaagagctcacaaaatgtgggaaaaaaaaaatctcatccccttttgttctctcgtattgtccctgttgcacctttccccttataaaaaacaccataaaaactctccccaaaaaaaaaaaacaaggg

SEQ ID NO: 589125 - DNA, 209 bp, Homo sapiens
  misc_feature (34)..(34): n is a, c, g, or t
tggccggacctattcatcggcacccatgtggatngtgagtcattaaccgctttcctgtccaaattacccagtctcaagtatgtctttattagtagcatgagaacagacacacagctattttgaattctctgtctgaaaggtcacatatgtctgtttctccaagattggtccctggtgccgatgaatagcgaggtgccgatgaatagcga

SEQ ID NO: 589126 - DNA, 715 bp, Homo sapiens
gagcagccgctgtaccccgcagagccgacagccccgggcatgttcctgagattttggggaacccgggccgagctccgggaacggcggcgggtacgagcggccccgtcgcagtccccggccgcagcgcgagtgcatgcccaggcgaggaaggttccaccctgtgtgccaaggcatcaacttcagtgagctggcacgtcatggagtctgcagtggatggtacagcctcagtttcctggtggcgctcagcgagttaccccatggccgtcgtgaccgtacccttcagtactagtcccgccactaggcctccgggccagcgacgttcattccgcggccctgtgagggcacggtactcccacgggagataactgatcgaacaggggctcgttgtgaaagcaacggtacggaatctgaccatacaacttgcgtacatgtactgaaagatacattcctggggccttgacaaggcagagtagcatttgaagagaagactgtcaggaaaagactacgcaaagggaatgctgcccagtacgtaggctttggtagacttgggaaggctcgctagcactggatcctcaatgcttgtcgatacaatctcctggcaagggaggcccaaaggaaggcgcggacacaaggacagatatccacgtgtgcacccaagcagaaccgaacacaagagcctccctgcccgtcccttgtacacttggtaattctccct

SEQ ID NO: 589127 - DNA, 413 bp, Homo sapiens
caggtcgtcgctgaacacgggttatttctggactcgtcaattctatgccacggatctacacatttatccttataccagtaccacagcgtctttttatttttatttttttgaaatggaatctcgctctgtcccccaggctggagtgcaatagcacgatctcgactcactgcaacctccacctcccgggttcaagggattcttgtgcctcagccctcccaagcagcttggactacaagtgtgcacccccacgcccggttaattcctgtattttgggtagagacaagatttcgccatgttgcccaggccggtctcgaactcctggcctcaagtaatcctcccgcctcggcatcccaaagtgctgggattacaggcatgagccaccgtgcccagtccaactctcctgactagagtgg

SEQ ID NO: 589128 - DNA, 418 bp, Homo sapiens
caaagtcaaacagtgccccactgcgcccagcctattttcttatattagatgtactattatttatttaaccgatgtcctataactgaaaagttaggtttgttttgttttttgcttggttggtatggctatgatgactgtccctgagcacttgtctgattacttccttcagcttgcctgctgaacatggaattgatggtctcaaggtcatcttttctgtaaaactctgtctatgttgctaaccaccttacactaaaatggtttgggttttcctttgttttccctaggggaaaaggctagcagcctttgggagtgctggatttcacacatctaccctccactggcaaaatttttatttcttctagtccatatccttatgaaatattctttatagaatgttgcttccttggcatttatcctc

SEQ ID NO: 589129 - DNA, 100 bp, Homo sapiens
ttgattttttttttaaattctggggggggggggggaaaaacccaattaaaaaccctggtttctttccatgtaagcattaaccagggtatgtaggtttcca

SEQ ID NO: 589130 - DNA, 696 bp, Homo sapiens
atggatgatgatgaaaatgatggagaacatgaggattatgacacaggatgaggaaggatgatgactgatcgatgaagatgacacaggactgggagatgagggtgaagatagtaatgcaagagaactggtagctgtctgatggcaatgatgttgttatgacacgctgatgatgctgagggtggtgatgggactgatctacggtacgcaaacagacaagaagagtatgggtggaggtgaaggtaatcacagagctggtgagttctcaaaacagtggtgaatggaaatacaggtgcgtagcatcaatcttcttttaactcgaggaggtttctagagaacaagagcccatcatcagcatctgaaagacaggcccctcgagcacctcagtcaccgagacgcccaccacatccacttcccccaagattgaccattcatgccccacctcaggagtagagaccaccaggttcagagaattcagatgacccgaaggcagtctgtacggacgtggcctaacagttgactccaggacataggtggcatgcaacagcatttgacgatgatgacagacgaacagattcctaggtactccaacctcttgtggtgcccacattcggtactgatggattgctgaagccaattcattcgccgaaggtaagctggtgtcccttagattccggtttggggcacttgaaagatatg

SEQ ID NO: 589131 - DNA, 374 bp, Homo sapiens
  misc_feature (326)..(326): n is a, c, g, or t
gacagaactggtgcttctgtggacttggccatttgcacagcacaagcagtgatggataactcctctgtctgtcccccaaatgcaactgtctgcgaaggcgattcctgcgtagtacctgagagcaacttcaatgcaattctcaatacagtgatgagcactgtgctcaccatcctcttagccatggtgatgttttctatggggtgcaatgtggaagtccacaagttcctaggacatataaagagaccatggggtatcttcgtgggcttcctctgtcagtttggaatcatgcctctccacaaggcttttatcctgtctgtggcctctgnatccttcctgtacaggctgtagttggtgctaattatgggttgctgccc

SEQ ID NO: 589132 - DNA, 857 bp, Homo sapiens
ccgagttaccgggatctgccctgtctgcagataccctcctctttccctgcctctccgagttctcccaccgtctgactggagcgtcctgggaggacacgtccaggcccggagggggcagctgagggctcgcctgtgccagtcgccgacggtggcgcgctccggtgcctgcgcgctgagtgtgctcatgtgctggtcagccactgggctgagtgcccgggacccaaggggagggggcaactgctggcgaccgtcggccctttgcgtcgctggcccgccccctcgcctgccagctcctagcccctgtcccccggagcggcgtccgtctcactcggttcaaggcagcgcgactgcgggtggcgcactgaccagggcgcaggaccattgggtgcgcgcggcacatggagatacggggctgacttgagagcccggcgccggtagagcagaggtcatcgtcactgacattacaaactacaacacgagcatagctccacggtgtgcagcgctacaaaagacacaagggatgccggggccattgcgacagcacagaaagaaccgatgagatggatgccttggtcgagattatgaggcccttacaaacagtgactaggaagaaatctacccaggtgatagatataggatgccatccgggaaccagacaaaagcccagagagcatataccaacgtgcattccccaatggttccccttggctcaccatggagagcaaggcacttccaacgtgttagtaaaaagaatacttagctattggaaagagacgacgacataaagccacgcaccaaaagattcccttaattgtacagggagcgcaagtcaacgaccttgagaactggaccaccac

SEQ ID NO: 589133 - DNA, 1786 bp, Homo sapiens
  misc_feature (264)..(264): n is a, c, g, or t
  misc_feature (300)..(300): n is a, c, g, or t
gccgaccgtcggagggcagagtggtgagttgctgggataatcggggggcggagtcccagcttagagccgaagcagtagaagtcacggcagcttgcctaatccatagatggtgggaggacgatgaaggaatagtcctggtaccgcgtgcggcgttggatgatgtcctggacgcagtgatcgtgtcagtgtatggactgccctcgtggacgtgaccagacaatcaatcccgcgagtcactgtccttgtacacagcacaatccattngcgatctatatgcatggacccatggactgtagaccntaccagagtggcgacacgtacatacgcatttggctgctcgacgttattgagccgtgtcacgcaatgccactaggaacaacgtcgtggatcgtgcagtgaagttactaggtggagggccgccaggggactgagacttggggagggcgttgctcataagtggcgcaaattgtttcccagtcggctatttccatagtgagagaactttctattagattcaccaaaagtaagaacatcgtttgcttgtccctaaatagcgcataatctctcgaaggcgtacgattactattaaaacctcggcgggttagttgctttgccgaagtctacgtaacttttcatcgtaatccgatgcccaatggcaaggaagatgcagtctagcactacaagggataattacagcggaaacctagcggcaccaacaagcgaggttgatagaaaggaacggcgagcggctgtaagccaaacggaacggcggtccggcaggtggaaaaaaggacttgaacttaactcgggaagagaaaccggtctttatcctttgtacaacctgtttccgctattgcggcgggccgttcccttgtaatggatggcaagcctggatttccaatcgcacttattactggaaaagcaacaccttcagaaggaatctgtagtaaactttcccgccaagtgtttcgcacccttgacattgcgctggagggaggcgttgtaaattggaacccaccatgtgtcttttgggatatgccacattgtggtaactcagagagaattttcttacacggtgtgactgtccccattaatcgtacctaactatggaacaggggctcttaccgatattacgtgccattctggttgtgcaacggggcgttcacgttcggttcgggaacccgttctgtggcttcattatggaggggagcgatacacttcctttagattcacaaagggtagaagcaaattctataccaaaatgcgcttcccagagcggaaaggggaatatccatacaacaacggcgaaaggcgcacgtctaccttcaacaagcctggcgcgcaacacaccacaaagaattgggcacacggtggaaatatggcgctccccgggtagccaactcagacagactgacatgggaccacgccaaatcaccaaatgtacggacatacaacacacccgagggcgccaaccaccttggatgaaggacgacaccgggcgaggaacagtgagaacagaaccggtggaaagtcaacaccgcagacaacggcgcggcagaaccagcatacgccgacgtggaaacaatcgatacggggtagcaccaaatgacgtcatgtgtttgcctcccaacactcggcagcgtgaagaccgccaactcaacgatccaaccacacgcatcacccacaacgagatgagacgctgacaagaagaaacacaaagagcacgacagcaccgacaagaaacagacgagagaccgaacagcgaggcacagcacacacgacaaat

SEQ ID NO: 589134 - DNA, 702 bp, Homo sapiens
gattacagtcaaaggggattgtctctgttaggcaggagtgggggtcacaaggtgctcagtgggggagcttttgagccaggatgagccaggagaaggaatttcacaaggtaatgtcatcagttaaggcaggcacgcgccattttcacttcttttgtgattcttcagttacttcaggccatctggatgcatacatgcaggtcacaggggatatgatggcttagcttgggctcagagacctgatattcctgtcctccactgtaagagttatccaaagctgggcatctgtgatggtccaggggcttccaaagtcatctggcagcatcagtcttcagccgctaagctgagaagatccgatttaaaattggtgagatgttccttgggctggttggtctgaggagcagagatcgtaggtggatcttatctcatggcagcaaacgagcaggaggacaaggggatcgatctccccaagggaggtcccctgatccgagtgatggcaaccaaatttcattcggcgtagctgtaatcccagcacatttaggaggccaaagccaggagaatccataagacgacccaggaagtacaagaccaggcctggggacacacacgcagcgcatactggatcaataagagcgcggagccgagcgcgtgcgtggcacggaggggcggagacgggatggtctggcactcggaacctgcggccca

SEQ ID NO: 589135 - DNA, 876 bp, Homo sapiens
tttatgtagtggtaatcaatgtgatttttacttttcatgtcaattttaattggaacatttcatatttacatgtactatacttcatcttccttatgtgtgttggaatgatttccttttattattatcttttacatttttccttttttttttttttttttttggagagggggtcccgctcggtaggcccaggctgggagtgggtgcagtggtgcgatctgggctcatgggcaacctccacccgcctagttcaagcgattctccggcctcagcctcctggagtagctggggattacagatgctggccaccacgccgggctaattttttttttttggaaagggagtcttcgtctgttgcccaggctggatgtgcaggggcccgatctgggtcactgggaacctcggcctccggggtccaggtgatcctcggggcacacagcgtccttaaggaaggggggatcacgggcagcgcgcccacaaggccgggactaattggggaattatagacagagacggggtttggccatgtgggccaggcggtctgggaagtccggacctaaggtgacccacggttaagctccgaagggggggataacaggggtgagccacgggcaaggccaattaagggttgcagagaaagtgggggtcaagcaaacggggcggggggcctgaactccggactcaggtgaccaagggctcggccccaaagggggggtacggggtgagcacgggcagtggagcaattaagtacaaaggcttggacctgttacacagtggcggacgcaggggcagggcgggagcaccgggtggatataaccagggtaaaggaaggggcacggaaagggcacaggggaagtcacaaggaggtgcaccttgaaa

SEQ ID NO: 589136 - DNA, 741 bp, Homo sapiens
agcggaggagatctaactaaaatcatttatgacagtagcaagagtaaacaacagattttcaatgtagagggaatagccttctactggaagaagatgccatctaggactttcatggctagagagtagaagtcaatgcctacttccagagcttctaaggacaggctgactttttttcttaggactagtgaagctagtaattttaagttgaagtcaatgctcatttaccattctgaaaatcctagggcccttaacaattatactaaagctactctgcctgtgctctacaaatggaaccacaaggcatggcaacacatctgtttacagcgtggtttattgaatattttaacatgactgttgagatctactgtttagaaaaaaaagattcctttcaaaacgctactgctcattgacaatgcaactggtcacccaagagctctgatggagatgtacaaggaaatgaatattgcttttatgcctgctaacacaacatccattctgcagcctgtgggtcaagagtaattactttccactttcaagtcttattatttaaaaaatacatttggtaagtctatagctgccatacatagctattcctctgatggatctgggcaagtaaatggaaaacctggacaggattcacaatctagatgccactaagaacacttgtatttcatgggaggaagtgaaaatatcaagattaacaagagttaggaaaaagtttattccaaacctcagagatga

SEQ ID NO: 589137 - DNA, 141 bp, Homo sapiens
aaaataagatgcacaaactgtaacttaaaactggaagtgaataggagaagtagggaagaagaaaagaaagaaagaggaagaaaaattagttgatggttaactaattcttccttaggctattcattttccatcattattaca

SEQ ID NO: 589138 - DNA, 343 bp, Homo sapiens
  misc_feature (51)..(51): n is a, c, g, or t
gatgaaattatgtatgtgtgtgcacatgggcaagcatgtatctggaggtanagccatcttgatacctttaaacaatgtgaaaatcagattctgctcagccctgtgagcccaggctctgcatctctaatcctttcaaatgtctctccctggcctcagtagcttcttccccagcatatgctaacagtgttcaacagaatccccaaggggcaccctcctcagagcccacaatggaaggagacagccaacatccaaaagctgtcctctgatctacacacgcacaaaacacatacacacacatacacacgacagtaataaataaaaggaaactttaaaaggtcgacgc

SEQ ID NO: 589139 - DNA, 411 bp, Homo sapiens
tgctgtcgatgtattactgagtgtaagtactataaggtagtgactcctttgacgatttctaccaggcacacactttattaaggaatctctttgtgcctcgacctttttattagtgactaatctggaatttttatcaagtgacgtattgtactgtttttcgtgtttccgagtaagtctcttgtataaacaacaagaggttgtgacattatcaatattaaagtggtactgtttgtggtctgtaattctaattcgattgtgaccacaaagaaaacgagggggggaaaatttttgttttatatattgacgtacagtgatatcgttgtaggttttgtctagttaaacaatgttagtgataaaccatctcgtttgaaatgggggttttcctttttaatttaattttttttttttgga

SEQ ID NO: 589140 - DNA, 686 bp, Homo sapiens
  misc_feature (506)..(506): n is a, c, g, or t
  misc_feature (525)..(525): n is a, c, g, or t
  misc_feature (614)..(614): n is a, c, g, or t
atggcctcgggtcggtgggcttctccaggcccagcttgggcctcccggcggcctctgcaggctcaagtggtcctgaagtcagcctctccaggcccagttccggcctcccagcaagcaagctcttttggctcagctcctgcccagctcccgccggcttttgtagaccctgaactttctccagcgaagctcctcagtcccacctcctgcctcccggtggcctgtacaggcccaggtctggctggagaacagcctctgcaggccccgctcttgcctcccaggggcgtctccaggcccagctctggcctcacggcggcctcccgggaccaagtccctgcctgcctcccagcagcctgtgtgcggcccagctcctccgtcacggtggcctgttgaggcccaactcatgcctctggcaccctttcgagaggcgtgagcccctgcctcacgttggcctctctcacgctgagggaggtcagcgtgagcccctgcctcacactggcctctctcangctgagggaggtcaggtgngcccctgcctcacactggcctctctcacgctgagggaggtcaggctagccctgcctcacactggcctctctcacgctgagggaggtcangctagccctgcctcacactggcctctctcacgctgagagaagtcctccctcgctgcctgttgaggcccaagt

SEQ ID NO: 589141 - DNA, 334 bp, Homo sapiens
ttagcgctgtcaagtgactagcaagtgagtggggttgattctgtcctaactaccctgcatatgtcaggctcagtcagcaaaggtatagatgttgctctaaggctgaggtcattggtcacattctacttggagacagtgattgcattcattgatttcatggttaattgctagttggtaggtaaaggcctctagatgattagcaatcttgataaaagaggcctagtaatgttcttttgaggttagaaatccttgctgctaggacagtctctgtgacaggttgcgttgaatgatgtcttccttatcaatggtgagcccaccagtgaggattactgat

SEQ ID NO: 589142 - DNA, 200 bp, Homo sapiens
  misc_feature (1)..(1): n is a, c, g, or t
ngaggtggcgtggtttgtctgccccttaaaaactcatgttgaaacttcatctccagtgtggcagtactgagaggggaggctttaagaggtggctggatcatgagggctttgccctcaagagattaatccactcatggattaatgacttcaggggttagtcgcttaatgggttatcatgggaggagaacgcgtcaaaatcg

SEQ ID NO: 589143 - DNA, 392 bp, Homo sapiens
  misc_feature (6)..(6): n is a, c, g, or t
  misc_feature (39)..(39): n is a, c, g, or t
ggaaanttgtgaggtaattaaatagtttccactgttttnccccctaaaaagggaagaagtttcctcactgaataattttacctgcttttcctacccaatcaaatcttgtaacagtgaagttttgtaggatatattttcctctctttttaaagtataatttcctagttgcattgtggttttattataggtttacgaatccttagtaggaacataatgtcttagggaaagtcgtagctggtaatcaacattcctttagtaaatattttttcatgtttcaggggcttgggatacaaaaataaatgcatttgaatgagcttgcaatatagaagcgtgtccagttttttaataaatgctgactcgattttttttaacttacacatactaaaaaaaaa

SEQ ID NO: 589144 - DNA, 438 bp, Homo sapiens
ggcgtccttatgtagccagaactacaggtgtgtgccacatgagcgcaaataatgttgtgtttctttctcctctgagatggagtctccctccgtcacccaggctggagtacagcggtgtgatctcagctcactgcaacctctgcctcctgggttcaagtgattatcctgcctcagcctcccaagtaactaggactataggtgcacaccaccaagcttggctaatttttgtatttttagtggagatggggtttcaccatgttggccaggctgcttttgcactcctgacctcaagtgatctgcccaccttggactcccaaagtgtcattaggtgctgggattacaggacagctaccgtgcccactctaatttttaaatttatggtagataaggggtcttgctatgttgcccaggctggtctcaaactcctagcctcaggtg

SEQ ID NO: 589145 - DNA, 735 bp, Homo sapiens
ccggcacgtgtctcggcacgtggcagcgcgcctgtgcccgtgggctttggaggcgcctggcgcctgaatcccgcctaccgtggtcgccctgaagtcgggtgtcgtccttgaccatcgccgacgcgttcattgcagccggcgagagctcagtctcggacccctatgtgcccggggttcccaggagggttcatcgttgctcccttcccttgacgtgcagcgcacaaatttaacaggcaaacagctgaaaatgctggacggcgcacccttggttgtagggcacacggggggaaggacgaccatttggtgcggtgacctaatgaaggggtgtggtgggcaagggccttttcatcaggcggaacttaccccaattttgagcccggccaaatttctggacctcaacaaccgggaagaaacacgccggttgggtgggggtgccagccccaattggggctgtgtgcattcaacaattttccaagcacgaaaatttcaacacgtgtggacacaaactcttttgtgggagcggccaacgcttttggaaacacttccaccaagaaccacaattaattattaatggccggtttgggaacgactctgggtaggaaaggacctctttgaaggaaacccatttcaggcgagggtgggaaaaattcccatccggtggcccacgattaccccaatgaaaccctcctattcagggttgtcccccagggaaggtggtggggacacacctttggc

SEQ ID NO: 589146 - DNA, 192 bp, Homo sapiens
gtgacacttttcttcagaagctggtcgccgccgcagctaccagagattcactgactgctatagtgcttctaccagttgcagcctgcgattgacacagcgaatctatgacaagtttatagctcagttgcagacatctatccgggagatatctctgacatcatagaggaggggacctagaagatgtattaaata

SEQ ID NO: 589147 - DNA, 108 bp, Homo sapiens
gaggattgaggaggagagaggaaccggacccggaggagttgtgggtccatagcgatgtgcggggtagagagagtgagagtcagggctttagagtgtttttctagagag

SEQ ID NO: 589148 - DNA, 247 bp, Homo sapiens
cgcatggggtctgtaggaggagcggatgaggcgtgagcagatagaacggaggctgcagagtgagagtgcccgtaggcagccgctggtcgagaaggaggtcatgatgcgggagaaacaattttcgcaggcacgacccctgacccgttacctgccaatccggaaggaggactttgacctgaagacacatatagagtcatcgggcgcatggtgttagatacctgcctgcacgtggagctcagcagcaagg

SEQ ID NO: 589149 - DNA, 118 bp, Homo sapiens
cttgcgtgatatcttctaatccttccgtcctcttcatcatcatcatcatcttcttctccttctccttcttcgtcatgccatatcgggaaccaagtagtagctgaatgcgtccgtgggc

SEQ ID NO: 589150 - DNA, 666 bp, Homo sapiens
tgcagtggctcacacctgtaatcccagcactttgggaggctgagacaggcagatcacgagctcaggagtttgagactaaaaatagtgaagctccgtctgtactaaaaatacaaaaaattagccaggtgcctctaatcccagctagttgggaggctgaggcaggagaatcatttgaacccaggaggcggaggttgcagtaagccgagatcgcaccactgcactccagcctgggtgacacagcgagactccatctcaaaaaaaaaaaaaggacaaagttattagattattagccattggacattagacattaattcattagacccggaacaaaaaaacctgtggaccattagacattacccgtgagaccaaagacacaaaccacagagaaaaagaaaagagacttagacaccagacaccattagaccttagaccaagaaccgaaaattttcgatttttgaacaagagactttaaaccacagaccttagaaaagacttgacacggtgggggccacagtgggctcacgcctggtaatcccagtacttggggagcgccagggggttggctcatgaagtcaggagttcaagaccagcctgccaacttggtgaaacctcgtctctactaaattgccaatgttacccaggcttggtggcgtgccctgtagtcca

SEQ ID NO: 589151 - DNA, 393 bp, Homo sapiens
tgcctagggtggctgccctctgccagggccaatgtgacagcctcttttaggtacccacactcggtgggtcccaagctcttgtcagcatccaagaagaatgaggtcacccggacacttgaaggatggtgaaggtggagaattttattaagcaatggaaatggctctccatggagaggggagctggagaggggatgggtcaggtggggaatcttcctctggtccaggtgtctggctggctcttccctgaagtcaggacgtctttccgaagttaaaccgtctctccttggaagtccagccatccctctgaagtcaagtcacctgtttccagtgaagctacttctctctcactaccaagtctggggtctttataggcaccagagaggggcggagcag

SEQ ID NO: 589152 - DNA, 261 bp, Homo sapiens
cccctttttgggggggggggcccccccccccggtttttaaaaaaagggggctctttttttttccccgggtgaaaaagggttttttttgggcccacggaaccttttttgggccccccccccggggtgaggggttttttccccttttgggggtccccttccgggtttggggggggcccggggggggggggggtttttccccttttttccgggggggggcccccccccccccccccccccccttaagggtttttttttttttta

SEQ ID NO: 589153 - DNA, 590 bp, Homo sapiens
  misc_feature (369)..(369): n is a, c, g, or t
  misc_feature (510)..(510): n is a, c, g, or t
  misc_feature (536)..(536): n is a, c, g, or t
gacctgcctcttctcaccaagatgaactcactggtttcttggcagctactgcttttcctctgtgccacccactttggggagccattagaaaaggtggcctctgtggggaattctagacccacaggccagcagctagaattcccgtgcctcctggcccccggggagcagagcctgccgtgcaccgagaggaagccagctgctactgccaggctgagccctccggggaacttcgttgtcccgaccccccgagagctccgggagcccccagcagctcggcctgtccgccccccacagccgccagaattcccccaccccagggcgcggtgctggtgcagcgggagaaggacctgccgaactacaactggaacntcttcggcctgcgcttcggcaagcgggaggcggccccagggaaccacggcagaagcgctgggcggggctgagggcgcaggtgcggggcagtgaacttcagaccccaaaggagtcagagcatgcggggcgggggcggggggngggcaacgtagggctaagggaggggncgctggagcttccaacccgaggcaataaaagaaatgttgcgtaactcaaaaaaa

SEQ ID NO: 589154 - DNA, 80 bp, Homo sapiens
  misc_feature (7)..(7): n is a, c, g, or t
  misc_feature (42)..(42): n is a, c, g, or t
cacccgncccggcccaggctagggccggatggtcgttgtccntgcactccggcgactgcgctaaactcccaactcctccc

SEQ ID NO: 589155 - DNA, 549 bp, Homo sapiens
gtagatgagactgacaacagaattttaaataacatttgtcttactcacaacagtgttcatcaagcttcaagcatggcaagaggacaaaatgttttgacattcacctaaagcaatcatgcaactctatgtacaggtatatgcatggtaggccctgcaacttgcagccaacatctgtcacatcacttttatcaggtcacaaagccatgttcttttatatagcctgtagactattcaaaatacaaaacatgtggtcaatggatcaacaactatacacaaagccctccacacttcaaatactagtcctggattgatgacagaggcagcacaattcaaacatttcatctagcaatcctaatggttcaacattttaccaggaacagacctgccactctcttgaaatactgtctctgagattaacatacgaacagcatcatctctgtaggaaggctacattcccttatgatgctgatatgtgtgtgtgtgtgtgtagtgtatggtattcgagatatgggtctctaagtgtccaggtaggcacagcacggggatcct

SEQ ID NO: 589156 - DNA, 930 bp, Homo sapiens
ggctcacttccccttccactggtgccccaggactttccctgcggtgggggccttcgacagtgagggccatccgctcagctcgatcgctgagggcagcgtccaaaggggaccccaaaggtgcccacgcggggctgggtggcctccatggtgcgtacgttgggagcggcactaccggctcgcgtggtcctgagctgtcaagactctccaaagcctggcgctgatgaggagcggggacaggcttagacgcgggtcatccagacagtggacggtgtccaggctgcctacatttctgcccggatcctctggcgtcctcatctctccggtctccgcagactaaagccctcgggatatgcagtgagccatgtgtgtgcaaggcgctgagccccggagcccccgtccgacacccgacctaccttgccagactgcggatcagggccctgggtacctgctacggggggacgggagatggggcgagccggaaagcgagcgctgcggagcgcctggaggccgacagggcggggtcacgtcaaggagcgctgcagcgtgggcaaacacccgcaaggaggccggtgtggagcccgggtgtccaaacagaacggtcttcaggacctgagactcggccggtacagggcgtcaagcacgagcaagcggagccatgcctggcacctgcagagtgggacaagatgcacctgggcatcctcaggagtctaatcgagttgtgtgacaagcccgtgtcccctgcgaggcagcgagccactggaagggacgacggagcgggagtctaacagaggaaccatcggaacgcagcagaagggatggacaacgggtgagagcagcccagcgaatggaggcagacggacacaccggaagaagggtaacagcataagcaggttgaagcccgagagaacaaagagagaaagcggaaagaga

SEQ ID NO: 589157 - DNA, 728 bp, Homo sapiens
  misc_feature (383)..(383): n is a, c, g, or t
  misc_feature (621)..(621): n is a, c, g, or t
agcggggcagtgccagctgtcggcactcgcggccgctgtgccagtgtctcggtggaccctgctgaacaggtgtggccctgaagaaggagcgtcgcgtgagatcgctgcatcactcaccctagaaggatgaagttgaaatccgatagcagctaggaaccctgatcctggcaaaagattgatagcagttctgcttgagttcctgtctgagcctggattctggactctgggaaggtgctaggcggggtcctgttcttccgttctgggtgtggaactcttgatggtagacacagcattgggcctggatgccaggatgagaggcatagtacagtacctgtgctgtggcactggtcgttgcgctcaggtgactacccgggcaacccgtncacgtcgttcccattcgtggctccgttgatacagtccactggatcagacgtgctgaacccatgcatcatcatccgatcatgtgtaggtcatgtgtggcgacctggagtgacgaaagctcgtctgcgcctttcgtacgtaacttccacagggttacagagtgagcgtccagcattgtggccttgattgctccttgcacatcgtgcccgatgccagggcttcgtgaccgaatctagcagnctcaagtcaaattcagtctggaaacttggttgctgtaagaaggctgtcttttcaccctctataacgtgagggacttactgttcctaaactgttgactaaagtggggg

SEQ ID NO: 589158 - DNA, 1051 bp, Homo sapiens
  misc_feature (732)..(732): n is a, c, g, or t
cagtttgtattgttacgctcgtccaggtgcagttcttcttcgaatagctcattgacgagtggcgttatggcttgcacgtatatgtgtcctacaattttctcgtagttgtgatagatgttggacctgacatacaaagctaaaatatgttggctgaaggttccagcggtggcacattcgccgccggagagattgggtggactattaatcagactgcacaagagaaaaagccgcgttccgtctactgtccggggctcgagagacagcctcatcggctacaggcccgtgagcgtgagtgtttagtaaaacattgcggtccgattactgcaggagacctcgcacgctgagcgtgcgtacagtcccggaatatgcgtagcctttgcacgcataatttagagtttgatgcgggatgagtcagcgcaccgatgttcataaaaaccgatcgatcccagcgttttctagaaagcggcaaactcatcggttcgcgagcttcgccaggagaaagcgtagccgatagagcgagtaccgtggtacgcaactctcgctacggaagagtaccgacacgcgttgtgtagccaattaccacagctacacgaagacgctcgacccaatccgatttgctcgccccgaagaccatccccagttagccatccagcctcgtgataacggagggggcacgaggaagattgccttaacttaggatccgccagttaaaacattcgttctgatacgagntagaattcctattcggtgctaggcaaatacctttggtgcccaaggtaaggctgagctttaatttccgtgactgcacaaattaggcgtattaatatagattgcggttgcgagcttataagttcttgccaatctggactcttgcggaaatgaagtggaaagcatcgcgactgggtaacaaaaccaccggtgctgtccacggcctcgttgctatgaagtgcccacttgctgatcttaccaacggagtggatgaaagccttgagttcattaagcatagttctgtgttaagatgccggctcctgtaatcccaaaggtacacgta

SEQ ID NO: 589159 - DNA, 186 bp, Homo sapiens
ccccttgaacccccccctcccgggtttttgccttttttctgcccaaaccttcggggggggtaggaactaagggcccccccccccccccgggccaaatttttgggccttttttttttttaaaaagaaaaaggggttttccccggtgtacccaagggggtctcctttttataccctgggaaccccccc

SEQ ID NO: 589160 - DNA, 183 bp, Homo sapiens
cgtgtagctccctgtgttgcccgttagccccgtgtcgtccctgtgtagccccgtgtagcccctgtgtagtccctgtgtagctcccgtgtagcccctgtgtagcccctgtgtcagctccctgtgtagctccctagtgtatgcccctgtagtagcccctgtgtatgccccaggtagtagtccctg

SEQ ID NO: 589161 - DNA, 133 bp, Homo sapiens
catcgcgccatctctgcttctgcttcctcttcttctgaagtcacttctatcagtgtcccattctgacccgtgggtagtggttgatctagctatctacaacagtccacggtgctatcaggacaggttatactaa

SEQ ID NO: 589162 - DNA, 144 bp, Homo sapiens
gatgcacaccaccatccatcagagcacatccatccttctccaacacattcagccatcgcatcacacaacagttcattgtccgtctccaacagcacaacacatcaattcgtattcgtcgccgtcacctgcagcactcagcatcca

SEQ ID NO: 589163 - DNA, 144 bp, Homo sapiens
acaggatcttcaacttcgacggacgcattcactgctaaaaaccctcaataaattaggtattgatgggacatatttcaaaataataagagctgtctatgacaaacccagagccaatatcatactgaatggtcgtcgaagggggta

SEQ ID NO: 589164 - DNA, 799 bp, Homo sapiens
  misc_feature (37)..(37): n is a, c, g, or t
  misc_feature (475)..(475): n is a, c, g, or t
  misc_feature (717)..(717): n is a, c, g, or t
  misc_feature (744)..(744): n is a, c, g, or t
  misc_feature (772)..(772): n is a, c, g, or t
  misc_feature (784)..(784): n is a, c, g, or t
  misc_feature (798)..(798): n is a, c, g, or t
tcgtgtaataccagtacagatgaagagatgagactgncaagcttcaaatgctttgcccacggtcaactagttagtgagtgacatggtgggatatgaactgtaatttcagaatccatcctttcattcctaatcgctgtactgcctccttagaagttgcccaagccaaagaaatggtttggttattgtttgttttgaggtttagaggaatattattgggggataatagttatcactaaagatttaaagttggttaaaagaaggggagactagacttgttctatgttgtagcagttagaaatgttttagaaataaattgggacatctgctgttttctaatgacattttaaatttcttaaatttacccccaccccaaatctctatgctataggtaaaattctatgccataaagaaaattcaattttttttcatttaaaaaatgacatttaaagtttttattgatttatttatttatttngagacagagtctcgctccctcgcccaggctggagtgcggtggccgattcttggctcactgcaagctccgcctcccaggttcacaccattctcctgcctcagcctccctagtagctggggactacagggcacctgccaccacgcctggctaaatttttttgtatttttagtaggagacggggttttcactgtgttagccagggatggtcttcgatcttcctggaccttgtggatcttgcctgncttcggttttcccaaagtgctgggggnttacagggctgacaacttggcacccganccttaagttttnatttaatttaattnc

SEQ ID NO: 589165 - DNA, 276 bp, Homo sapiens
  misc_feature (240)..(240): n is a, c, g, or t
taaatcagctcggtacctggcgatgtcgcgtgcatgtttgtgtacacgttagagcatggtatcttggaaaaatcagtctttctttctttctttctctctctttctttctttttcttttttttttttttttggaaacgggttctggctctgtcacccaggtgggagtgcaggggcttgatcagggctcacggcagccttgaccttcttgggctcaagcaatttccccacctcagcctcgcngagtagctaggactactgtggcacgcgacatcgccg

SEQ ID NO: 589166 - DNA, 148 bp, Homo sapiens
gtatagtcgggtcatcacgatcagctgggtttttggtttagtcatctagatgtcggtctggactaagaggtctttcagtgtctcctatgccctgtgagttgctgttgaaccatccccaccctgaatttgcctcagttgtcctagagcc

SEQ ID NO: 589167 - DNA, 130 bp, Homo sapiens
  misc_feature (47)..(47): n is a, c, g, or t
  misc_feature (74)..(74): n is a, c, g, or t
  misc_feature (107)..(107): n is a, c, g, or t
gcactccagtctgggcgacagagcaatactccgtctccaaaaaaacnttaactacattttatctatttactatnttttatatgggtaagaccagtggtcatcccgtntttcttttgaaagcccacttttg

SEQ ID NO: 589168 - DNA, 211 bp, Homo sapiens
  misc_feature (133)..(133): n is a, c, g, or t
  misc_feature (163)..(163): n is a, c, g, or t
ggcatgggctacacctgtacagtagcagttgtctggatggatcactggtcccttgacgacagaagattgtccctattggaatgaggtggagatctggtctggggggggcagctggggaagcatttgactatcnggaacttgtgtgtgcctcctcaggtatggnagtgactcacctggttttaataaaacaacctgcaacatctcaaaaaaa

SEQ ID NO: 589169 - DNA, 464 bp, Homo sapiens
cacggacgcgaagtcctcctccagagagttgtacaaggctcatgatatacatacgtgtatgtgaatgtagctgatgggtgtccggtggttgcagaagtgataatgtgtgtaaacagatggtgtggttggctcatcggaggggtggaggccctaagtgggatgacctctgaggtttactcttcctagagtagttggaaagcaattcagcctcagtggtaagctctcagctcttctagggcaggtccctcttccaccaccctgtgtctgcaagcattttggtattaagttgtttttctaaggctgggtgcggtggctcacgcctgtaatcccagcacttttggaggccgaggtgggtggatcacctgagatcaggagttcgagaccagcctgaccaacatggtgaaaccatatctctactaaaaataaaagattggctgagcgtggtggtgtgcgcctgtaatccc

SEQ ID NO: 589170 - DNA, 427 bp, Homo sapiens
tatgcttgctcccttttctctgcataagatgatacgccaattggaagagatgcttcatgtaactcactaaaaatcacttaatactcctcactgacacacatactcgttctccctaccatcagcagatggcacatatgttcccctcgtcttaaatatcagtgcctctgggttctgatcctgctcccgtccttccttctcgatggtggtgctcctgcaattctcttcccaactccagcatcaccaagcctctcccgttttctaaacatctctctacaataagcactttaaaatccttcagaatcttccatttaaaaattaaaaacaggccaggcatggtggctcacacctgctgtcccagcacattgggaggccaatgtgggcagatcgcctgagtataggagttcaagaccagccagagcaacatggt

SEQ ID NO: 589171 - DNA, 868 bp, Homo sapiens
tattgtgtaacctcaccaagggtttttttaaattcccattaaaaatattgtccgaggaaaagataggtcacaagaaggggttataaagggggtgacagcccatctaaaagggggagcgggagataatgacagtagtaaagtagcaaccaaagattcacttccaagggcaaagggtggagaggagatcatatggcgaccaaaatttatcccatacaaaagcacatggcgatcaagagtttccataagatggaaaacaacacacccttacttcatagcatcttaccacgtctacttacacaattagcccataaacaccctcgggcggatggggatggcgagtcaccagaactctccccgaaggagggaactcatttagctatagaagaactccatttaattccacatatcacagtggctggggcgcgcatcaggggctaggaaccctaagaaaaacgcgcaatccacagatgaaagtctcctcgtggaccattatatttcttcacgagataaatatcctaggtctaacatctgagtgggaggggtggcatgcagcacacaacaacggcggtcggggtctttacaagaatctttcatccacgggtagagacatctgggtctcaacatgcggggataaaactacacccaaaatcccctctgactcaagtgatcatggatcaaccgggggcactgaggtcgaagaacctcctcggtggatcttagaggccccagtttcgtacggaatagaggcgacaccccatagacagggggaaccccagggcgctggtgcacacacttaaacacaaaccacggatggcccttaaatctgggagagacacggccacaatgttcccaaacatgggatacggcc

SEQ ID NO: 589172 - DNA, 1115 bp, Homo sapiens
agcgggaccggcggtggccacatgcagcgatagcgagaggctggagcgcggcgtaggtggctgccgagtctttggctgtgtgagggtctctagtcctggcgatggaaggcgccgggagctggcggctctgtggacgagcgtaggagactgtggagtggtggctggcgttctttggagatcccacaatgtagtccaagtggttatcgatcgcccgagcagtggcgtggcggccggcaggacagcagacctttttgcatgcgaccgtctgcctcgaagcgctagatgagaacgaacgggctgcgcaacaactcacgatccccgtagaatggttggataggacatatactgcacctagttgggatcagcgtgatgcctgggacactgcagttgtgcatatggcattatgcgaaaggtttcctcttcgccaataacgagttctttggacaagaggaacactctgcgtccaagcacagaattggcttttgcctccttatggcattctatgtttgcaacaaaggcatgccgtgaggatactaacacatggcaatgcaactatggggactggatctaattggatatgtaaagcaacttagtgacatcgataacgttctattactaaagacgcaatggatgggattgtggcctcgaggaacagcttggttttgccttgtgacttgtaagaaaaacaatgtgtttctaatcaagttggggcagcaattcgaaagggtggcccttgggactggattggacggaccttagtcttatttacagagctttcctaacaaagcgatggggcgttgctgttaaatcgtggggtttctttatgggagatacgcaaaaacacttagatagggacttgaaagtcggaagtgatacaaggtattagtggtggggattaggtacattaatctagtgatgaaccccctaatgggggttttaaaaaacacacggtgaaacgttgggagcatgaactcgttcgatttttttggccaaggagtaatttttggaattcgaattgttaagggaaagggggcggtttgaagggcccgaaggacttggatgtggcaagatttgggaaactttaatttcgaaaattaagggttggctcggggggg

SEQ ID NO: 589173 - DNA, 394 bp, Homo sapiens
cacgagggaattaaggaggaagccacctggcttcctaagatagactttatggttaatgggatttattttagctggttaagtccaggacccctaccaggaagaactgaggtccatatttgaggttgggctcacccttttgcatgtggtcctactaataataattttgctgtaaagaagcctcaataaggagatggactgtgtgaaaagagatgagaaagcaggcctgtttgcaaggctggcccttggctggcatctgaaagcttggatttcaggagggttctcattactccctaaatgataagagtgggtcactgtgcctaaactgttcgtacaaacaatgtgggttatgcccaacatctgctttccttctgggagtcagattttcatatgtgtt

SEQ ID NO: 589174 - DNA, 444 bp, Homo sapiens
gtacatctctacaaaaaattacgacaggtttgctaggtgcgctcagctacttcgggggctgaggtggagaggatcacctgagcgcagaaagtcaagactgcagtgagctgagattatgccactgcactctagcctaggcaacataacaaaaccctgtaaaaatatatagacagccaagcgtggtggcacatgcctgtaatcccagctactcgggaggctgaggcaggagaatcacttgaatccaggaggcggaggttgtggtacgccgagagtgcaccattgcactccagcctgggcaacaagagtgaaactctgtctcaaaaaaagaaaagaaaaagggcagggcgctgtggttcacacctgtaatcccagcactttgggaggccaaggcgggcggatcacgaggtcagaagatcaagaccatcctggctaacacagtgaaac

SEQ ID NO: 589175 - DNA, 520 bp, Homo sapiens
atatatgtatttttaattgattggattatacacgtcccagcctcttgtaaccactattctactctacttctatgagatcaacttttttagtttctaaatgtgagtgaggacatgtggtatttgtctttctgtgcctaatttcacttagcatcatgtcctccaggctcatccatattgccgcagataatagaatttcattctttttaatggctgaataatattccattgtgtatatatacgacattttctttatccattcatctgttgatggacacttaggttgattgcatatcttggctagtgtaaatactgttgccgtaaatatgagtgtgcagatatttctttgacatactaattttctttcttttggatatatattcagtagacagattgctggatcatatggtagtttaatttcacagtaagaagtgcaaatattataattttggttgttaattttatctgctttttcatccctaagtagtggaattagatttgttttttacactgggtttattga

SEQ ID NO: 589176 - DNA, 207 bp, Homo sapiens
gggagacgatgagaacctagtctcgtagttcagtttgattatgtgcaatgaatgtccaagctggagttctccatttatctcatgttatccccaggtttccacaggcgtggtgatgtttgagtcctcttactaagtcgggtgcgtgcgacgcgacccgagagcgagccgggagcactctgattgtagcacgtatgcgagtggtagaca

SEQ ID NO: 589177 - DNA, 442 bp, Homo sapiens
  misc_feature (93)..(93): n is a, c, g, or t
catagtaagttcttccctgtcagtaattattttaaatgcaaatagattaaagtccccaattaaaagacagagattagctgaatggactaaaanccaggatccaactatatgccatctacaagagtcccactttatatcttttcaaataccaaactcttgtggccaggtgcaatggctcacgcctgtaattccagcactttgggagaccaatgtggaaggattgcttgaagtcaggagttcaggaccagcctggacaacatagaaagactcttgtctctaaaaaagttttttacttagtaggcatagtaacacacacctgttgtcccagctactgtggaggttgaggtgggaggatcccgtgagcccaggagttctaggctgcagtaggctatcatagtgccactgcactccagttgggtgacatagcaagaccctgtctcta

SEQ ID NO: 589178 - DNA, 379 bp, Homo sapiens
gggggccaatccggcctcaggcacgcaccggagccgcctttccgggcctcaggcggattctccggcgcggcccggagcgcgttgcgactcccgtggttgcggccccggctccattggcctgatcctgatgtggatgatcgcagtggtccgtatgcctgacttcccaggaatctggctgcaggtcggcggcgaggggtcgagactcgttactagacagcgggagagacctcacgtctgtcagccgccctcacaggaaagatgctgcgtctagaaggggcgaccccatgagccatgggtgtgcactgtgggtgcagcactgggagcactgtggtgcatgcctcacaggatccctgaaaggtccaggtcccttgaagagcca

SEQ ID NO: 589179 - DNA, 1037 bp, Homo sapiens
taaaaggggggttttttttccccccccccctttttccccgggtgttaaaacccctttccaaaaacttttaaaccccccgggggggcggcccccccccctcggggcccggacgcgggggggcctgcaccaccatcttctcctccggggggagggagctatcgacgccgcctcccactcttttcatagacggacagatttggcgtagaaaacggcaccacagagaggagcccctatcgataccctctctatcgacgcacccatctgctgccaccgctcacgaggcgtagtactacccagacgagacacctcagagagacgtgagtgagatgctcctactatcccccgacgagaactctcctctcatatgagcgacacgcgtctctctctctctcgtagatacgcagctccaacgcctgttgctatctctcctctctctttatttactatatctctctcttctagcgagaatcaccttcgtgaataaaccatatcaatcaatcgaactcatccgagacgctagctgaccctccctcccacgatgggtgtgtgtttcaccagcgaggacagacatgtgaggcgccccgcccgcacgatgtgctcgccaacaaaatatatctctcccgcaacgacctaccagactcatctcgacccaacccactaattataatcacgccccccgccacgcgagagacgaaatgaccacctctacgcgctctgcgtaggagaactgcgacgacgcgcgggagagcaggccccaacagctcgccagcccaccacactactcagcccgccacaagcgacgagcaacacacaactctgcgagtagctatcccaacacgacgccagcgcgcgcgacgacggcgcgcctcgagacgaaacggctgcgtaccaccctcaaactgcagagaacagaccgtccgcgcgggcgagcaaacgagcgcaggtatgtgagttgagtcaaccccccacctgggaaggggcaaccaccaccaccccccacaaacaaacaccggccgctagcgcccacgcgcgaaagg

SEQ ID NO: 589180 - DNA, 270 bp, Homo sapiens
cgagaatgcacagtatagtgtcgttatgcttcatgacaggacatatgatatccttggagcaaaatggaggacacagcgtgtttagcagctgattgtacgtattccctcaaacatcttgcttcctgaagataaatgtcaggagacaccttatagtgaggaagattttcagcatctccagaaagagattgaacagttacaggagaagtacaagactgaattatgtactaagcaggcccttcttgcagaattagaagagcaaaaaattgttca

SEQ ID NO: 589181 - DNA, 191 bp, Homo sapiens
gttagcacgtttaggacccgaaagcatggtgaagcatgcctggtcagtgacgaagaagagaaaactctggtggagtgtcgtagctgtctgacgtgcaagtcggacgtccgacctggttatagtgcgcgaaagataattcgaaccatctagttagctggttcccttccgaaagtttcccttcaggaatagct

SEQ ID NO: 589182 - DNA, 440 bp, Homo sapiens
  misc_feature (356)..(356): n is a, c, g, or t
cattggtgcttaagatgttttcagaccccgcactcatggatcagctggcatcactcagatggataaactggctcatctagtcctgtagcccccacccaagaactgactcagtgcaagaggacagtttcaactccctatgatttcatgtcacaccagagccatcaattctccccgctccctggtctcctactcccccaaattatcctttaaaaatcccagtctctgaattttcaggagactgctttaagtaataataaaactctggtctcctgtttagcccagctctgtgtgaattaaactctttattgcaattcctttgtcttgatgaatccactgtctgggcagcgggcaagatngaaccgttgggtggttacaatgacaccaggaacccctgggatcaagacttgctcgaagccagccacacttgagacctgttaacc

SEQ ID NO: 589183 - DNA, 194 bp, Homo sapiens
cgcttgactgctgtgcctccagcacactgactgctttgaccaactcagtgctcaagaacaatttgtgtccctcgggcagccacctcatcagcaacctcttcaaggaggactgccaacagaagatcgatgacctcttctccgggaagctgtaccacatcggcattgctgccatcgtgatcgctgtgatcatgatc

SEQ ID NO: 589184 - DNA, 827 bp, Homo sapiens
  misc_feature (686)..(686): n is a, c, g, or t
  misc_feature (774)..(774): n is a, c, g, or t
ggatcactcctgttgcatcctcccggcacgcatcgagtatcttcgacaagataaacttcttgatgaatcaaaaataggggtctgtctactcgtcagaacacaaccagaatggcataaggtgatggaaaaaagtaagtacgagaccgcgtgaattcagctgacggaagaggaatgcgacagaacaagaagatctgacttggccttagagtctattataacgtgagcagaagttggtgacaggctgtgtaacgtgtgcagaagtcatgacatgttgactagcatacgagcagagtatggatggcccccgcagtttggtgacggtgctgaacagggcacattctcagggagtagagcagggcctaacgagagtggccccaagccccaggagctcctcatgactgtaggcgtgctaccgaagacgcatcagtgtgtcgacgcctcgatctagatgtctgttctgatgggggtgaccgtctcgtcaagtcttcaggggcccccagagtcccctgtggagacatacttccagtcccagtcgatgcagagacttttttggactgtgaccagtaagggacttcggattctgattgtatacgcatactgatctaggagtggaatgcgctttggcctagtggacaagtgtggcaagattccctttattgtgcgcccaagatagaaagcggtcagtnggccgctgacgagcgataaacgttagggagatggattggcaggcatgtggtatcacgaggaactataaagcaggaaaacccaaacaanaggcagaaaaacgcaaagttgaagaaacaggggaagaacacgggaaggcagga

SEQ ID NO: 589185 - DNA, 188 bp, Homo sapiens
  misc_feature (89)..(89): n is a, c, g, or t
tttcatctctagcttatgattttgggcaagtcatggtaatctgatttaaatggggataaaggttacattgcgtccatgatgctgcaganctgtgtgatgtgaaacactgtgggatgttgtgattaggatggttgctttgtgtaactgtaaatgtatacttacacagtatggttgtaacaggtcactac

SEQ ID NO: 589186 - DNA, 125 bp, Homo sapiens
  misc_feature (71)..(71): n is a, c, g, or t
gcacatacttcagttcactcctttaaattcaatctaggcttataacgcagtcttctctttgaaaatgaggnttgttccagtgtttccctgagttcagccttaaagcagaaaatactctacatatt

SEQ ID NO: 589187 - DNA, 114 bp, Homo sapiens
acggaggtctattttgatactcaggtgctcatgttgttccctgggttaaaatgtgagcacaaaacagagcaacatcaattccggggcatcctgactattggttcctccagctca

SEQ ID NO: 589188 - DNA, 234 bp, Homo sapiens
  misc_feature (223)..(223): n is a, c, g, or t
aacacttattattctataagacccagctcaacctccattttggagcctcccctgtcatgctcccataactgcacagaaaacccgtggaatgcagacctcgctccatcagtgagtcagctcccctgcctccatttgtctatgagctcttcccagggcagagaaaacacaattgaggctgggcgccgtggctcacgcttgtaatcccagaactttgggaggccanggtgggcagat

SEQ ID NO: 589189 - DNA, 955 bp, Homo sapiens
  misc_feature (447)..(447): n is a, c, g, or t
cgaggacgaaggcacgcatggatactagtacggtgggatacctatacactcgtgtcatcacacgattgtcgcgaaaagtcgattgacagacaggtgtatgaccacaagagcggacatcgctcaggacggcttaccgatgatgatctaatacaacaaatgtgtaacaccaaggcacaaaggagaggtctcatgtcacttcataaattggcataaaaaaggataaggatacaaaatatagatattctctaaataggactgggtctaatcggtaaattacgagtgatacattttacaatggataggtagacacacatgaatatataggactaggttccgaaaattggattgtcagaatagattggtaaggctcgaagatagtgaggataaatttttaaggtgctctaagttaaagctagccagggttgggtccgctgtggctcacgcctngtaatcccagtactttggcgagaacaggaccggtacgggcggatcgacatgaaggtcacggaatgttcagggagcaagccgtggcttaacagtggtagaaaacccctgtttttctacatatcaaggtacaataaacacttatgccgggagttgtggtggctgcacaccctgtatatcccagactagctcgggaggctgggggcacgagaactctgctgtgaaacccacaaggaaagggtcgcaggtcggcagtgacaggcagaagatgtggtagttaacctgggctgcccaggctttgaggcaatcaaggagcataaccctcccggcaaaagctacgtagctaaccacaaccaaccacagtttgctactttagccggcctcttccacactaaaagggcttttcacaacacatgtcggcttggagggcggcgcccaccactcatcgtaacgtacgggccctccctggtccggggacccggcgacgcacatgggcgctccaccttaaacc

SEQ ID NO: 589190 - DNA, 138 bp, Homo sapiens
gacctggcccccctctgcagaactgcagaggggttttagcttccaaagacatttagggaggccctgccggacttcttgttttcccagaaccaattagttacctttcgggggaattccttcttagtagtctcgacctgt

SEQ ID NO: 589191 - DNA, 513 bp, Homo sapiens
acaggatttaaccatgcagccaaagacagggtcccactccttcacccaggcaagctgtcccccagtggagcactgacgggtcactgtagcctgaccctactggcctgaagtgaaccttctctatcgaatttaacaaagtgctgggattaccggaatgagccaccatgcctggcctgtattggatcattgtacacatttccatttttactggatactgagtggcagtgcacactaacagcagataactaaaagagagaaagctaacttcactggccaaattagcccaagcttttcgcacaactcatgaccaaacagatctgcataggaaacaacacttggacataaataactatgctaagggaacagccttcatacatgcacatagaaacatatgtagaacccttccttgacaggctaacgctattttgtttttttccaagaggtatagcagagaggaaactgagtgacttagctatagctggggtcccgaattgtcacaaactgaatgggtca

SEQ ID NO: 589192 - DNA, 873 bp, Homo sapiens
  misc_feature (21)..(21): n is a, c, g, or t
  misc_feature (69)..(69): n is a, c, g, or t
  misc_feature (76)..(76): n is a, c, g, or t
  misc_feature (82)..(82): n is a, c, g, or t
  misc_feature (88)..(88): n is a, c, g, or t
  misc_feature (94)..(94): n is a, c, g, or t
  misc_feature (171)..(171): n is a, c, g, or t
  misc_feature (179)..(179): n is a, c, g, or t
  misc_feature (200)..(200): n is a, c, g, or t
  misc_feature (210)..(210): n is a, c, g, or t
  misc_feature (225)..(225): n is a, c, g, or t
  misc_feature (243)..(243): n is a, c, g, or t
  misc_feature (279)..(279): n is a, c, g, or t
  misc_feature (299)..(299): n is a, c, g, or t
  misc_feature (332)..(332): n is a, c, g, or t
  misc_feature (345)..(345): n is a, c, g, or t
  misc_feature (358)..(358): n is a, c, g, or t
  misc_feature (361)..(361): n is a, c, g, or t
  misc_feature (499)..(499): n is a, c, g, or t
  misc_feature (524)..(524): n is a, c, g, or t
  misc_feature (551)..(551): n is a, c, g, or t
  misc_feature (628)..(628): n is a, c, g, or t
  misc_feature (674)..(674): n is a, c, g, or t
  misc_feature (689)..(689): n is a, c, g, or t
  misc_feature (714)..(714): n is a, c, g, or t
  misc_feature (733)..(733): n is a, c, g, or t
  misc_feature (774)..(774): n is a, c, g, or t
  misc_feature (795)..(795): n is a, c, g, or t
  misc_feature (808)..(808): n is a, c, g, or t
  misc_feature (853)..(853): n is a, c, g, or t
gtcatggtagagtgttttatnacaccacaaagctaacaaggtcgggtttgtggtttttttcctttcacntggttanggtggngttgtnctcgtngcccgttggagaaaggttgggcccaaattatttcaaaaaggaatcaaaaaagttggcaaagtgcagccctgggtttnagggagcnatggaaaaagatggaaatgcntgttgggacntttagagcagactcnagggaaggcctgtaattnggtaggaaaggggtctttaggaggatgaccaagctntggaaggaggatggggaaanattatactgtggggtatggcaaaatgaaaaaantacaaaaataatnatgtccaaaaaanttnaaagtttacaaggagctttccacttgcttcagcatgcttaatcctcacatcaaccctgcttaggggacacaagctcagacagaggaagtgacttatccagagtcacacaggcagaaacccaggactgaagccaaaacntttaacaacatcaagctgtctttcnatgaggggtaggggcagatcccccganccggagcctccagggcagccctcgctcagggcagcactgtggtgacgctggtgagcacaacatgttcaaagattttngagatggagcatcggctctgcaaggacaaggacttgtggctggcanacgagcggggactangggccttcagagagccgcagggacncaggccaggcaggcagcangagaaggcagccttaaactgctcccggaatttgccactgangaagttgtagatgatggggtnggcagcgctgttnggcgtacaccagccagtgggagaaggtgaagcaggcgtacacagnttcgcgctcactggcttggc

SEQ ID NO: 589193 - DNA, 1009 bp, Homo sapiens
  misc_feature (1009)..(1009): n is a, c, g, or t
ccgccttctttggggtgccctcagaattcaggccattcatggccgggccctccctcgctcttcgcgcgggggggaggagggcacggcgcctgtgcacggccgtgtagctgacgcaccgcgcatgtgagttcagtggggagagctctgttatgtgatgagaattaagagctcccaccgtcgcgaccgactactccacttctgcgcctggccttcgcgccgcgcgcgcgcggttacaattcatctcgtcatacacttattttcacctaggacgggagcaatatatttaattctgtgagccgagtccaggattgacagcctcaccacagcgcaccatggtatgatctttgttctcttttcacatcatcacttccttttttttagattatcttttcttatttatcagtctggacgtgacgcatgacagataaaaattacaagtacagaagcgaatgctggcgttatttcgttccatcccggcctctcccgtgcgggcccctaggcgcgtgccgggcgcccgatagacacggttacttatctcatacacacataccacaagcgtccttccacagttctcacctcgtcaccgctcaccagactgctcctcgtcccatagatgactgccttgagcgagcgtgactatattagccagcagcttctctcacttttctacacatcctaaatatatccaactgatgacaccagttacgtgtccgtttctctacgaatcgatccctatgcatctcaacgcaagagaccgctctcgcagtagcacaacatctcacctctctagagatgacacctcaatataactgtcacatctctagcttagctaatgaacgcctaccacctcgtcctagacgcctctcttacacccgtagtttctagttcagccgattacccgcctgcgtcacctttccgtcgcgtaagttgatatacagtctagctaccgactgagcacgctgtcttcgcccgtcgataccatgacccgcaccccttccgtcctttcatn

SEQ ID NO: 589194 - DNA, 154 bp, Homo sapiens
cacggatcttcggcatacgggcaaaaagagccaaggaagcgcagaacaggatgtagacatagaaaaaataaagccctcctggggacttgagaatcagtctggcagtcatgctagggtctcccacgtggtgtgtttcattgggccatctgggacg

SEQ ID NO: 589195 - DNA, 323 bp, Homo sapiens
tggccccaggacagtgatgaagacagagcctgtttcagctttaggctgtggggatcaatgccatcagtccctgttattgagggattatcccttagccaacattcctatttgtgggtgggcgtggaaagtgtatctttttttggggggtgtggggaaatgggtgggggaaagggggtgtgtgtttaaaagttctgtttgtaaactcttttaataaaagttgtgcctccccatacttgaagctcccaggacaagggttgaaaggctcaacccctctttcagcttttatgtggtgttggaggggctggtattgtgttcacccaaga

SEQ ID NO: 589196 - DNA, 252 bp, Homo sapiens
gaggccaggaatcattggcaaaaaaactctatgatcagatagtccgatcctagattatccaaatcaagagcagagatagctgtgatgtataatagtaaatcggaaacttatgtactctgtgcacacttttactagatacacacacacactagctatatccacgcacatgagtcagcccccagtcatgctctcggactctggttatcacacctcacatccccgcttagtcctgtattcatatgccctccatgt

SEQ ID NO: 589197 - DNA, 728 bp, Homo sapiens
caaagttcaacattctttcatgataaaagctctcaacaaattaggtatagaaagactgttcctcaacacataaaggaaagccatatatgaccagcccacacctaacatcatactcaatggtgaaaagttaaaggcttttcctctaagagaaggaaaaaagacagatgcccactctcaccacttcttttcaacatagtaatagaagccctaaccagagcaattagacagaataaataaaaggcacccaaatagaaaatgataacgtgaaattgtctctgtttgctgacgacatgaatttatatatagaaaatcctgaagattttgccaaaactgctagaattgataaatgaattcagtataatcgcaggatacaaaatcaagttacaaaaattagtagcatttctatacactaacaatgaacgtaaaaagaaattaagaaaacaatcccatttataatagtatcaaaaaatacttaggagtaaatttaaccaaggaagtgaaatatctatatactgaaaactataaaactttgatgggaaaaaattaaagaggatgcaaacaaatggaaagataccttgtgttcatgaattataaaaattaatattagtagtagtaatttcctgaaaaaaagttccaaaccaggatggccatagcagccacaaaaggaagcaaacaagaacaagtcctgatggagcaatttatgaagacaggcagcatagagggagaag

SEQ ID NO: 589198 - DNA, 411 bp, Homo sapiens
  misc_feature (303)..(303): n is a, c, g, or t
  misc_feature (328)..(328): n is a, c, g, or t
  misc_feature (407)..(407): n is a, c, g, or t
aatagagttatttcatttactcccatagaaagaccaaatggctccaggcaagagaaaattgaatcaaagggacccatgtgtcttagttggggtaagttctaattttaaaagagatttttagcacacagtaggtataagaataaagagatgatctggggattcagagaagataattttgcctaaaacaagcgagaagtggataataaggagagactaatctgactcagcaaaataaacggatccatgaatcccaaattgggtaaatccaagaagggtccgaagacagaatggggaacattcagntgcacatgaaattcgatggaatgantcctcttggttgggttctctttttttctctggcatctgtccttgtttggcccttaggtttgtgttctttggggggcccnttag

SEQ ID NO: 589199 - DNA, 610 bp, Homo sapiens
tgtggcgccccctgcgggctgctcagcgtgcgtgcacatgtcctgtccggctggcttggtggggtgccgaggctcaggcaggatgacgacgtgagacctttgtgaagtgatatcagagcctgtggtctcaagaatctgaaccttatcttcattgtgcgggacgagagtgcctgagtgaccaatgacaaaggacgggcatgagtgttcggacctgcaaagtggcggagaaaacaggcagcatcaatatcgtctgtctgggacgatgttggcgatctgatccagcctggggacattatccggctcagcaaagggtacgcttcagttttcaaatggttgtctgacactatatactaggccgggggggttgatctcgcaagaagatctggaggaatcgctgtattggtcttattctgaggttcctaacctatcaggtgaggccaaaaggccagagtacaagcagccgagcaggcagggaaatgaggcgcgtgcaggaacgaagagcaaccccttcaggttcccagcctagcacttggagcctctgcgtgctctccagctctgagaacagaactgggacatggacttgagtgccccaggcagggtcccggtggtg

SEQ ID NO: 589200 - DNA, 184 bp, Homo sapiens
cttagaatttggggggaaattttaaaaaaaaattgcccggatttttgggaatttgttataaagaaagaacccttttgtcaaaaaaaattcaaatttcctttttttcccttttataaagtaagggcggggggggggtaatttgggtttttttttttcccccagtttaataaatcataaaacttta

SEQ ID NO: 589201 - DNA, 483 bp, Homo sapiens
tcaagtatcataaagggattttaataagtcatattcaatggatttttccagttaacaaaatgtattcatttgattactgttttatgtttatttaactgattctgatatttatttcatgttaaagactaaatcttctcagtcttgagacataggagagaaatataaaagacaccatggcctttgtaaaatgattatttctgtatttcataccatgaaaattaccagcagaaagtataaatatctttacagataaaaatctcttcctatgtttctgatattagtctatagattagcaatatttagacttcgcagtgagctgatccatggattggatcctaaaggtgatgccaggcctagatcatgatttatcctctctgccctagcaccatgatctaatcatagtaggtgttaaagaaacatctgctgtgacgtaaaatggaggcagcttctgcatactgccccttgctgtcactgagacagcac

SEQ ID NO: 589202 - DNA, 160 bp, Homo sapiens
agtggccatgtgataccaaaataatcctcatttctccatcctatccttgtttcattgctttcattcatttcagttatatatagccatacacaaacatacataatcaaatacgttattactatcttgaacaaactgttatctgccagatcaattaagaatt

SEQ ID NO: 589203 - DNA, 183 bp, Homo sapiens
tatcaacggaagtttatacttttgagccagacttattatgatgaccctaagttcagaaaagaagaagaagagggatactcccatgctgccaaaggataccatacttgcagagtcccttcagatacataaagaacacattgtcaggataccatgaacatgattctcttttggaccacaaagaag

SEQ ID NO: 589204 - DNA, 181 bp, Homo sapiens
cctgcctctaggacgctaacgctaaaaagggatcaccagttaagagcgattattttctctgtttctttactaacacaaataacagaaacgacgacagataaaacatggacagaacccaaaacaccatctagcatttgcaatacctattattccctccattttagttagaatttttaagtgt

SEQ ID NO: 589205 - DNA, 908 bp, Homo sapiens
ggaaggaacgcaggatggcagccggaacagcagttggagcctggtgtgctggtcctcagtctgtggggggcagtagtaggtgctcaaaacatcacagcccggattggcgacgccactggctgctgaagtgtacacgggtgtgcccccaagaaaccaccccagctggctggaatggaaaccttgaacacaggccggacagaagcttggaaggtcctgtcatccccagtggaggaggacccatgggacagatgtggctcgtgtccattcaccaacggtctccctcttccttccggcctgtcagaggatccaggatgacgggattcttccggtgccaggccactgcaaccacggaatggcaacaggcagaccgaagtcccaactacctgagctccgtgtctaccagcattcctggcgacagccacgaaatctgtcgcatttctggcctctgacactcaccgggctggtggttcaccaactacagcgtggagagaccatgctgtcgtcagcagggcaaagcttatccctggacagggcactctttacgcctggccactttggcactggcgaacggccccacctcgtgaccctacatcgagcaacgcgcgaagctatcatcgtcgaacgggcacaccaggacccacggacgaccacaccgtgacagaaccacgcggccatcctttaccagccacacgttgccaaaggatcatgggaaatccatctacacttggcgttaaaacaccaccatgcacacctgagggaacagagcagcaatcccaccagcatcacacaaggccttaatcgttcacgcgtgtaagcattttccacggcagccaataggcacctgtttcccacatgaacacaacctggtgagacacttgtacgagcaccaattgcagcgccaattccac

SEQ ID NO: 589206 - DNA, 97 bp, Homo sapiens
cgttcgaggaacgcatccgccacttgatgtatttacgcgagcttcaggacgaaacgggcgggttcatggtattcatccctaactccgcgcagccggc

SEQ ID NO: 589207 - DNA, 566 bp, Homo sapiens
  misc_feature (35)..(35): n is a, c, g, or t
  misc_feature (61)..(61): n is a, c, g, or t
  misc_feature (75)..(75): n is a, c, g, or t
  misc_feature (101)..(101): n is a, c, g, or t
  misc_feature (106)..(106): n is a, c, g, or t
  misc_feature (124)..(124): n is a, c, g, or t
  misc_feature (129)..(129): n is a, c, g, or t
  misc_feature (132)..(132): n is a, c, g, or t
  misc_feature (136)..(136): n is a, c, g, or t
  misc_feature (138)..(138): n is a, c, g, or t
  misc_feature (143)..(144): n is a, c, g, or t
  misc_feature (163)..(163): n is a, c, g, or t
  misc_feature (221)..(221): n is a, c, g, or t
  misc_feature (238)..(239): n is a, c, g, or t
  misc_feature (242)..(242): n is a, c, g, or t
  misc_feature (250)..(251): n is a, c, g, or t
  misc_feature (266)..(266): n is a, c, g, or t
  misc_feature (275)..(275): n is a, c, g, or t
  misc_feature (300)..(300): n is a, c, g, or t
  misc_feature (306)..(306): n is a, c, g, or t
  misc_feature (317)..(317): n is a, c, g, or t
  misc_feature (329)..(329): n is a, c, g, or t
  misc_feature (332)..(332): n is a, c, g, or t
  misc_feature (337)..(337): n is a, c, g, or t
  misc_feature (359)..(359): n is a, c, g, or t
  misc_feature (402)..(402): n is a, c, g, or t
  misc_feature (409)..(409): n is a, c, g, or t
  misc_feature (411)..(411): n is a, c, g, or t
  misc_feature (425)..(425): n is a, c, g, or t
  misc_feature (427)..(427): n is a, c, g, or t
  misc_feature (469)..(469): n is a, c, g, or t
  misc_feature (553)..(553): n is a, c, g, or t
tgcccgcccacccacactcatggcagggtgggggntgggccaggggcgggtgccaaaggtngttttgtttttggnacaactgtccagcccgggggctaganaaatnctctttgcgggggtgggnatggnggntcangnctgtnntcccggggctttggggggntggggtgggtgggtcccggggtcggggggtcggggccgtcgctggctaacatggtggnaccccctctctactaannatncagaaaannttgggtgggggtggnggtgggggnctgtggtcccagctacttggggggntggggnggggggatggngggggcccaggnggnggggnttgccgtgggcgggggtggggncactgcactcccgcctgggcggcagggcaagactccgtctttnagaaaangnaaaaaaagggaaantnctctgcgaagtgaggggggggggtggtgtgtggagggggggnggtggcacaggtgctgggccccacctgtcctcttccctaggcagtgggcccccagggcagccaaatgcctgcaggagggctcanttctggcccaggt

SEQ ID NO: 589208 - DNA, 417 bp, Homo sapiens
catgtggaagactttccccttttttgtcgcgccccccggggtggcagtccgcctttgtaatgggtcctgaatgtcgcaccccggagggcccgagagacccgggtttttcgcctccccccttttccgcatcagggccaaaccgtttccctggggagatggtacccatacttttttccataaccctcatgtgaatccccttccccctgggttcgaagatgaataaaaagaatttgggccccttcccgggcccccggggccccagccctggtttgggccgtttctttgcccctgggcccgaaaaagtttttgggccctttagctccccttttttacttgtttccaatgatggctggtatcctggtttcccctccctttggttggggccggggatggctttaattaattactttaccttta

SEQ ID NO: 589209 - DNA, 302 bp, Homo sapiens
tgtgtactgtcagcgttaagattcagtgctggcattgtgtttatgtgccaccgagtccatcggcctccaggagctcacaccgacatgctgtctggtcccctgcgtgagggtccacttgttctcacctcaatcaagggacaggcccagcttttgcacagacggttcttggtggtcccagaatgtttcttgcatatcttcttgttggaacctcactgcaggtccttgggctgggcttggaatatgtcctgttaacaacagacgagagactcgcctcatgtgccctccttgtcaacaggccagcc

SEQ ID NO: 589210 - DNA, 151 bp, Homo sapiens
aagcagtggtatcaacgcagagggcccattatggccgggtctctataaaaaatacaaaaaaaatggctggacgcagtggctctcgcctgtaatcccagcactttgggaggctgaggtgggtgggtcatctgacgtcaggagttcaagacca

SEQ ID NO: 589211 - DNA, 292 bp, Homo sapiens
gacaactcctctgtcacttcctttatcaaatgatttttattacggtgtggtcacttatttagatggacattgcttttcaaataacttataataacacgttatgtgccatgtgtctactctagtaatgttacccagaagagcacaattttcacactagtggcgtctcagtgaagctaaccaaggatgaagctttggctttgttggtgagatcagagcccttctgagcaggcagcgccactccagggttcagactgtgctgcttaggctgcagagatacagggtctgagggctt

SEQ ID NO: 589212 - DNA, 439 bp, Homo sapiens
  misc_feature (379)..(379): n is a, c, g, or t
taaggttggagggggaaatgctggaagaatcgtaaggggtatggaaactttctcatataagtaatgctagggtgagtggtaggaagtttttccataggaggtgtatgagtgggccgtagcgaaactcgggggtatgctgtccgaatctcataaaaacagggaaggttaaaagtaagggttctgggtggaccacaaatattgttggtgtgtaagatgtccacgggagaagaagtgcgtcatattgttggtccctagagaaagatttgtagtgggtcagaggtgttgttctacttataataacttgttctggtagtattccggctatagaaaacataagggcagaaagggcgcctcgcggcgtaatccagattgtttaganagcctagaagacatatgttctcgagaactcctcccctttcgagcaaagggctcagaaggg

SEQ ID NO: 589213 - DNA, 309 bp, Homo sapiens
  misc_feature (46)..(46): n is a, c, g, or t
  misc_feature (79)..(79): n is a, c, g, or t
  misc_feature (234)..(234): n is a, c, g, or t
  misc_feature (302)..(302): n is a, c, g, or t
gaaactgtggatgaagaaaggtgaataagaggctgggtgccaggtntcacgcctgtaatctcagcacttttggaggccnaaacgggtggatcacttgaggtcaggagttcgagaccagcctggccaacatggtgaaaccccgtctctactaaaaatacaaaaattagccgtgcatagtggtggatgcctgtagtcccagctgcttggggggctgaggcaggagaatcacttgancctgggaggcggaggttgcagtgagccgagatcgcgccactgtcctccagtgtggtgacagagcaagnctctgtc

SEQ ID NO: 589214 - DNA, 657 bp, Homo sapiens
  misc_feature (574)..(574): n is a, c, g, or t
  misc_feature (578)..(578): n is a, c, g, or t
  misc_feature (615)..(615): n is a, c, g, or t
ggatggtggacagcgtgtaccggacccgctccctgggggtggcggccgaagggctcccggaccagtacgcggacggggaggcggcgcgcgtgtggcagctgtatatcggagacacccgcagccgcaccgtcgagtacaaggcatggctgcttgggctgctgcgccagcacggctgccagcgggtgctcgacgtagcctgtggcactggggtggactccattatgctggtggaagagggcttcagtgtgacgagtgtggatgccagtgacaagatgctgaagtatgcacttaaggagggctggaaccggcggcacgagggcgccttcgacgagtgggtgagcgaagaggcgggtggatgactctggacaaagatgtgccccagtcagcagaggggggctgtgatgctggcatctgccttggcaggtgcgctcacttgccagacgtgagaagggaccagagtgagcaccggctggcgctgaactgcgaccacatcctcagtacaggctgggcacccacagggaataacatgtactatgagagtgacttgaccaaggacgtcgcagcatcagtggtnatantgaacaacgggccacatggtgacgctgggctgtacgngggcagtgccgggggctgcgcagatgggtgtgctgggtgggg

SEQ ID NO: 589215 - DNA, 130 bp, Homo sapiens
gatcgtgagcgtgctcccccagatgtggagctccacctgagccagatggtgggggattcgtgcacccttcattctggttgctggtctcactgaaccatagccaggctgggccacagctccctgagtgttg

SEQ ID NO: 589216 - DNA, 456 bp, Homo sapiens
  misc_feature (193)..(193): n is a, c, g, or t
  misc_feature (208)..(208): n is a, c, g, or t
  misc_feature (352)..(352): n is a, c, g, or t
ctagaggatcccaacacgcatctcactcaccgcactggcactcccaggctcaagcgattctcctgcctcagccctcccgcgtagctgagattacaggcacgcaccaccactcccggctaattttgtatttttttagtagaaacggagtttcaccatgctgcccaggctggttcttgaattcctgacctcaaanttgatcacccgtcgnctcaatcggaacaggtgtagcacggctagcctgtgtcactttttaatgtcatgttacctgtgggtacaacggatgaggtgagcccctatctctctccctcaaaatggagtttatctagagtatatttctagaattgcaaggggntttgtgaagttattttagggcatgcttcagttttaatagataacagattgcggggtttaacccggtagctcgggaaatttcggtaaagtcaatggctcaatagc

SEQ ID NO: 589217 - DNA, 243 bp, Homo sapiens
ggatagtcagtggacttgagagtacacgttgattctccttggtcgcactcaggaacgctgggcgccggcgctgatcgccgatgcctcgcgggcgcgctgccgctgctggcggcgctcctcgctgaagaagggatagaacacggtgatgaacagcacgaacaggaaggcatactgcacgatggttcccgacgagccgtagatcgcccacaggcagtacacgacggtcaggctggtcagggtcca

SEQ ID NO: 589218 - DNA, 137 bp, Homo sapiens
cttatacagcatgggcgtctgataggcggattatgactctagctgtcgagggtatacagaagaccattccccgtgctactgccaatcttcctcatgtctacataagcctcgatgagagcctggctggctacctcagt

SEQ ID NO: 589219 - DNA, 431 bp, Homo sapiens
ctgcgaggatggtgttgcagaaaacaaaaagaatgaagctcgattgagaatagcaaaaactcttgaagactttgacctgggcacaacggaaaagtgtgtgagaatcaactcggtgtctagtggtctggctgaagtcgacctggagacatttctacaggccagagttcttccctctagtctgatgctaccaaaggtagaaggtcctgaagaaatccgatggttttcagacaaattttcactccacttaaaaggcccgaaaacttgaacaaccaatgaatttaatcccctttgtggagcttgcaatgggtttgctcaattttaaggcagtgtgtgaagaaacactaaagacttggacctccaagtgggtcttttgcctaagatgcagtccgttttttggaggagaagatttttcgagccagcattaggttcaa

SEQ ID NO: 589220 - DNA, 462 bp, Homo sapiens
aataggtttggtcctagcctttctattagctcttagtaggattacacatgcaagcatcccggttccagtgagttaaccttttaaatcaccacgatcaaaagggacaggcataaagcacgcagcattgcagttaaaaacgcttagcctagccacaccccaacgggaaacagcagggattaacctttagcattaaacgaaggtttaactaagctatactaaccccagggttggccaatttcgtgccagccaccggggtcacacgattaacccaggtcattagaagccggcgaaaaaaaaaaaaaaaaaaaaaaaaaaaaaccatgtcggccgcttgggccaagtcgattttagactcgagcaagtttatgcttgcggccgaatttggagctaattgggccaattcgccttatagggagtcgttttacaattaattggccgtggtttaacaacgtcgggactgga

SEQ ID NO: 589221 - DNA, 2196 bp, Homo sapiens
  misc_feature (1249)..(1249): n is a, c, g, or t
gttggagcccgagtggactgaaaatggcgtgctgctgctaggactgtgattgctacctgcagcagtcagtcttggcccagacaatagtgcacttgccatgtcccttgtcgagcacttgtacatgctcattggccgtccctgcaggccatggcgtagcactgtaggagagatacgatgcttgcacgaaattgttacttcgtgttgcttgattccagattcgaatactcggtaactgatatttcgatgctacagaatgctttcgcatcatttgctccactggaagtcttcgccttagtacatccccgatagcatatagctacccccttatctatttgacattgcgcgtagcattgctcggtctcgatcgaattcaggaagaaaggtgtccacgcacagacgcgtatacaggccgattagatcgatcgttgtacctgcggcgataaaatagtgttcggggtggccatttgttccttgacttattgccctctgtgggcatttttgcaccccttatggttggtcgttaccttaacaggaaacatgtcttgcgctgggccttgatgatgatggacccataaaagggcataagagcgaaacctatatacacctggacctggttgaggagcacgtgcgtgtaaacgccatatggaattccgccagggttcctcatagctgctgaataccctgaagctattaaaggccactttctttgtcgcttagtgacttagcatataccaccctaaaggaacgcacgacattggggtcgggatatggaggccctcacaattgtaaattcagtcccgtggcgctcctttgggtttcaggaccctttacatcttataggccaggattttccctcgaaggacttaccgggagtgttgcgttgttaaagaacagcgcgcgcgtgggggcatgtgcggcatacagaagcgggcgcccttgtgagtacaacttggaggcccccagtggagaggtcaatacaaagcggattagagggcgcaaacggaccttcccacttgggggcgaaggggtggagagaaaccatctcggttggtgaacccggccggagtattcaccgctggcagatctttgtccgaaccgtagcggggatctatcgataccatcacatgggcgacagagcttaataaagacgagaccctggttggtgccttagaacgggacagcaaatactatgtgtcttatgttattatctttgcttcatttactcatatcttttattagactctcttgnagatcacgtccacgtagacccgatggtcatcgagcatagcgagaagaggagctacagatgcgaagagcatgagtccggtaggagatatgcggagacatgagatgcatgatgagacagagggtgaggggagtgggagagatgcattcgatattcgatgttggtgaggttttggatgtgagtgcggagggcggcgcgcggctggcgcagtgtgtcacggtgggaggagaggagcgccggcggacgttgtagtgagacggagtacgagagcagagagggagcggtggagtggacatgggaatggaacgggtgacatcgaggagccgtgctcacctgcgtaatctcggctgtagatcgggcatgtcaacactcaacatgcacctgacgcacaaggcaaagacgccatcgcccaggcgctgcatgagcctagcaacgtcagagcacactacgcctgagacgaacagcccccgcacgcctggcaagcgtacgtggtactcgtgctgtctacgctcgagacttgtgacgcagcacctgacgagacggcgtacacaccccgtcgattgcagcttatcttggagcgcccacgtggctagaggcgtcggacagcatcatgcactcggacaagaagattcgtacagcgatgggcatgtctcagatgtaagtgagaatctgacggagagactcttttggatacaggctggaaccagtgtgcgtgatgaagagctagcgctgatcggtgtgcgaggtgatctaggactcgacaggcgctgacgatgtcgagctgctgcagcgtgccgaggctgtagcgatcgctgagtgcgtgagcgtgtgactgaatgcttgcgatccatgactagacaagagcatggctgaagaggaggcggaagacacagtcgagtgcggaggcagtcgcacagtgggctagatcgacgcgaacactctcacgatac

SEQ ID NO: 589222 - DNA, 427 bp, Homo sapiens
cagaacatattcctgaagtttgtatttttttaaaaaaatcctttttataagattggatttttggcatctatcctattaagggaaaattttaataaattaagtgcctgctttttggattccagttaattgagatgtctactttatagctgcttaatagatgaggtagttcaggcttagaaaacaattaaattgggccgggcgcagtggctcacacctgtaatcccggcactttgggaggccgaggcgggcagatcacttgaggccaggagtttgagactagcctgggcaacatggtgaaaccctgtctctactaatacattagccaggcttgatggtgcgcacctgtaatcccaactactcggaaggctgaggcaggagaatggcctccctgggaggtagggattgcagtgagctgagactgcaccct

SEQ ID NO: 589223 - DNA, 135 bp, Homo sapiens
ctggggaagagggggaagggagagcccgaggaagtaatgaatgagtgggttactgctgcgggcaatggggactccatcctgcgtgggcatcctctgagagtttatgtagaatacacttcagtaattgtccgtgct

SEQ ID NO: 589224 - DNA, 791 bp, Homo sapiens
gttggctcataaaatgaattgggaagtattgtctcctcttctagttttctagaagatactgtgtagaattcttattaccttttccttagatgtttgataaaattctgccagggaaaccatttgggcctgccgttttctcttttggaaggttttaacttacagaatgaatttcattaatagatataggactattcaggtgttctatttctacttgggtgagtttttgtactttgtatctttcaaggaattattcccttttatctaagttgttgaatttatggatatacagttgttagtagtatgtatctattactattttattacataggatcagtaggaatgtctcctttttcattcctctattggtaatttgtgacttctctctttttttcttaatcagtttggctagaagtttatcaattttattgatgttttcaaagaaccaactttggttttattgattttctctatttttctgttttcaatttcattgattttctgctcttatctataatttctttccctctacttcctttgggttttatcttctttctctagttccttatggtggaagcttagattacagtttagagatctttctttttttctaatacagatatttaatgctataaatttacctctatgtgatgctttttctacatcccacaaatttgatatatgttaattttaattccattcaaaatattttcccctttctcttgagatttcctctttggccattgatattccgcaaatgtatgccaattttcaataattggtaagtatccaga

SEQ ID NO: 589225 - DNA, 392 bp, Homo sapiens
atctagaggatcctcttctccgaaaagcaacatgtgcagcaacaatctgatgggcagtcaaactcttgggaggacgtaaatccacggtaaatgtcatgatggctggtcgaggcagaaggtcaacaggcggcgagagaggagacagagaatgctacagcttaataaataacagtaatgagaactgtgtggtttcaactgccatgagtttgtaggggcatcctctgtgctactaaagccacaattctatatcatcatcatcaacattcttgaagcgcattttacactattctgcattagcaattgtgttgagggaactataaaccttaaaattactgacacatttaattaaaggagctgtaaactctgctcattattgcctgtcttggatgttg

SEQ ID NO: 589226 - DNA, 200 bp, Homo sapiens
tacaatcttacatggtaagggctcaaggtaaccagacgtagcttaaacaattttgggaaaatgaatgaggttggaagaaatcacacctgcctgtatttgtaacgatttacgtataatagctattagataatcaaggacagctgtgcgtacctgatgaacgaaactaggctcacaaattcaagcagaatatcatggcagaa

SEQ ID NO: 589227 - DNA, 307 bp, Homo sapiens
aatttttagtagagatggggtttcaccatgttgatcaggctggtctcgaactcctgacctcaaatgatccacccacctcagcctcccaaagtgctgagattacaggcatgagccaccatgcctgggccatcagtttcttaaaaagtaaacacatatctgccctatgagttaggcaattccactacaaggtatttaatttaccccaaaaggaaatggaaaactttcattaacaactgtatttaaggagcccaagtagggctggggtgcagtgggctcagggcttttaattcccacggttttcaggggg

SEQ ID NO: 589228 - DNA, 344 bp, Homo sapiens
tcaagtgagtagacaccaacttcctttcacagaagtggctgtgtcaattgggcaccaggtgccctcctgcttgctgccctctcagtgacatcatctatacctgaatgcccagtggtatgcactaggaaagaatctggcctgcttggactgtgtctggtcacaggtcagtggaatttgaggagcaacacagtggcaaacgcccaaaaggactgccagcctgactcaggagggctctaaaccattcatccccttacaattgccacaccaccatatctggcccatccagtgctgagaaggtgacgccaggtggggcccacagttgtcactaaggtcaaaacattgat

SEQ ID NO: 589229 - DNA, 990 bp, Homo sapiens
  misc_feature (13)..(13): n is a, c, g, or t
  misc_feature (30)..(30): n is a, c, g, or t
  misc_feature (33)..(33): n is a, c, g, or t
  misc_feature (39)..(39): n is a, c, g, or t
  misc_feature (45)..(45): n is a, c, g, or t
  misc_feature (64)..(64): n is a, c, g, or t
  misc_feature (72)..(72): n is a, c, g, or t
  misc_feature (84)..(84): n is a, c, g, or t
  misc_feature (86)..(86): n is a, c, g, or t
  misc_feature (105)..(106): n is a, c, g, or t
  misc_feature (187)..(188): n is a, c, g, or t
  misc_feature (190)..(190): n is a, c, g, or t
  misc_feature (238)..(239): n is a, c, g, or t
  misc_feature (294)..(294): n is a, c, g, or t
  misc_feature (307)..(307): n is a, c, g, or t
  misc_feature (377)..(377): n is a, c, g, or t
  misc_feature (384)..(384): n is a, c, g, or t
  misc_feature (386)..(386): n is a, c, g, or t
  misc_feature (392)..(392): n is a, c, g, or t
  misc_feature (400)..(400): n is a, c, g, or t
  misc_feature (404)..(405): n is a, c, g, or t
  misc_feature (479)..(479): n is a, c, g, or t
  misc_feature (482)..(487): n is a, c, g, or t
  misc_feature (489)..(489): n is a, c, g, or t
  misc_feature (491)..(491): n is a, c, g, or t
  misc_feature (493)..(493): n is a, c, g, or t
  misc_feature (495)..(503): n is a, c, g, or t
  misc_feature (505)..(506): n is a, c, g, or t
  misc_feature (511)..(511): n is a, c, g, or t
  misc_feature (523)..(523): n is a, c, g, or t
  misc_feature (631)..(631): n is a, c, g, or t
  misc_feature (744)..(744): n is a, c, g, or t
  misc_feature (970)..(970): n is a, c, g, or t
atctttttacctncacctactcagctatcncangaccancttgancgctgaacgaaaaggcaanatcccganagatcacggcananctcactggtctcctccccnngagaacctcccccgtacggataccggcaaagcgcgtcaaatacctcggttatttatgcagcgattctctggagatggaggnncntttccagagtatctcatgtctgcccaatatccactcgcgcatatcgcnnacgaaataaaaaaatagtcgtaatagctctggtccacttcaggctgagcattctnaaggaaaaaattnaatatgatgcaatttgcatcgtacaaggacagtcaaaatgacaaggtcatttatagcaaatacgactganctgtttncnaaggtngttatgantgcnnatgatccagacctgcaaaggctctcgatgaagatagctattaaagagataacagaaaagacaagaagaaacctnaannnnnntntntntnnnnnnnnntnnccgcngccatgccagtncgagcagctgacaaattggctcctgctcagtatatccgatacacaccatctcagcaaggagtggcattcaactctggagctaaacagagggttattcggatggtaganatgcagaaagatccaatggagcctccaaggttcaagattaataagaaaattccccggggacaccttctcctcctgcgcctgtcatgcattctcctagccgaaagatgactgtnaaggaacaacaagagtggaagattcctccttgtatttctaactggaaaaatgcaaagggttatacaattccattagacaaacgtctggctgctgatggaagaggactacagacagtacacataaatgaaaatttcgccaaattgggcagaagccctctacattgctgatcggaaggctcgtgaagctgtggaaatgcgtgcccaagtagagagaaaaatggctcanaagaaaaggaaaacatgaag

SEQ ID NO: 589230 - DNA, 129 bp, Homo sapiens
actgcatggcgtgcttgtgagttaacatatgtcaagtacctagaacagacccttttattccatcacatgggttggtaggagaagtgcaccattgacttcgaccctggggaactagataaccaaattcag

SEQ ID NO: 589231 - DNA, 232 bp, Homo sapiens
tactatctacagagaatgaaaaaatggagggccagatctccagcctatatatgattttccagagaatgtttgatattgttaagattatcacccttaaaaaaaagagatgtaaaacagacacaaaatgagagaaatggtcatatttagtgttaaatgtattttggttttaaatgtacaatgaattaaacagatttgtatccctcccctcaccctgcaaaagtttactctgaaa

SEQ ID NO: 589232 - DNA, 327 bp, Homo sapiens
gtggttgtagaaccaccaatgagtttcatcttcatactgtgcctgggagagggagaagagctctgccagcagcaggaggagtacgtcctcctcctgctgctcactggaaaaccgtattctgattgttttgtggaacgaagtgttgctcaattctagaatcacaataaagccaatttaggtctttaaatttcttgtcattctctcctttggcactttcatgtgttttaaagagaaaatacacacacacacacacacacacacacacacacacacacacacacagaggcacactgagcttctatctcatttgaatcttccacagctggg

SEQ ID NO: 589233 - DNA, 1539 bp, Homo sapiens
  misc_feature (413)..(413): n is a, c, g, or t
atcttgttttattgtggttttttgttcctgctgtgcttatatatttggcactgcttctatttaattaatcttgttgtggctcggtcagttttcttagttttctgtgttactcggcatgccttatgtggtttcgtggttgtgttgttcctgactgcctccgtcgtgttagactttgcttcatgctcgctgggtatttaatagacgggcggtcttgttgttgtattttcacgtcgctgcgttgtattaggctcgtccctctcgtcgttccgtggctccggttgttgtttactttagacagccgctttgctcgtgctttatcccaggtggggggttttttgttgattgatactcacccgacgtcccctttcctccgtgattaattaatcttatatagaaagcgagtggtgttattntttatacgacagccacctctcactatagcttggcgatattaataataaattttttctggcttttcttttaaaagaaggttgtgattttttctaaatagaaatgatctgggcccgtaaaccaaaccctgtgatgattaagccccaaatctgtgattttatagaaggaaaccttgtagatttccggcccttatttatattggtccggtttgggaaagtttggagcgttgcaccacgagctgttgttttccgccgcgacacggtaatgacaccccaaagtgtggttgttcccctacatattgggcccctcgtgtgtgttgtacaaattcccgtgggggctctcagtaagaggaggttccccgaaaatggcacaccgaccctgtgtgaacacaaagatgttggaatatggtgtagaccacacgtgttgacccccgagacttccccccgtgtttgccgcccactatctttttttcgtaaaccgcgctttctttgttgttgaatttccgctgtgtaattctcgagttctttgaactatagatatgcggctgtaaagggcacacaatggggtgtccccctccctcacataaccccacctatttgagataacccacctatccccacataaccacattgcctctctccattaaaaagattatctcgtaagaggaaaggttttggctctgcttcccctcgcttctttcctcaaactgcactagtttggaaaatatagcccgcttattggagttcttataaacactccggtcacagattgaggttcacaacacactctggggttaattttttaataataacacacgtaatacacccacaatatttgtacaaattgagaagccaccacttttatatggattccacaactatttacccaagctgttgttttaaaccacggtgagagaaaaaaattattaacctgttaaaaccacaatgcacactattgatattttaaatgcgtatattaagagaaaccccttgttgttgtgttttttcttgtataccacataattaagccacctaactgttggcacctgtttggttttctgttttaaacacactgaaggagtgtaaagtatttcctatatttatggatttactactcaaattttggcca

SEQ ID NO: 589234 - DNA, 416 bp, Homo sapiens
atgtgcgaaagacttacctagaaatctaaggtattatttcagctgcagttttgcatgtctgcaaacacacacacacacacaaacacacacacacacacacagacacacacacacacacacacacacacaatttataccccaaatacttatgtgacagtatttgtttgtgttttttgaagacaggatcttgctctgttgccgaggctggaatgcaatgactcagttgcagcttagtgcagcctatatctctaaggctcaatcagtcctctcaccccagccctctctagtgtctgagagtgtagagcagtgtgccaacatgcccagacattaaaaagttttttttttcttttttcttttagagatggagtcttgctctgtggcctagtgcagtggcgcaatctcggctaactgtgcgc

SEQ ID NO: 589235 - DNA, 462 bp, Homo sapiens
ggccgagtgatggtcgatcttgaatcctggctcaagccatctcttggttcgctcctggattgaggaatgagcacggacttgtgggtttatactttggggttggagataacgagtttgagatcttggtccttactcttagggtaaatttcttagtcctggaatgtatgttttactcctaagatgtgggcttggtggggtttcaaatggatagtctcaagtgtttaaggtacttattaagcccctttaacttggcaggacttggactccaaactcttatctaacctgcagctagggagagctaaaatctcagctttttttttgggacggatcttgctctgttacccaggttggagtgcaacggtgtgaacatagtttactgtgaccttaaacttctgggctcaggcgattctcctaccttgggctcccaggtaggtaggactacagccattgcactccgggcag

SEQ ID NO: 589236 - DNA, 85 bp, Homo sapiens
gcggccgcctactactactactgctcgaattcaagcttctaacgatgtacggggacatgacccttggccataatatgatttatcc

SEQ ID NO: 589237 - DNA, 914 bp, Homo sapiens
tagagtacatttatttcaacctgaaggacttaacacttcctgaatggcaaatctcagggatacaatggattttcttgcagttttaaaaaaaaatccggaaatgtcttaatttctccttcagtgtgtggaaggataagtttgccagctatatattgctcaatggacaggttatctgcattattttaaatatataatccagggcctactggcacttcaagggtttcggccgagaaatcagtgctaatgttatctggatccctatctgtgagagtggctcttctctctgagttttcaacatttgctcccattatcttgtcgtggtccgttggacgacaaataatggttacatattccactgggatacacgagtgactatctctgggatacatgtatacaagtgcccaatgatcaacatacggcataacttagcatatccatcacctcaaatatctgtcatccatccgtagtggttgaacagtcaacattctttcttctagttgttcaaaatttataaacatgtaaattttattcacggaaatccaaactgtcgatctgcaaaagtcatatttgtatggcacattgtcgatcattctattcataatatgattgccattcttccttttagctttgacagagatctctaattgatcgttatttccaaagaagtcttacctggtattaatttatccacgtaatattcccctggtgtttgcccagttattcaatgtgattgactatcttctaaaagccccaaaaatgtatggggccaccatacagtgttccaaaatagcgcgggcatctgcctacaaatatcactgttgaacttggcgcaagaaaaggggcgcgaacctcacagacagcggcctcgcacacgagcgaccccatctggccacgagctacacacacgcgcacac

SEQ ID NO: 589238 - DNA, 544 bp, Homo sapiens
  misc_feature (417)..(417): n is a, c, g, or t
agctttgggactccgagtctatattgagtgtatcgagagcgctcaccattaaatcactagcggatgccgcgtagccaccaagacattgcaacgtcgatgcctagcatagtttccgatcggattaaaaccttagttgacacgccacactgcacggacgcaatgaagacaccgattatgcttagcaggatgttggccaactcagatttagtaaaggttttcaccgtaggtggcctgactggtattgtattagcaaactcataactagacatcggactacacgacacgtactacgttgtggctcactttcactatgtgctatcaataggagctgtatttgccatcataggaggcttcattcactgatttaccctattctcaggctacaccctagaccaaacctacgcccactttttcggnctatccggaatgccccgacgttactcgggctaccccgatgcatacaccacatgaaacatacttatatgtgtcggtgtattaattttttaacaggagaatttcacaattttcatgattgagaagccta

SEQ ID NO: 589239 - DNA, 431 bp, Homo sapiens
ccgagctgttcctcctcctgctatacctggtgttgcgggagtcgattctacttgttctgactcgagatcttgaacagagctaagattctctcttagtcttacacctttcactaggctcaggtcatcagtgtgttttagctatttgtcgtctgggtattatagctggattgacaagagtatccccttagctgtccttaatttctgcgtcatgccttgcatgagctctagcttgtcgtgtctccctgactcatctcgttcatactttcctctattacttgcaaggtgtaaggttgagtcgttgctcggcagaggaacgagtgagggaattcaaagtcgtaatcatagccatctctctgccctgtgtgagagctccctcatcaaggaggcaggctttccccctggggtggtgaacatcatcacggggtatggcc

SEQ ID NO: 589240 - DNA, 417 bp, Homo sapiens
ccaggatcccggcccacagccgtggaaggactggcccttggcagctctgcatcatcgtcgtcagagccaccgagattatcatcaaccctgccgacagaagatggtccagaagctggccctgtacggaggatggggccctgacagctggagctgctgtcgtccagctcctctcagctggggctggaacaggcaggccaggcccgaagcaagtgagattcagagcgagtgttcactgggcagatcccaaatcgcaacagtccacgcagcatcccgggccgacctcccttgccgcagggggggcctgcccgggaaaagaggccccgcacgcccggcacaccatggccgtccacctggggacgtaccgcgcctcaccgcccggcaccgaccgtcccccgtgccccactctcccccccaagc

SEQ ID NO: 589241 - DNA, 212 bp, Homo sapiens
ccttattgggctgtctagtcatcctcgtgggtcttctggcttctgggtatcgacatcgtcatcctcatcatcttcagctggcccgcttgcccgttagctgcctcagcttcctcatcttcatctccatcctcttcctcaccatcaccttcttcttcctcctcctcttcctccccttcttcttcctcctcctcttccttctccaacattctccg

SEQ ID NO: 589242 - DNA, 84 bp, Homo sapiens
agcgggggttcctggcgcttgcgcgcggtcgctgtcgcgcgagtggtagtgcgtcagcctgtccgccttggtgaagaagcggaa

SEQ ID NO: 589243 - DNA, 259 bp, Homo sapiens
  misc_feature (25)..(25): n is a, c, g, or t
ggagaccagggctgaggcaggaganatcacttgaaccctgggaggcgaaggttgcagtgagtcgagatcgcgccactgcaccctaacctgggcaacagagcaagactctgtctcaaaaaaaaaaagggtcttcaccccagccccgacccaccgggtcagatcttcctggcccgttgtcccggccatttcccaccccttaagctggggtcttcacccaagccgagccaccgggtaagaatcttttctggaccgttagctc

SEQ ID NO: 589244 - DNA, 292 bp, Homo sapiens
taggactaggcaggcgcggtggctaaagcctgtaatcccagcacttttgggaggccgaggaaggcggattccttgaggtcgagaattcgagaccagcctggccaacatggtagccagacatggtggcacacacctgtagttccagctactcacgaggcataggcaggagaattgcttgatcccagaaggcggtggtttgcattaagctgggaatacaccacttgcacttcagcctgggttgacactatcaagactcctgtcttcgtgctaggagcgcgaatatatactcagt

SEQ ID NO: 589245 - DNA, 628 bp, Homo sapiens
tgcccatatgtatgatttttttattttatttttggagacggagtctcactctgttgcccaggctgcagtgcagtgccatgatctcggctcactgcaacctctgtctcctgagttcaagcgattctcctgcttcagcctcccgagtagctgggattacaggtgtctgccaccacgcttggataattttggtattttcagtagagatagggtttcaccatgtgggccagactggtctcaaacttctgacctcaggtgatccacccacctcggcctcccaaagtgctgggattacaggcgtgagccactgcacctggccagtagccaaaacaatttttaaaaacaagaaccaaatgggaggagtcacactctcctcccactacctgatttctagccttctaacaaagttaatttaaactttataatgggctttaaacaaggttggatagataatgaaagttagtaaaagctaattgtcattgtcccagactgcactttgtgtctgaaagattaagtagaaccaggtatctatcttttcttgagtgcttcttgtacttccaacaagcataagatgggagtgctggagggagtcagtaaagatagtttcctagggaaggatggacttttgctc

SEQ ID NO: 589246 - DNA, 289 bp, Homo sapiens
gatatagtaccgcgagggaatagatgagagagatttataaccaaggcataatatagcaaggactaacccctatacctctctgcagtcatgaagtatctagaaataactttgcaaggtgaggcaaagctatgatccccgatatcagacgagctgagcctcagaatcagctagaacagcgcacccgtctatgtcgcacaatagtgggaagattataggtagaggcgacgaacctaacgagcctggtcatagcttggtctttgtgttagagatgtacatagttcaactttaa

SEQ ID NO: 589247 - DNA, 2151 bp, Homo sapiens
  misc_feature (1515)..(1515): n is a, c, g, or t
aggatgggagtctggtactgggcacgggaacgtgtgcagtgaagagactaggagtggtccgcagtggtccgagaaggccgtacggtcgttggtcggcactgcactcacgaattggtccttagacagttagcatacacctagacatcggacgatacaggcacgctgaatgcgtcgaagacatgcacaatcgctctgtggaggagtgcaacctggttggcagaggacttccaggaatctcaaccgtgagttggtcaccgcattacactggatcttcatcacagcacattgcgagtacgtgtaggcgcgagacattgcgtgcgcagtcctctgcgtaacgagtcacatcggtagttgagcatggcccgggttccagtttactaaaagggcagccattatgtacagaactatgtctcgttcattttgcgatcgtagctccctcctagtaatgcgactctgagctgtgatcccatgttcgaggcaagtcacacctcatagccatcccgaagacaaactgaggttagcggtaaaaagcccgcagacaaaccactatactccactagggagagaaacttaggagatgagcatttgtacagtacggcaataatatacacagggactttccgctatacagaagtttccagggttcgtttggataaacggctaattaagcaagggcgccaattgattgaatgcgtagtcgccacaagccaacaaccccctttgtgcgcccctttttaccatatgttacagcgacaggtggttgacgtgcaaacatatcaccgattagcacgatacggagaagacacaaagctgtggtttgacaatctgacaccccgtacagatgttacctcgtgtgatagttgtcccaacaaggggttgggtgaacgagattcctgttccgtcagaccatctgctctccctacattaaggagactgtgtccgttactccccaccgcaatagtcaaatcccccttatgacctttcgaacgacccgatagcgaagaccacgcatgaattgcccattccaggtcaacattgtgcctgtcattaccgcgagcggggtatactagatagtgccatcgtgcagaggcgcgtcatggcaacacgactgttcgcaccgcgccacaggttatgcgcacctccgttgtacgtagccagcggcgcaattagcatacaggtgcacctagcaacaccgatgaaacagacatacgttcgcgcactcgacgaaaggacagcatattaacctgtccacgcgacgcaacactacgcagggcatagtgcacatctactcccgatagcacgccaacgctgttatgacattacggtcctcgcttgacactagaccaatgcagaacgaacacagtcgtcgactgctgtcgagcgaaggaaacattgtgagatcacacacgcccaagactcggatacaccctcatgtggtgaccgtgtcaacagctaacacgctgagctggacttccgaccagatacaccttagctaaacgacactatggcccacgntgttcggccaacacgatttgtggaacctcaaccatcgaggacacggtccacacgacacatggtaggggtcatcttgtagacacgatgaagagcacaacctttgagagtaaattgtggaccaggtgacaacggaatcaccatttggagcgttgtcacacttgcccactgcacacgtgaacatgtgactcggagcttctagcaccggtaatctgctcctggtggactgcagtatattggcactctgccaatgtgcacacgatcaacctcgctttgaggatgacatattgtagaggcccgtcatcatcatccaatgcgtgacatccgcatcccacaggcgcagcccaaggagagacgcaggcccagaacatcaacactacagagtgacctagaacgcgagaaaggagcggggagtgacaacaccattcagcgacacccagtaggcgacacacgccgacaaacaggtcaacgcaaagagcccacagcacaagccgcacccgcgagtggcgcgaacacgaaccaccgccacccgcccaatgcgcaccacaagcaaaccgcacaactcagcggcagcacgacagcacccaccagccataacacgacgcacccaaagcccgcgacgacacgacgcgctcacaa

SEQ ID NO: 589248 - DNA, 437 bp, Homo sapiens
  misc_feature (67)..(67): n is a, c, g, or t
  misc_feature (320)..(320): n is a, c, g, or t
  misc_feature (355)..(355): n is a, c, g, or t
  misc_feature (422)..(423): n is a, c, g, or t
gccaaggcgttgaacgtcgaagatttccctgaccccgtcgcaccagcaagcgcaatgacggtatggncgccaccgattcggcagcgccggtcggcccgttccacaacggcacgggccagagccacgacgtcgtcaggaatatacccttccgacaggtccaccgctcgggtcagcaggtcgatacgctcggcaagatcgacgcgatgtcgcctcatcgttccccctgacgaggctcgggatccagaacgaccgccggttcaacgacctcagcgtcaaggcccggcatgttcgcttgtaactgccctattttggcaggctgnggtgcctcggcttcgggatcctgacaacgggttcngatcgtcacctgatcactgtgagaccctggcgcatcttgagcttaagtcgtggcttggagaagtcgnngctggaagtcattg

SEQ ID NO: 589249 - DNA, 97 bp, Homo sapiens
cgatgttgtctacaatgcatgtaataacgagctgggttcgtaccaagaccctgggtgaagaattggcatcgtggctcatcgacaacacaccgtaccg

SEQ ID NO: 589250 - DNA, 277 bp, Homo sapiens
attagctgcaggtatcagcttagggagggaaggctggtgtcacggtgagcctatcaccacactgctatgttgggtgtctgtctgggccccaggacagaggctgtggaagtcagggactgctggtcctgtgtgtctgcaagacttagccccatatctggcagagtggaggcttggtgagcatacgctctcacactcattctgcagatgatgcctggcatctgtgctgcatgttgtacacctgttgctggtactgagggggtacatggtggtgaaaagg

SEQ ID NO: 589251 - DNA, 362 bp, Homo sapiens
ccccacccagctccgctccgcttgggttccggcagaaccgccttgcggtagccatggagcaggctccgaggcgacactcctgtgatcgttgcggctggggctggaggggaggaaggtgaacatgtcaaaccttttaagccagcagcaaagcccaacagcaaacattcatcatgtctttcacacacaacctgcgaatctctctgtaaccataggtgtttgcattggcgccagcactgaccactggcacatgctaacataccctttccgccaggtcctctccatggcaagccagcatcaccgcattccagcaatggcggcatgcacacacagccatgcagccaccagtctccctcccagttcta

SEQ ID NO: 589252 - DNA, 277 bp, Homo sapiens
atggatcgaaaagtaaatcccactcagcaccatagtcacaggcatggaggggctcacacacaccatagccccagagatcagctttcattctggacctaccatgaaagacttctgaatccaggaagagaaactgactggagcaacatgttattcagaaacaggaccttgccctgatcactcaagatgcagttcagtggtcgtatcatggctcattatagcctcaaactcccaggctcaagcaatcctaccatgtcagccttcccagtagctggaacta

SEQ ID NO: 589253 - DNA, 107 bp, Homo sapiens
tgagaggtggaacatataccctgatgtcgaaaaatgtcgtaaaatcccacagacggaatattcaaaaagaggagaaagctcccgcgggagggaggcagcgagactct

SEQ ID NO: 589254 - DNA, 81 bp, Homo sapiens
ttttttttttgggggccctttcccacccccctcaggggggggggggggctccccctgatggggttttaaagaccctttaga

SEQ ID NO: 589255 - DNA, 317 bp, Homo sapiens
tcagtcggtcctgcagaacttactggaaatacaaagtagccagccaagggaagggtgatggcctaagccaccagctccagctttcttttctttctttttttttttggagctggagttttggctcttgttgccaggctcctgagcagctgggactacaggcatgcaccaccatgcctggctaactctgtattttcagcagggtttctccatgttggtcaggctgatcccgaactcctgacctcaggtgatccgcctgcctcagcctctgggattacaggcgtgagccactgcgcccagcctccagttttcttttcttg

SEQ ID NO: 589256 - DNA, 361 bp, Homo sapiens
ggccgaaggagtttttgaaaaaaaagtcttaatattcagcaattctttatcttcagaattaatactaatcatccagttatcctgcactgcaaatattttggtagctcagtccaacactgaaaaacaaaggcaataactgtcagtatatttaagagttgggttttttttttaactttaaaaagtctactcaattaagcaattctctctcaagttctttgtggagactaacttttttcctttataaattttagcgttttttctttctttctttttgagacacagttttgctcttgttgcaatggtgcaatcttggctcaccacaacctccacctcctggattcaagtgattctcctgtctcag

SEQ ID NO: 589257 - DNA, 692 bp, Homo sapiens
cgatgagagagagagagagagagagagagagagagagagagagagagagagagagagagagagatgagagagacttacccccacatatgtagccactctctataagtgctgtgccgttgccaatcctcctgtatgctatcccgttctgttcgctgaatttattcctcttttgtaagaccctccttttctaatcgacccttttcgtgtgctttttgaccagcttggtgagttccaattcctgattgcgctctttgttcgttgcactcattttgttccccatgtgtttactccaactcttgtttaggtctcctgacaccttggaatttttgtcaccaaatgttgttaacctcctgatgcttttgtattccctgggcctaatactatttttctcgtgttcttgaccagttttttgttgttcctgtcttcccgcccttttttgccttttttacctcatgctgcgcctattcctttttgttcttctaccttgcttttttctcttgaagcccttgcctactttcccagaggttttttcctgcttttcccttccttccgtttttttccccctttttgtgatgggttgacccctttttataccctacccgtcctcgtgtggccttgtggcccctccgccccctgtcctatcttttgtagcccctgtgtggcctgtttctgtctgtttcccccttttttgc

SEQ ID NO: 589258 - DNA, 84 bp, Homo sapiens
tagagaactctcaataaatatttgttgagtgaatggagtaaatggtggcctctactagtgttagtggatctctgtcagttccag

SEQ ID NO: 589259 - DNA, 483 bp, Homo sapiens
cgcattacagagatcctcagatgtacatatacacacatgtacacaacacgcacacaaccttacacccatacacacaccctcacatgcacacacgtcgatccaccacattgacacacacccccgaaaaggcacatatgcacgcgtccactcacacacacacgcacacataggtacacaaacaccctcacatggccatgtacacacgtccacacacatgcacacagcccttacacacatacacatatgtccagacgcgtagcaaagccttagcacacaccgttcacaaggcctatatacgcaaatgtcacacacgacatgcacgtaccctttcagcgagcacaaatagcatggtacaacccaacacatgcacacactcttacacacacatacacccattatacacataccctcacacacttatgcacacgtccccacactcgcacacatacgctcacaccttgtaacacacaatctcacacatga

SEQ ID NO: 589260 - DNA, 1134 bp, Homo sapiens
gaagaggcctcgcgcagaggagggagcaattgaatttcaaacacaaacaactgcacgagcgcgcatccaccgcgccggagccttgccccgatccgcgcccggcccgtccgtgcggcgcgcgggcggagacgccgtggccgcgccggagctcgggccgggggccaccatcgaggcgggggccgagcgagggccgtgagcggagcggcgccgccatcgacggacgcggcaaactttgggctctgtgctttcccggcccggcgcggagcccgggggcgcccggagccccgccaatgtcgacgatccaaccggcagaaggagtacaaatgcggggacctggtggatcgccaagcatgaagggctacccacgacttggccgggcccggatggacgaggatgccatgaggctgccgtgaaatcaaccagccaaacaaataccaagtcgttaagagacggggaacccacgagaccggccatcctgggcccaaagacctcttccgttacgaggaatccagggagaagttggcaagcccaacaagaggacagggtcacgcgaggggctgtgggcagatcgagcaacaccctactgtcacgggcttccgggctatcaagtcctcacagacagaagagctgtgtgggacaggagccttgaaccaagagcccgaagctgcagacgggtgacggtgatacgaagggggaatgcagaggggcaagcaggcgccgaaggcaggggcacgctgggtctttaatgagccacgccaaggcaacagaacgaacaacaggagcggtcgacaacgacacgcacggggacatgccggacggaccacaccatacaggcccaaggaggagaaacacttgaggcagcgacaagggcagccacctgaaggctaagggcccatcctatcgaggcaaccgaagatggcacaccgagaccgcactgagaggagggacccaaaggacgaagacaggcagaacagacaagcaaccagcacaacagagagcacggaaaagaaagagggtggacaaggctaaaggacaagaaagaaagcgaaacacgaccgaacaaagacgtggcccgacagatgaagcagcgcccggagtgggaaacacaacaaccaaatgcgcagatcaacactt

SEQ ID NO: 589261 - DNA, 441 bp, Homo sapiens
  misc_feature (18)..(18): n is a, c, g, or t
  misc_feature (405)..(405): n is a, c, g, or t
tgggtaatgaaaaacaantgtatggctatgaaaacacgaagaggaaaattgttgtggggcttctaaagaaagatgtaggggcccagccctactggctcaaaacctgtaatctcagcactttgggaggctgagatgggaggattgcttgagctcatgagttcgagatcagcctgggctgatacagtgagacctgtctagaactcccgggttcaagcgattctcctgccccagcctcccgagtagctggaattacaggcgcccaccaccacacccaactaattttttgtatttttagtagggacggagtttgccatgttggccaggttggtctcaaactcctggcctcaggtgatccacctacctcagcctcccaaagtgctgggattacagcatgagccaccacgncctgcctccacctggctatattttctattttttata

SEQ ID NO: 589262 - DNA, 308 bp, Homo sapiens
cacgagggggcgagctgtcgtccttcttcaaacggaccgagccccacagcccggtgggcttcctgctggatcgggccatcagctgggccaacctgccactcgacgagtggttgcgggaggtggtcagcgacgactccgtgctcaacaccgtgcgcgaccgcagcggcatgccgcgaagctgagccgggccgctcgtcgcgtcgatccggggcaggtcccaccaacggcatatgtcgacgaatggccgtccggctgattctcgccggcaccgagcgttcctagactcccggtgtcgaagcccgcgcgca

SEQ ID NO: 589263 - DNA, 713 bp, Homo sapiens
gccagccgggccgcgtcgcaccagaaccggaagaaggcggcccggcggcaccatagaaaaggactacacgcgcctgggcaacgagctccacacgaacaagcgcgtggcgaggagagcgccattatccccagcgaaacaagcgtccgcaacaagatagcaggttatgtcacgcatctgatgaagcgaacttcagcagaggcccagtaagaggtatctccatcaatgctgcaggaggaggagagagaaccgagagacaattatgttccatgacggtctcagcctgtggatcaggacgatcagttgacacgctagatccctgacacgtaaggaaagtgctgaagctttgggacttcggcaggtctgtccaacccttcagggtcactcagtcctacatgttgggatgaactttcaagaacgcctcggggacctgttctgaatttagttctgtagtgctgctattattttcaactaaatctgggacaacagcataaaatataaaagacagagagcaataaatgcaactgcaaataatgcctgctccaagcacgacacaaaaaacagaaccatccggcaaaaccaaaacaaatagaaacaccgacatacacagcaaacaaggacatgaaccagcaacccgcgatgaagacaaaacaaacgcgcgacgcaaaaagaacaaaccataccaccgaaggatactccacaccaacccggcaaat

SEQ ID NO: 589264 - DNA, 892 bp, Homo sapiens
  misc_feature (178)..(178): n is a, c, g, or t
  misc_feature (247)..(247): n is a, c, g, or t
atggaagattagaggtttgtcaacacaaagatacaggaagaatgggctgcagaagatttagatgttttccatttgggcacattttacttagctggagaactaggtttaaaacagcctgggtaggaaaattagaagcaagctggatgcagtggctcatgcctgtaatcccaacactttngggaggtccaggcaggaggatcacttgggcccaggaggtcaagcctgcagcgagctgagatcacaccantgcactccagcctggggtgatagaacaagaccctgtctcatataaaaaataaaaaagcaacaaaaatttagaatggaggagttgttcctccatggggttcgttcactccaaagatgggtgctgcatctcattccatattcctagtatcttggccacacttatggggttgttggttgctcgacgcagtcgcatgttgtagccaatgatagcttaggggccataggctgcccatatcgtagagcgaaacagccagtgaggactgctatggagctcaagtaccagagtcctctaatagcaccttgaatccattggttggcctatctcatgccgtacagacaggctgtgggtcctcttaacattggccattcaatggtgcagcgacgagagtggacaaaagggctcggaatggtctcattgggtcgacagtgaacgtggatctcgaagtccactggacagtattttaacaatagggcttaagaagaagggaaaaacgctggccctcgtgggctcaaagtcagtgtcatgggactcgtgtgaatttcccgaagctcagcttttttacacattccaagctctctatgttcaactctctggaaacttgacactatttacacacctggcccaaggcatatttaaataaggcca

SEQ ID NO: 589265 - DNA, 574 bp, Homo sapiens
  misc_feature (41)..(42): n is a, c, g, or t
  misc_feature (134)..(134): n is a, c, g, or t
  misc_feature (230)..(230): n is a, c, g, or t
  misc_feature (282)..(282): n is a, c, g, or t
  misc_feature (320)..(320): n is a, c, g, or t
  misc_feature (339)..(340): n is a, c, g, or t
  misc_feature (372)..(372): n is a, c, g, or t
  misc_feature (387)..(387): n is a, c, g, or t
  misc_feature (398)..(398): n is a, c, g, or t
ggtgtacgtgcccaccaccaggtcccctccatgctccccannctgccctacctgcccagcagcggctcttcccagcaagccagccccgtctccagccactccatctggactcaacctggagccgaaagcgccgnatacaaccccggatcttcccacccgcccgtgtcacctcgcttctccttctccaccagcactcccatcccctccacctcatcgcgggatgccgcggnggcttacagcagctccctgagcctttctgctaacgggagggagcaatacagncggggcttcggcagctcctactccagcccttacccggngtacgtgagccctgaaatnngcaccacttggacttcttcgcccttcgacagncccatgctgcacaanctgcagagcanagggacacccgcggccgcccggaatgccaacatcgaatttttgatgattattcagaagggcgagcatgtgtcaactgtggggcatgtcaccccgtctggaggagaagatggacagggactacctctgaatgctgtgggtctataaaagatgaaggcataacggtcttgtcaaactc

SEQ ID NO: 589266 - DNA, 139 bp, Homo sapiens
atccttgaagaacgaaagctacatgaggagagccccatgttcactcagttctctgactagtgggcagttttctggattgtagcacagtgaaggtgaagttcaaacactggcacattgtactcactgtgacaaatgtgaa

SEQ ID NO: 589267 - DNA, 790 bp, Homo sapiens
taaactaaaaaccgaaacttttgaattttttctccccaaaccaaaacgctgacactagcccgtaagttccccttaacaagtgtttattttctcttacaacagaaagctgtgggacagaggatacaatacacagcccactctcaaccagggggtggccaacattctcgtgtttaaaagagggaggggagtctcaaaagaaaacaaaacccccctctcgcgccacattcttcccttatattcaccctcccttaaaagaccaagagggaagaaccattggaccacccctctcctctccgtgattaaacacatgtgccacgtgtgtggctcagtgtgtgtgcgcagtatacaacgagagaaaaaaagaaacacacctataaagaattattgttgtacacacccttttattttctctttataaaatctctctctctatatatataacacaccattatacacctttctccaagaacaaactctcccacaacccgtgacacattgtgctatatataacaccaaatctctctcatttctcacaaaaatatatatctctctccgtgatataatatatctctctctcacaactctctctctctctaatatattatctacaaacatcttgagacactctcccaagagagagactgtgtgtgagcgccacaccctgtgggcgtaggggacaatactttcacagctgtgaggacctctcacaggagggcggacacacaagagaggcgcttgtgagagagaaacaaagaaagctctcaccaaacagtgtgggcgagacacacaa

SEQ ID NO: 589268 - DNA, 346 bp, Homo sapiens
agcctacaggatctcactaggtcactcagtacaaaacgaaagctctaccacctgccaggccctccatgacttggcttcatgtctgacttctcacactcacacctgtagccccactggcctcactcttccttagacaggctgtgcagactcctaccccaggtcctttgcatttactgttcactttgtctggaaagttctccccagatcatgtgttactccttcactgctgaacctttcttaaatgtcaccttctgtaagaggcttttcttagccatcttcaaaaatctcacctgcaaataccacccatacttctgtccccttgctttgtcttttctcttcagctctt

SEQ ID NO: 589269 - DNA, 328 bp, Homo sapiens
gactagttctagatcgcgagcggcctccatcaaatggcggatgacgccggtgcagcgggggggcccggaggccctggtggccctgggatggggaaccgcggtggttccgcggaggtttcggagtggcattcggggccgggtcgcggtcgtggacggggccggggccgaggccggtacgtcggggggaaggccgcaggataaggagtgatgcccgtcaccaagttgtgggccgttgtgttcgaaggaccttgaagatcaagtccctggaaggagatctatctcttctccctgcccattagggaatcagagatcatgtgatttcttccct

SEQ ID NO: 589270 - DNA, 921 bp, Homo sapiens
  misc_feature (11)..(12): n is a, c, g, or t
gtaaactgttnnttcacgtgggcagtcggcccagcgtcgtctcccgtgtatatgaggtgcactctgtccgggacctgtgcctccggatgcagcgcgctccctggttgaccacggcccaagggaacttccgttatcctgggcccctgtttttaagcccggattctgaggtaattttgggaggggttagcgctaaatatctaatgtgggcgcggtctataactctctgtgatattatgccgtcctccccgcttttgtgaaggccccgtgtggtccgaccggcaatactcctgggcgccccccgattcaaccctgttcagagaggccccccgttggcaacgagctttggcagagtggcccagctccctaattagcccctgggggacataattgccccccaaaggggaatactcccttaattgtcccgcagatcacttgctcgctcgcaacttttcccccgggtaatatttcttgggagcattcgctccctgtttcaaccctgtgacaacgccccccgtgggggcggttaacaaaatagattggggggcaatttcataaaaataaggggacaatccaggtatgcggaccgagattaaaaaagtgtcttgaaatccctggaggaaacaagcgctgggagcgctttcaaaatccccctagtccccttaaaaaccacatcccccccgaccaaagttatgcctgaaatcgcccccccccgtgtattgaagagcattactcccccaatgctgtgtataggctcgttcaagaacaaaatggctcgccaccaatgattcacctcataagcaatggaagtttcgaatgcttcccaccactcggcgatcttattaatcctgtcgcaaacctggtcttttctgaaaaacatattttctcttcaataaaaaatctctaatcaacctcaacaaaaca

SEQ ID NO: 589271 - DNA, 554 bp, Homo sapiens
gtatgtgaggctcaagttagattaggtgggaagggctacctagaagcggtgcaggtgaggtacccatgtagagaggatgggccatttcagctggggtgggtggatctgggacacctttttcactatctggagaaaaagacacataggggtggtccagggctgcggtggtcacagagaagagcggacagcaaatgaccaggcggggcagggctgcttcggtgtgatcagagaccttcacagcggggagtgaggccttacgccagacctgcctctccgggtcccagccaggagctccgggccaactctgaagagggcacattcccttagcttgggcatataaagagggcctgaatttaaatgtaaaacggagtggtaaatagtcaacaaaagtcctgatatttcttgggtgtgaggtaagactccttcacagggcctggcgagtgacctaccataaatccagtctgcggggagcggggccacccaccagaacaggccctatattatggggggccaaaggggttcactgcttaagtttatcagaccctatgtgccgg

SEQ ID NO: 589272 - DNA, 515 bp, Homo sapiens
  misc_feature (1)..(1): n is a, c, g, or t
nattttccccccctcaaaaggaacaaaaaggggggtcccccccggggggggccgctcataaaatatgggttccccccggctccaagaatttgggcccggagaaaaaaaaagaaaggaggaagttttccccgggtggttaaatggggaaagagaaccccggggtggcccctcctaaaaaaaaaccccaacccctgtgtggggatccccccgccccccccgggggaaggggggtgttccttttaattaaagaaacccacctggggggaaagggataaaaaaccattttggccccggcaaaatttcccccggtgggggcccctggggtcaaaacaaagaaggttgggggttcccccccttgggggggttaaaacccccccaacccaagggggggggtttatgttccggccccctagacccctttttggttttttaaaaacccggggggcaaggggggctttcccaaatggggccttttttttttttaaaccggtccccccaaaaaaacgggggccggg

SEQ ID NO: 589273 - DNA, 190 bp, Homo sapiens
cacagtaatgatgttatcaatcagtgatgaactgcataggacggtggtcccattatgattataatggagctgagaaacctctatcgcctagtatatactatactgtacttgctgttatcatatggtgatctgaccatgaagtctcatatctgtagcccgagtctggagagtagtagatgtgatctctggc

SEQ ID NO: 589274 - DNA, 271 bp, Homo sapiens
accggtagagcggctagagcggtctgaagttcttgacttcctgtgtgttaccaactgtagaacaactaacagctcctacaagccaattccttaagtggttcactgtttccatttttggccccatagcgtctcttctccatatagtagctgcactggcacagtgtctggcacacagcaggtgtctgctcaagcatatgttgaaagtataagttatttaatgaaggaatgagaggtgaagaagagcagaaggggcgccatgagaccgctctta

SEQ ID NO: 589275 - DNA, 208 bp, Homo sapiens
  misc_feature (132)..(133): n is a, c, g, or t
  misc_feature (208)..(208): n is a, c, g, or t
ctcctccgagctcgctgttcgtccgggttttttacggtttaatttccaggacttgaacttccatgttcctttgaaggaggaaagctcttcgttgggagggctctaactttaacaacccacgagcgaggcacnntgaagagccacattcagcaagtttcggagcctatctctctaggtgtgtctgcttgtcaaagagcccggagactcn

SEQ ID NO: 589276 - DNA, 359 bp, Homo sapiens
  misc_feature (171)..(171): n is a, c, g, or t
  misc_feature (181)..(181): n is a, c, g, or t
  misc_feature (330)..(330): n is a, c, g, or t
ggcacgagccggagtcctcctggtgttggagggctggtgttcctggcgtgcctgggcaattctggaattggaggcatcgcaggcgttgggactccagctgcagctgcagctgcagcagcagccgctaaggcagccaagtatggagctgctgcaggcttagtgcctggtggncaggctttgnccgggagtagttggtgtcccaggagctggcgttcaggtgttggtgtcccaaggagctgggattcaagttgtcccaggtgctgggatcccaggtgctgcggttcaggggttgtgtcaccagaacagctgctaaggcagctgcaaaggcancaaatacggggccaggcccggagtcggag

SEQ ID NO: 589277 - DNA, 498 bp, Homo sapiens
attaggagaaatacctaaggtaaatgatgagttaaggactgcagcaaaccaacatggcacatgtatatgtatgtagcaaacctgcacgtgtgcacatgtacccgagaacttaaagtaaaatttaaaaaaaaaaaaaaaaaaaaaggccggagtggggttaggatcaatttttcaaaaacctttactacggggtgatcaattaattttttattgggatcaccaattcgtggaggaagaccagttacgaaatctagcgggctgaccacgaaacattctccactccgagggagaacaagccagaaacttctctttcataaagttaacatttaagggtgactaggctgggtacaaattctggaagtatggtgaatttgggggcaggaattctccccttgtgataaggctggtcacttcacgggatatatatattggggcccaattgggctccggcaattagggtttggacaagagggccttcacgaactggggggatactgg

SEQ ID NO: 589278 - DNA, 632 bp, Homo sapiens
cgcaccagatatgctcctgctctgagaaggtgggtatatatacacacatgggacatactcactctcaagggctgatgagatgctgaattttctttgggggcattcattaattgtgccaactgcagcgactggagcaagtgtggaagctgtctgtgctatagacacacccagatgtgcctgggttctcattctatggccttctttgcgttccaagtcaggggacactcggttaatgagaaagcgactggattgaggctatggagaggtagggagagctgagttctgactctacctgtgcagaactctctgtccccatgtgtacctggactggaacagactgtgaatatatgcagaagggttcaagaactctggtgtgtgacctataagaggcgcaggtctctctactggaaagtctaaggaacctgtgggaggatgcacgaggctgaaaggatgcacctggcatatctctcactgtgctcttaccgcattagcaacccccaactctttgggcctactttgtcccccatgcgcgaatacccctgctttggatgctgtggctttttccgcgttgtgtctaaagacccttttttccacggcatgttggggttcccctgggccttaggggtttgggt

SEQ ID NO: 589279 - DNA, 464 bp, Homo sapiens
  misc_feature (55)..(55): n is a, c, g, or t
  misc_feature (458)..(458): n is a, c, g, or t
gtgggtggagatggtgccactggagtgacagagcgagactccataacaacaacancaaaatttgtgaaagaaaaggaaagtgaacctgaagttcaacggtcaaatttttagtccccatattctgaattggcaaggaaaagccaaaccaaattatacaaagataaaaatatatatgaaaagtgagaaaacactaaagccaaacaagaatgacccagaatcaattaaaaaaagggaagtgacagtataccaataaatgggtcagaaataaaagcagtaaaaaactacagttaattacagttgctgaaaatgaaaatatctttgttaaatttaattcaatgggtaagggaaaaaatgacatgaatgaaataaaatgttatactttttaaaaggcagagagggagcataacaaaggttttattcttggaccaataagggaaccttctaaattaccaaaaaanaaaaag

SEQ ID NO: 589280 - DNA, 275 bp, Homo sapiens
  misc_feature (69)..(69): n is a, c, g, or t
ggaagatttgactcgggcccggcacctccaacaacattcaagcctaacagtcctgacctggccaagcantgcaaatctgcttctccacagcctgcttttcatctcagaccagacactccagtttccgtgagagggcaccacgtgattcagggactcctttggacaacacctttgttgggggttgtgacacctttctgaacgctctcccctagttcagatcactcagtccctagggtcagttccaagggggcttcagacaaaggcccttacacaca

SEQ ID NO: 589281 - DNA, 263 bp, Homo sapiens
tgggtaggggctacctggaggtataaaggtcagaaaaatctgcgaagaacaaaacttctgaggtaatacctaggatatcccgtatcgaaggcctttttggaccaggtggtgtgtggtggccttggtatgtgctttctcgtgtacacactcgcgccatcattggtatatggtcagtgtgtaggttagtaggcctagtatgaggagcgttatggagtggacgtgacactcacaatgacaagactaaccacaaccacctgctttta

SEQ ID NO: 589282 - DNA, 980 bp, Homo sapiens
gagcgcaagacggtaaagacaccaggctaggaggcacggtgcggacgccagcgaggcaagacccgacatgggcctggcggatggaacgagggctgcaagactccggggcaggcaggcacggtgcaagacggccagcgaggccacgactgactacaatttaccacattgcaacaaggcaacaaccaggtaattcctacaactctcttttggacatgtcaaacaccatggacacattggtactttctcactactcgaccagggttggtcttcccaaggaagcattgccaacgctatccacggctgcccccttccggccaagtactcgccctgctcttcgacgcagatcctggctttgggcacccgaggccctccggtcagttcacacagaacaacggcaattggcatgtgccctccttccaagagaactgttgttccaagtacgctggtaacccaacgatttgcagaaaatggcatggcccttggcgctacccccttgtgcgaccgacgaacttcaccgttggtacgaaacggtcatttttggcaacaggcccatttggcccttccgtgagcgcaacaatatttgggttaccccccctaaaggaaagcaccttttttggcgccacgcgtaattggacctccttcctcattgggaacacataatttggcccctcacagcgatcgtctacacagttcccgttagcaagaggactagctttgtagtcacgactttgtaaaagcgattctaaaccacggtgggaggacacttcgcagccgcatcgaactttttactttcgcccctttctcccctcgtggaaatgcaaaactgtgcacagcgtccaggtggtggacaacctcttccagaagagttgttggtgccgacaccttaactctcgcctatcatcttgtgtcagaaggagcaataaactcagaggggacctctgccgtcagtttcatgttcgcatcacagctcagtataagcg

SEQ ID NO: 589283 - DNA, 484 bp, Homo sapiens
gatccagcagtagaacgagcatcatgccttgtcatcagggcaggtttccatacccacacatcaccatcctcacctccagcatcttcctcagccgtcccctgggattacatcaaccgccagtgcgggacagactgtaatgctcaccagcagtgcctgaagcatgaagtggagaccacatactcaaggtttccaaagacttaatcagagaactgtctcatcgctgatcacagtgaacacacgggaactagactgaaatggcgcaacaactcagatcaagactttcggcaatagtagacaaagtaacagagatgagaagcacaaacagacaaggcccaatcatccgctccattccagtaacagagccagataggtaggcacaacttataactacacgttcacacgtgatcaaccagacaatgaagcacagttgaagggtagtccgtagcaaaagcccaggcaaatatccaacagcggacatcccaca

SEQ ID NO: 589284 - DNA, 399 bp, Homo sapiens
  misc_feature (91)..(91): n is a, c, g, or t
  misc_feature (95)..(95): n is a, c, g, or t
  misc_feature (222)..(222): n is a, c, g, or t
  misc_feature (241)..(241): n is a, c, g, or t
  misc_feature (244)..(246): n is a, c, g, or t
  misc_feature (283)..(283): n is a, c, g, or t
attcattcatttattcgtttgaccaacatctacctcaagggctttttgcccgcgattaaatgacatcatgtaagtaaagcttctagttcantgcntgacatattgtaaattcaaactttcattaaattcttattccattccagatgccggaagacacaaaataaactaaaaagtgtttgttgacgtggaaggaggtagatttgttcccattctagaaatganaaacagagatttggggaanatnnntaactatcccaagcccacacatacaatgagggactgnatgagtattcacgacttgggtcttttgctggccagagcccatgctctttccattctgctcctttaccttacaagcctgggtttacagagtcattccttcccaggagtaccattcat

SEQ ID NO: 589285 - DNA, 1292 bp, Homo sapiens
  misc_feature (471)..(471): n is a, c, g, or t
cacacgagtgtacagatgtgtcatcatcccccccttatttgttcatggacgctctattttgaggtttcataaaaatcaaattggttcaacaaaaataatttggccaccacgggactcggtgaaaactctttaaatatggacaaaaatgtgtcccgcacaatttgtgtgaagttgttaatatagtgtgggtttaacccggaaatatgtgtaaaataagttagtctttaaatttatgggggaacccccctgtgagtagatgaagcgctctccctaggggaaaattaaaaaaggtaaactccccatgccacttttttaaggaggtttccaattaaaaaagtgtgtttgaaattttttttttttaaggaatgagttatatttaaacctcttttgatttttctgggggccaccctattggtgggtcttatggttagagagtattttatcctactccccccccccccctcggagagnggagaaaattcacgcaaaatggaggttttaaacccccccacgctgggaaaataacacactcttaaaatgttcttataaaaggcggggctctctctttttcaacgtatagtgtgggagactcttttatagaaaaagtgggtttctcacgttatgtttataaggagaagcgtacaccacatctcttatgagtcttacactttttataaaaccggagtggcccctttctcttaaagagaattaaacgccaaaaaaaggtgaaattttgtctttacaagaaaaagtgtttgcgcttttctccccaaaaaagggagtgaaataaaatgccttcttccctacacacgccacaccacatatatgaggagaagaaaaaaaaaagggcttatattctaagaaatttcggcgaataatttgtaccacgccaacatgttataggtataaatatatatatgcccgctctcccgtctgcgtaaaaatatgtaaaaaaggcctctgagattggaccacaagagaattatacccctggtgctataggtcacacggttgtttgttttgtctcccttgagacacaacctcttggagaaaaaatggagatttgaccacaggaacacatataatcacaggttctactaaacccaaggtgtgtgatttgggaatattactcttttgtgacaccaattgagattataataaatggctctaaaataactcttgtgcacctcttataaagccacaaaggcattgtgaactttaatttgtttattactgtataagtatatgttataatagcttttatcactttgagaattaaaagttactaatga

SEQ ID NO: 589286 - DNA, 301 bp, Homo sapiens
cttagcccgtaagaggatgatgactccagcctctgtaggtacctgcttgagaaaactcaatgctgccaggcgaacttactgttgttccaggcaaaactggtgacagtgagataggcctggaatacctctttgagccgcagttcctttagacaggttgcattgtgggcccgggctggtggctcacaacctgtaatcccagccactttgagcggctgagttgggtggatcacttgtcataggcgttcacgaccgggctggtcgacatggcaaaagcctgtctctactaaaataccaaacttag

SEQ ID NO: 589287 - DNA, 1976 bp, Homo sapiens
  misc_feature (1645)..(1645): n is a, c, g, or t
tgtggtggcagaacaacaccccacgtgttggggtgtgatcgtataagaaaagaggactcgggtttgttgataggaaggacggaccagtgtgtgttgttcacagcgcaagaagggcgtgtgttgttgcagcagaaagtgatcgaacatcgaacgagcaaggtggtgggtgttgtcgctgcaacagcacagcgtgtcgctcgcctgttagtctggccgccgccctcccgccatcacagatgtttcaccgggcgggctctgagtgtttatctttgggtgcgggggaaaaagagtagtggaaggaagatccctcgtggtttggtggaagaaaaaaaagagatgtgggcggccacacacacaggctgctcagtagagtgctagtgtattaaaagaaaggcttgtgttggcaccacagagggaagagccccccgcacctcccctgtgtgtttatgtaggggggcacccccccctcctcccccgggtgtaatatatagtgaataaagggggttttttaacccgcgggggtaagtagaaggtgtttatcgcccactgtttatttgccccccccaccacaggtgttgtcggaatagcttccgcctggagatagtgggaagtagtggtagaggagtatataatatatataatagggtgctcggcgggctcggtgttgcgccccccacaccgtctgggggcgtgttcttctttctgcatgtagtgtggaagctgcaggaagaggatgatttgtgggaagattgtgataaaaattaggtgttgtaaggagccaccacaagcggcctccgttctcgtgccttttctccttgtgagagagtggcccccccacaacaaggggtccatcaacaataggggaagacccccccccctcttttcggggcgtgtccaacaacacctcggtgcgcgccccacacacaagaggagtgacgaccctccttgttgtgttgtgctttctgtggagtagggaagactattgtggataaaagccgggcccgaccaactaagtggtcgtctcctccgccgcctacatcttgatgaggggacagacacaacaaccactgctcttctctcctgtgggggggcgacaccttgtgggcacaacaacataatgtcttttcttcctggggagagacgaccacaactccgtggtgatgaagataataaaaggaagacgccgcgcgtccttgtggtgtggtacaccactcctgttgtggtgttgatcaccttcaccaccaagaagaagtgatgttgtcgggtctcttgttcccccctcgctgatgagagaagattatctcctctactcttctctacagacgccacccttttctactgtggaggagcgtcgtcgcacattgttctgtcactactcacactcggggagaatatgtggttccacacacgcgcgagactctggtgaagaccacaacagtttgttgagaggagagagagaaatatgagcccctctttgccgccaccacaagtggtggtgtcactaccgcacctctctgtgtgtgggagagacaacacacacacactgagacgacacgggcgtggccgcactactgtctctgctgagagagttctctgggggtgttctctctctcagagagagccacacagagagagacttgtcgcnctctgtttccgcctgtgagagtgtccacagagtgtgtgtgcacaggtgtgtagacttcacgagagtgtcacaaacacacacatgtgccggaaacatggatctcctggccacacgagagagaacacccagaacagctgtggttctgagaagatacacttttctcctgtgggagaggggcccttcccacgcacaaggtgggccaaagaccccttctcaatccagggccaagaatctttctaaatgaacacattttttgcccatcacccaggctgcctgcacctgccctttagggaaatgggggtccatttaagggaacctggaccaatttgaa

SEQ ID NO: 589288 - DNA, 412 bp, Homo sapiens
  misc_feature (67)..(67): n is a, c, g, or t
  misc_feature (88)..(88): n is a, c, g, or t
  misc_feature (139)..(140): n is a, c, g, or t
  misc_feature (286)..(286): n is a, c, g, or t
  misc_feature (332)..(332): n is a, c, g, or t
  misc_feature (375)..(375): n is a, c, g, or t
  misc_feature (411)..(411): n is a, c, g, or t
gacataatttgacatctcacagtaagagaaagagctgggatttgcacgaggggtctgcatttacaanttcagtgttcttttcatctcngtgctgctgtccctttggtggtgaaaaaaattatctatcagtccccttgcnntctgccatgtttctctcaagcattgcctggctgagaatagttgcccaacagttgtgaatttccttctcttcctgtttcctgcttctccgatctggccaagtttcttggctgcaggcatttacagactatcaaaattctctaaaacnagttcaaaccagtccctgtgtatgagcagaatatagaatctgtcanaactgttggcacccttgataatcatgctcttcttatacagctnattgctttttttctaaaattgtgggcctaacctcana

SEQ ID NO: 589289 - DNA, 210 bp, Homo sapiens
ccagcctcgctcgggtgtagggattgcatagaaagcaaactacacagtcttgactgtgtagtttgttttagggtttagaggctaccgattcatgtcggaagatggtcagaaaacccacttccataggacgtcgtttcagaggcaccttggcctagtccaccctttaggcacttgagaaatcagagtcctagaaagatgacactaagcacc

SEQ ID NO: 589290 - DNA, 859 bp, Homo sapiens
gatttcccctattctcaggctacaccctagaccaaaacctacgcccaaaatccatttcacgtatcatattgcatcgggcgtaatatcttaactttcttcccatcaacgacatttctctggcctatccgggaatgccccgacgttactctggactaccccggattgcatacaactcacagtgaaaacaactccctaatcattcttgttagggcttcatttcatgttcgtcgtaaaccatgccaggtatagtgacttagagtaaacttttgtacatggcacttttggaagacatgcccttgtgccgactttccgaagaggccagagagagattggttcctcaccattagttaagaaccagaattcgcgcattctccacttaaatagcccttggaacgctcggaacttacttattgcgaaattgacacaccacgcaactcactaaactcatcgatcgaatttccagacaagaaaacgccctgtagtcaccatgaatagagtctacgtagcaagataacagagaaacgagcaattcggaaaccctcccattaagctgcgtttccaagggcctcaatccccccacatgtgttcggtctccacttgtgagccttttctcccccagaccaaagaaaaattatcccgttatacattcccttaggctccagagcaaaggaccaaggagcatttaaagggccagtacaaaggagtactttgcccctccttacttgccctcggttaacaagggtcccttctgtaaccattacggttttccccacaaaagccctatctttgccaatgtggagcgttcgaatggcgccctagcatacctttgtatccgtcggcacaacatgttaaactcagt

SEQ ID NO: 589291 - DNA, 457 bp, Homo sapiens
gggtatttctttcttccttccttttttttcatggctcactgcagccttgacctcctgggttcaagttatcctcccatcttggcctcctgagtagttggaactataagcacgtaccaccatgcctggctaatttttaaattttctgtaggaaatggagtctcggctgggcaccgtggctcatgcctgtaatcctaagactttggagagctgaggtgggcagattgcctgagctcaggagttcgagacaagcctgggcaacatggtgaaaccctgtctctactaaaaatataaaaaattagctgggcgtggtggcacgttcctgtaatcgcagctactctggaggctgaggcatgagaattgcttgaacctgggaggcggaggttgcagtgagccaagattgcgccactacactccagcctgggcaacaggctcttcccatctcactgactctgtctca

SEQ ID NO: 589292 - DNA, 241 bp, Homo sapiens
ctctcgaccccaatctcggactttgctaggccaaggcaggcggctggcaggtgtaggttgtagtgagccgagatcacgccactgcactccagcctgtgccggagagtgagactccatctaaaaaaaagattaaaggggcacaaaatgggtactcaataaatattttaatgagtaaataaacatacttaagtaaaacaagttaaccttatttacagcaaaacacagagggaagaggtcagcg

SEQ ID NO: 589293 - DNA, 365 bp, Homo sapiens
tgtggtgtaccggctcaattgtttctcaggatagcttcggctataatgggtctttttagtttccatcaaatttaaaactttgttccagttctgtgaaaaatgccattgctaattcgataggaattgtgttgaacccatcaacacattttagtagtatagacatttcgacaataaataccaagaacatggtatttactcttttcaacctgtctgtactcatcttcgactttctttcattagccgtctcgcacgctttttcagcaatacaggctctctcgctctccctttacgggtaaacacccaacagctacggcgctaccgcagcctcgaacttcgctacatcactggctcactagcctgctctc

SEQ ID NO: 589294 - DNA, 441 bp, Homo sapiens
gccgtgatccagcacacgagaaagatgcaggttgggagctagaccagtctagtcttttcacgtttttctgcctgcttatagtctagcctcgctggcctgctgatgacatggtggccacccagatgattaagggtgggtctgcctttcccagcccacggactcaaatgttaatgtcctttggcaacaccctcacagacacacccaggatcaatactttgcatccttcaatccaatcaagtttactctaagtattaatcatcgcagaacccattccaagggcagaagtttacagaggaaatagttaggacctcagccagctccagagtgtgcatggatcagataacaggggtgaatttcctcacagcaggcggaaaaacaaaaaaaaattccctattctgagcctccaccctccctgtgcaaaaaaaaacaaaaacaaaaggg

SEQ ID NO: 589295 - DNA, 397 bp, Homo sapiens
acttgatgacatgtgtgatatactagtacaagtctcccctaaacacttattattacaagggcaagagaccttatagagagagttaccggaccctctagtgataaagtaacactcatacggtataaatgaatcttgtgcattgatgcatgcactggagaaccagcatacttctgtgatatcctcgccaagtatatatcttattaatcagaagaacatccgcaaccccagttagggacattcacaagaagacatacgtcttcagtgtcagtctgaaatcaaggaagactaagaaaaatccgatgaaggaaactaaagagaaccaactaatgcgtatgtgattctggctacaatttttactataaatacattatcgggacaatggcacactgaatgagat

SEQ ID NO: 589296 - DNA, 133 bp, Homo sapiens
gtctccagataggggacagctggcagtctgtcacttgtcctaactgagacagcacagccaccctagctagcaacattagtaacaagtctgaacaatatatacttatagaatccagtcaaagatacacaatctg

SEQ ID NO: 589297 - DNA, 882 bp, Homo sapiens
tgaaggggttaccttacagagccactgagaatgatatttataatttcgttctcacctcttaatcccatgagagtacatattgaaattggacccgatggcagagttaccggtgaggcagatgtcgaatttgctactcatgaagatgctgtgtctgctatggcaagaagacaaagctaatattgctaacacagcatatgtggagctcttcgttgaaattctactgtcagtgaacaaagtgtggggtgcttacagtatcacagctatgatagtaacttttttatgaattctacagcagggccaagtgtgtggcgcttatggtagccagaatgatggggagggatggggcgtatacaacccagtctagttatcggaaggtcctgctaggccagcagctggagtggtggtataatggaccgtggttatcggtggtcacgagcagtatgagtggatatgaccaagtactgcaggagaactccagtgactatcagtcaaatccttgcttaggtagagaaggagcactaaaatagctactccagatatataaaggctgtacatttgtgggagtggaactagaaatgtgaggggatgtacaagtatatccagtatgatgaggtgaaatgggaaatataattgattctgatcactcttggacaagcttcatctttcttttatcttgccttactcgtattcttaaggaagacgagctcaatgtgtagcaagatgtgcccttacagggttggttgattgctgcttactgtcacgttgggattcaagattcgtttccaaaacttccagctccgtaactttgaacactgaaacattcatctaggaccttataacaggttccggattgccattaatgttaaacacactttagttctc

SEQ ID NO: 589298 - DNA, 186 bp, Homo sapiens
tttttgggggggggcccccccgggaattggggagccccccccccccccccaggggggcccctttggcccccaagggggtttttttttttcccccccggtttggggttttcggggggccccacttttgccggggaaaaaaaactttttttgggggccccccttaagttttttttttttcccccccca

SEQ ID NO: 589299 - DNA, 281 bp, Homo sapiens
atctacatccgtgagtatagtaaaaaacaaaaaaacaacaaaaatagtaaaataaaaaacaaataaatgtaaaatagaaccctgggaaaaaagaataacagcaaagtacaaaaatataaagcatatcctttctttaatttagtaaatatctttactagtagaaatagctcaaaatagtcagttctaagattaagtaacaaaattgataactagagcaaggaaacgtaatttgggattataaaattcttagcttaataaaaattccttaacaatgaaagacg

SEQ ID NO: 589300 - DNA, 770 bp, Homo sapiens
cgagcagagggaaggggaagaggtcggggagcgagggcgggagcggtcgcggtcgcgatcgagcaagcaagcgggcgagaggacgccctcccctggcctccagtgcgccgcttccctcgccgccgccccgccagcatgccctggccgtgtgccctgcctgcctgctgctgctcggtgctgctgctgctccctgctgtccctgtgcctggcctgctggacttgtgccgactacacctatgacctggctggagtgaggactgactcgtgagcccctcaactacaaagacccctgcaaggctggctgcctttcttggggacattgccctggacgaagaggacctgatgggccttccaggtacagcaggctgtggatctcagacggcacacatgctcgtaagtcctccatcaaatgctgcagttccaggaaacacttctacccccagctgccagagcaccaacgggcagcctcagaggggagcctgtgggaggatggcgaggtagatcccgtagccggcgggcggcgacgtccgaccagagcgtgtgtggcccgatgggtgtcatcccccttttgtcatttgggcggaaacttcactgtgtagccagaggtgcagtcttccgcgcagggccatgaggcactggggagaaggcaccaccttgttgtcaccttccctggagcggcactgacgaggacagctatattgtgttccctatcgacttgcggtcgggaccgccccttgactggccggcctcagttgctgcctacgtggtcg

SEQ ID NO: 589301 - DNA, 134 bp, Homo sapiens
tatgacatgaaccggtgatctcattagctgtccccacattaggcttagaaacagatgcacttcccggacgtctaaaccaatagccactttcaactctatctcttccctcatgacagatcccggcgttctgtcat

SEQ ID NO: 589302 - DNA, 278 bp, Homo sapiens
  misc_feature (10)..(10): n is a, c, g, or t
  misc_feature (172)..(172): n is a, c, g, or t
  misc_feature (198)..(200): n is a, c, g, or t
  misc_feature (204)..(204): n is a, c, g, or t
  misc_feature (225)..(225): n is a, c, g, or t
  misc_feature (228)..(228): n is a, c, g, or t
  misc_feature (235)..(235): n is a, c, g, or t
  misc_feature (238)..(238): n is a, c, g, or t
  misc_feature (250)..(250): n is a, c, g, or t
  misc_feature (257)..(257): n is a, c, g, or t
  misc_feature (272)..(275): n is a, c, g, or t
aatccttatnatactttcttatttttcaagatgtaaatacatactagaataaactctgtagaatatacaaaaaatacatattttcccatgaaaaatttctttataataaatagaagggaacacgtgtgtggctgatccggataatgctccgagtctgcttaggttttcaaantgttgaattaatttaaatctcttgannnaccnggggacttccttctcccctanaangtcgaantanataatacatgangcaatcngccctcctgagtggnnnnttt

SEQ ID NO: 589303 - DNA, 342 bp, Homo sapiens
gcctgtccgacgaacaggcgactctcgactcttcttggcttcactagctggggctgcagcagcagcaggagcagctgtggtgtgaagaagcacaggggcagcagccacaaaaggcagatggatcagccaagaaggccttgaccttttcagcaagtgggaaggtgtaatccgtctccacagacaaggccaggactcgtttgtacccgttgatgatagaatggggtactgatgcaacagttgggtagccaatctgcagacagacactggcaacattgcggacaccctccaggaagcgagaatgcagagtttcctctgtgatatcaagcacttcagggttgtaga

SEQ ID NO: 589304 - DNA, 886 bp, Homo sapiens
  misc_feature (176)..(176): n is a, c, g, or t
cgaggatgctgcgtcctatacagtcggcaccttcgggtcccaggctgtgctcgtggccgagaacaggggtgtcttcgaggtgcgaggacgcaggatctcgtccgggatgtccagggcgtgagatggcaagcagccgttggaggcgctcacagagagaaccctggtgcgaggagggncccggtctgggtggggactctgagcgctggaggcatctattcagcatatgcttggacatgcatggatgatgactctcgttctgatgttgtggctggaagggtaggatagcacactaatgaagcactgcatgcaatgcgctatgaaaactgcctgcgataaatctatatgctgcatagatagcagtgtaggctaccatttgacatactctccactgtgctggacctttttggcgtggactgtgcctatggatagacatgcacgttgatgccattgcgtgcattcgcgcccggattagaacctgttcgagctcaaaagggatctgcaagattagcatttgaaagcctcgagacgccttgggtgacgcaagggtaacatggaagcgacgagtgcctagatggtcgccgattatatccgactgaaggccctcgtatgcgcgcccgtgtggcgttcccggggaaagcgcgtatggcgtagcaatagggagggattcccaccttgcacgcgtcgcgtcttgctttccgggcggttgggggcggtcctccttggaagcgggctgcgctcgaactagtttggcgggctcccacgccttttaggtgagaggccgcggggtggggaaccacccggaagccgcaggtccccttgggggcgtagggccattggggaccgtattcccacgggagcatgggcgtccccgcatttcaatggaccg

SEQ ID NO: 589305 - DNA, 115 bp, Homo sapiens
tttgtggggaagctgtttacagcgttctcccgctgtgtgttattggggtcagggttggttgaaaaacggcttggcccaaggcttgggaacttcaagccccaggagagggtggagg

SEQ ID NO: 589306 - DNA, 192 bp, Homo sapiens
acaccacctgagtccttgtatagcttcctttgaggaacgtctgttcagatcatttgcccatttttaaattttttttctgttgaggtattttagttcattatatattctggatatataaatgagtagtttgcaaattatttccctctcattccacgaggtagtcttttcacatctgttaatatgtttcgctgt

SEQ ID NO: 589307 - DNA, 381 bp, Homo sapiens
  misc_feature (221)..(221): n is a, c, g, or t
  misc_feature (350)..(350): n is a, c, g, or t
  misc_feature (352)..(352): n is a, c, g, or t
tttttttcaggttcctgtatcttcatgtcgagttgctcattgcccaacgtagaggactaggaatcaggattcggtggctatatgctggaggctggacgcgggagcgcggctcgcctcattgcagttgttggcagtgatggagagatagcatcgcggctggagagtctttccatcgtgttccactgtcgcagctacacaccagatatgaagactacaagcancctcaaaaggtcttttcatttgttcagcatttgaaacttcttcctgacaccagaggggctcttcttagctgtctttttcctgggttattcctggtaaactagctgatatttgtttcaaagcatatgtcncnaataaagtgccagtctctcttaaaaaaaa

SEQ ID NO: 589308 - DNA, 127 bp, Homo sapiens
cggcatcttagcggctgctgttggtgggccgtccgctcctaaggcaggagatggtgccgcaaagaagacgaaaaggcgctgagtgacactttggctcacctgtattaaagtggagacgtctgggaca

SEQ ID NO: 589309 - DNA, 277 bp, Homo sapiens
gctccacttggttgccaggctagagtgcactgggtgtgatcccggtcacacaaactttcaagccatttcccaggttcaagccattctcccgcccagctcatgagcaggtgggactacaggcatgcaccacaatacctgatttttctttttctttttttttcctgtagtagagatggggttcaccatgtgggctaggctggtctcgaactcctgacctcaagtgatctgcctgcttcagcctcccaacgtgttggacatacaggtgtgagccaccgcg

SEQ ID NO: 589310 - DNA, 342 bp, Homo sapiens
gcccaagaagtctcgtgtccacgtggcttgggctcctgacttcaggtccagccaccacagccgcggtcctgccatgatatgaacccgagaagacccaggccagataaagccggcatccacagagtccagaatattcccatgaggggtcccgacttccttctccagccgcttcgaatacccgcttaatagggtatagctcttcacaggaaaagccagcatccactgttgaaggaccctggggcctctgatgaccaatgggccagttatgacagccatcgcgtctggtgtacacaccacagtagtgggtccctctaaaggcataggtggccccatgggtgtcag

SEQ ID NO: 589311 - DNA, 599 bp, Homo sapiens
aagctcttgaaaaggggaggtaggaggtagggaagcagtgcatgacccctggacacagcaggtcaggtgtccttcagtgagcatgtggtgctgggcacaggtttgtgagcaggcctctgagcagggaagggagggggctggaatcacacacaggggtggaggccatcactgtacctcatccttcgcgagctcagaggcagctcagaagggcatcttgagcatgaggctgttcaagaaatgcaggccttcttcctgggggcccttctgctcctctggctcctgggcaaacatgaagatcacagttttgtgctgcaggcttgatgttgcagctctgccagggtccagcacgcactcacggccctcagcacacaatgcaccccgggcacagaaagcccgttgtcgctgaggtccagcttcctggcgatgtgcagctgggatgcagactctgccatcagccgacagccttcatcttccagctggttccctgagaggtccacttcctccaggtgagggccttcccggagcagggctatgagggcctccgcatcgtggactggagctgacacttctgcagctgagcgtcagcttctgtctgagcc

SEQ ID NO: 589312 - DNA, 87 bp, Homo sapiens
ccccctctccccaaagaaaaagtgtcatgcccccttcccacccaccctcactccccaccaaaataaacgtttccttaaaattataaa

SEQ ID NO: 589313 - DNA, 336 bp, Homo sapiens
catgaagcgatgaatgaagcgaacagatttcggtcattttggttctcaggggtttgttataattttttatttttatgggctttgggtgagggaggtaggtggtagtttggtggttaataatttttaagttggcgtgatgaggaataagttgtaaaggagtatgggcggtaattaatggtggaaaatagaattgatccagtactgcgggcgggtaggccctaggatttgtgggggccatgaattgaagcgaacagattttcgttcatttttggttctccagggttttggcataattttttatttttattgggctttggtgagggaggtagggggtag

SEQ ID NO: 589314 - DNA, 80 bp, Homo sapiens
  misc_feature (42)..(42): n is a, c, g, or t
  misc_feature (47)..(47): n is a, c, g, or t
ctggcaagagctactttagttactatcaccaataacattggntctgnggcacgaatgtgtgctgttaatgagaaaataaa

SEQ ID NO: 589315 - DNA, 108 bp, Homo sapiens
tccgcgaggcagtctcgaagaagctctggggaaaacaaaaaacatatcacggaaaacaacactggagtgaggagaccgcagagagtgactgggtaggaatcctagaca

SEQ ID NO: 589316 - DNA, 342 bp, Homo sapiens
tccccttaaatccccacgatcactcagctactgtctctccggaatgtatgaccacagatacagtgcgacagtgagttcacagtgcagagtcaccacaggccactgtgtctcacttgagagtgcctgccgtacaaacgtgaccgatgaacgacatttaccacttcttctactcctctcaacccgtttgagagtccatattgagcattggcccagcatggatagagtgacgtggtgactgcagatgttagagtttcgctaactctatgaaagcaccagctgtgtgcagtctaatgtccctactggacagggtcctatattgcagctacagtatatcatcgtaga

SEQ ID NO: 589317 - DNA, 428 bp, Homo sapiens
agcctggtcgattctatgaggatcttgattgggaaaccttcgcgttcttgtcacacatgtatctatatatatatatgatgtatatatatgtgtgtatgtgtatatatatatatgtgtgtgtgtatatgtatatttttgagagagagtttcgctcttgttgcccaagctggagtgcaatggtatgatctcggctcagtgtaacctctgcctcctgggttcaagcgattctcatgtctcagcctcccaagtagctgagactaaacacgtgtgccaccgcagctgggtaaattttgtgtattctaaagtagagatagggatttccactcgtgttggacaggatggtctccatctcctgacctcctgatccaacggcctcgtcctcccaaagtgctgggattacaggtgtgagccactgcgttcggactaca

SEQ ID NO: 589318 - DNA, 930 bp, Homo sapiens
cacttttctggttaacaggtcaaaatctctctgttctctatctatataacatatcaataatttatccacgtgcgtcgtggtgcctgcctgtaagtcccagctattcaggaggctgaggcaggagaatcacctagaaccaaaggaggcggtatgcagtgatgccaagatcatgccactgcacttccagactgggcgacagtgagattccatctcaaaacaaaagcaaaacaaaacaaaaaacctgggaaagacttctcatattcacgagctgttcaggaactactctgaatatcatgctccaaccattactaatctgttcacttcaactcaacatacaggagtactgaatctgtttcgtatcatggatccttccggcaatctgatgaaaccatgtgcctctttccatcatcatctccctaaacacgtaacaacttcacacttcagagaaatacaaagaaaactagcatatcaaatagtctctctgctacactcgctggagcctctgacagccccaggttaacacacccttactatacaacgctcatgatctcgtctattcaggcccccacacataatccatcccatatattccatctccaaatagcgatagccatactttccctcaaatagtaccagactgctgattatcctactcaccttcacccttcggtctttccactctacgctatacactgggttcttgacgcaacactataagctctaactcacgcatcctggtaatccaatgcaccaccccgaaaccagcccttactagactacgatccgaccgcccagccacgtgagacccggactccccgaccaacgccaccacgcacacaacaccaccggccacacgcagaacaaacacacgcccgcccaccaccccacacacacggacaccaccagcactatcacccatcctacagaaca

SEQ ID NO: 589319 - DNA, 225 bp, Homo sapiens
tgcgagtatgcctccgggttcagcgattctcctgcctcggcacccaaatagcagagattacaggtgcaccactatgcccagccagttttttcttttttgaattttagtagggacaggggtttcaccactgttggccaggctggtctggaactcctgacctcaaatgattcacctgcctcagcctcacaaagtgctaggattacatgcatgaatcacgagctggct

SEQ ID NO: 589320 - DNA, 267 bp, Homo sapiens
tggcccgaggtggattttttttaaggaaagggtgaggaaaaaagaaaggaattttaaagtttaaacgtccccaagggggtgcttttacagggaaggttattttgttttaaacattgaaaagttgtggttaaaacagttaatttgtatgtaacaggggatgctttcaaaaacaattactgacctatgctttaaaacaagaatggtttgttacaaacccaaactgtccctttttgtgaaggggtttgaaaaaaggattccccgttttta

SEQ ID NO: 589321 - DNA, 161 bp, Homo sapiens
atcagctgtggcatggtgcagtcatctgaaggctgaactagatatagagatccactttccaacctactcacattgttgttagcaggcctcctatttctcccaaggtgagaaccctttcatcatgcgtaatattttttgtgttttctcaaaaatcatggtca

SEQ ID NO: 589322 - DNA, 120 bp, Homo sapiens
agggagccggcgccggctgcgcagaggagccgttctcgccgccgccacctcggctgggagcccacgaggctgccgcctcccgccctcggaacaatgggactcggcgcgcgaggtgcttgg

SEQ ID NO: 589323 - DNA, 145 bp, Homo sapiens
acatcatgcacgcaaaaatgcatgctcaaaacgcttagcccagcacacacccccacgggaaacagcagtgataaacctttagcaataaacgaaagtttaactaacactatactaaccccagggattggtcaaatttcgtgccacg

SEQ ID NO: 589324 - DNA, 500 bp, Homo sapiens
  misc_feature (310)..(310): n is a, c, g, or t
  misc_feature (313)..(313): n is a, c, g, or t
  misc_feature (315)..(315): n is a, c, g, or t
  misc_feature (323)..(323): n is a, c, g, or t
  misc_feature (364)..(364): n is a, c, g, or t
  misc_feature (449)..(449): n is a, c, g, or t
  misc_feature (454)..(454): n is a, c, g, or t
aaaataggaaacgatgaagtggccctcctaaacctcgcccttggaactttagcccctaactcaggaggatgtatctatgtgctgtctgccctgttgctgtagtcagcacccttttatactcaacggaaaaatcagtgcaaggactatttgagttggagggctcgtctttctgtagcctattgtggatcatgatggtctgctttaaaataacggggatgtcggccaggcgcaagtgcacgcctgtagtcccagcaatttgggaggccgaggcggacggatcacgaggtcaggagatcgagaccatccctgntancngggggaanccccgtctctactaaaaatacaaaaaaattagccaggcatnggtgggcgcctgtggtcccagctactcgggaggctgaggcaggagaatgcgtgagcccggaaggcggaggttgcagtgagcgggngtacncactgcgctccaccctgggcaatagaagcacagtccgtctcaaaaa

SEQ ID NO: 589325 - DNA, 184 bp, Homo sapiens
  misc_feature (2)..(2): n is a, c, g, or t
  misc_feature (134)..(134): n is a, c, g, or t
cntttgtagacctgaagctggtgtgcagtggtgcaatcacagctcactgcagactcaaccccccggtccaagtgatcctcccacctcagccggttaattttttacttttttggtagcagcatgggggtctcacngtgtattgctcacggctgtatctcagcactccgtgggataacggcagtcc

SEQ ID NO: 589326 - DNA, 190 bp, Homo sapiens
  misc_feature (79)..(79): n is a, c, g, or t
  misc_feature (85)..(87): n is a, c, g, or t
  misc_feature (89)..(90): n is a, c, g, or t
  misc_feature (109)..(109): n is a, c, g, or t
  misc_feature (111)..(111): n is a, c, g, or t
cgcgggcggctcaccagagccggggcctcgaaatatggctgcggcgggaggcgccgtcgcggcgcccggcccgggcggncccgcnnncnnccccgccgcgccctgagcncnccctcccccgcttcccccgggtccccttctccaggcaggaagatgtccaagccccgcgcggtggaggcggcggcggcgg

SEQ ID NO: 589327 - DNA, 613 bp, Homo sapiens
  misc_feature (55)..(55): n is a, c, g, or t
  misc_feature (97)..(97): n is a, c, g, or t
  misc_feature (171)..(171): n is a, c, g, or t
  misc_feature (185)..(185): n is a, c, g, or t
  misc_feature (215)..(216): n is a, c, g, or t
  misc_feature (231)..(231): n is a, c, g, or t
  misc_feature (340)..(340): n is a, c, g, or t
  misc_feature (346)..(346): n is a, c, g, or t
  misc_feature (356)..(356): n is a, c, g, or t
  misc_feature (362)..(362): n is a, c, g, or t
  misc_feature (439)..(440): n is a, c, g, or t
  misc_feature (447)..(447): n is a, c, g, or t
  misc_feature (471)..(471): n is a, c, g, or t
  misc_feature (475)..(475): n is a, c, g, or t
  misc_feature (495)..(495): n is a, c, g, or t
  misc_feature (510)..(511): n is a, c, g, or t
  misc_feature (519)..(519): n is a, c, g, or t
  misc_feature (534)..(534): n is a, c, g, or t
  misc_feature (554)..(554): n is a, c, g, or t
  misc_feature (579)..(579): n is a, c, g, or t
  misc_feature (581)..(581): n is a, c, g, or t
  misc_feature (590)..(591): n is a, c, g, or t
tatgtctcgaatcgtaattgatgcagttaaatcatcaccaactccaggaggcttntctcagtcctcttctcctccttctgcagttaggggcagacanctaccctctcccactcccttagcagttctgtacttacatctccaggtacttaacatctccagatggcagtgaancattggtcattttncttttctagcttatgtctttcatctccgtnntctcagggctgggcncatggtaataacattcattgcttcgttcacttattcaagaggagctcggttaacaagttagatccatctcctattcttacagaccttataatctttttaaaaaataatnttattncatttatttntggagncagtctcactctgtcacccaaggtggagtccagtggtgcaatctcagctcactgcaacttccgcctccggggttcanntgattcncctgcctcagcctcccgagtagcngggnttataggctcatgccaccanacccagctaattttnngtatcttnagtagagatggggtncaccatgttggccaggctgntctcaaacttctgatctcataatcngnctgcctcgnnctctcaaagtgctgggactaca

SEQ ID NO: 589328 - DNA, 310 bp, Homo sapiens
  misc_feature (112)..(112): n is a, c, g, or t
gggcgagtgatggtcatatggtgatagggtcagggatagttgtctctgttactatgacaccctcattccatcaagaagataagcaactgctataaaaagtatgaatataagnattttatatttggccaggatttaggataagacctctctgatgtcaagtatgtactgaaagcaatttgtgtagggaagcagcaaataagatggcgcagagacagtagaacatcctcagggcgccagtgcttccaggcactcctaactggctctgtgactcgaatgtccacatgcacacaaacccacaaacaaaacaaaa

SEQ ID NO: 589329 - DNA, 804 bp, Homo sapiens
cgaagattatcaattgtctatattcatattaattagagtatataaaaagactcggccgctacggggtttatttttttggcctctatatgacgagactgaggaaacctcattctgactccctaagggacctttgggggaaaggcgtcccaaggcccctaattgggccttattgtaaatatcattcattgggtatagcgcaaggagacatcatcccacatgttggcgaaaaagctgtgttctaatgcagattctgttcctctctgcgggtcttcacaccctttatcacttcttgtgctgctgtatcctgacctgacaggccacgacccctatccctgtactaggtaaaacatgcggaaagtcacttggttccacgagttgttattgtataactctataacaccaagtggataaaccttaagaattcacgccctttgcatccagtttcatgaaaaaataaccttgtagctccctttattctcctaggccgataatgccctttatcaagcgacagtagaagattaaggtccctttatcgtactacgctatactagatattactaagtttaatctactccgttactctttatacctcatctttagtaccggctgtcacacaatccacatctttccgtcccctttgaattccgtccaaaaaatcatgaagtactaatttattggcacgagtcactatactcactccctcgtaatactgttattcaccgcctcctggcctccccgatatttctatattattctatatccaacccccccggatgatcctcccttaaattcacgatgtgactc

SEQ ID NO: 589330 - DNA, 850 bp, Homo sapiens
  misc_feature (84)..(84): n is a, c, g, or t
ggggccacgcctccgggattcttggggagggcccccgaattgcgacacaaagactatggcgggcgcccccgcgatgggaagtanaaccaggagcggcgtgcgcgaacacatcgcgccccaaacaggagaaataaaggggaggacatcatgggctttcccgcgcccccgccgcctaggctgcgcgcacgatggaatctcccgcgcaatgccctcgggcagagacatcgggccacacatactccgggcggttggtcaaaagcttcacgaacgccgacccccccccccgagagacacgtcagacaagacttccacgttcgcccgccccccccgtgagaggccccacgcagcagggaaacagaagcaggggaacgcggggcagattattctcggccgccctcccccgctggtagaggcacacacccacacagcacagatccgacgaggactcgccgcgggagacagagccaccagtttccccccacgccgcccgcacggtgttcaccaaccagacttcgttgcacaacgcaccgtccgcacacatatagcaacccgcgggtggagaggaaaaagataatgtctccaggagtagcccctctttaagagggagacctctgtggggagagactgctacaagtttagtgttcttctctgtacatgtatagaacaccacatcacagttcaccacgcagaagttaaagtaggacgcccccaacgcacgctaggttttaacaggtcactatatatgtttgtgcgcatatcattaaaagacattaacatattgttgttaataatgcaaacaaatacaagactgaaaaaaacatatttgtttgtggggggccccaacaaaaca

SEQ ID NO: 589331 - DNA, 295 bp, Homo sapiens
  misc_feature (1)..(1): n is a, c, g, or t
ncccggcggcgagggattcccaatgacgctggtcgagtcattcagagtcggtacgccgagcgttgtcaccaattcgcttggtattgccgacgactgcattcagtatggtgccgcagaagtaaccgacgggtcagcctcatcaatggcggacgctgtaattcggatcttgaccgacaaacaacatgcgcaagcgctcgtgaggaacgcattatcatatctgtcgaagatgaagaccttgtggccctgggatgcgaagtgccgcgccatagctagcccgatgccgctagcaccgcca

SEQ ID NO: 589332 - DNA, 1130 bp, Homo sapiens
cttccgttgtgtcgctcgtgttttcccccggtgggttgctctgagcctctcttgggggggagatgttgatcccctttggtgcgctggcgacagagtggtttggtgcgagaaccacgggggggttatacgaggtcgtgctctgtctctttagcgtgccgctggtgtctccgcacaggggggggtctacaacccgcagggatcgcgcgcccctcctatggggggctcgggcgcaccagaggcgttgtgtgacacgtgggaccttttgggggagagagatggaagtgttgggatgtggggtagattaatcgcccgtgtcccacagggggcaccacgtgggggcgcccccgagtgggggctccccccccccccccttgtgagaggaggtcaacaccgggggtctccacctgggatattctgtagtattttttatcagtatggggaggggagtccctgcaggtggccccccccggtgtttagtcgcacgggttttatgaacctcataggcgtctctgggagaccctcggtgtgccaccctcgagagagggcgccccctctgggggcctctccccccacacgtttgttttggccgcacagagaacctcggggggtctgtgcacacacacagtgtcctgggccgccttcgcccacaggcgcactatatctctctgcgcgttaagcgccctcttgtggcgccccccctctccttgtggagagtactccccctcctctcccctctctgagctctccctgtcggtgcgcaccactagcttgttgtgcgccggagctttgttctcaccacagggggccctttgtggagaggagagcggacctgtcccctgccccacaatgtggctttcccccccacggggcacacctgggcccccgaggttttttttgtgtaattttttcttgggcgctgcccaccctcccgccccacagggtgtctgtggccgcgagggccccccgcggcacggcccccccacgtgtcatcccgggtttggttcttggggcggccccggtggcccccctcgtgatcccccccctctgcccctcttggccgcgtgcacctgaggggtctcacttcttggggccggtcgtttttttccccaaaaaaattttttggaaattta

SEQ ID NO: 589333 - DNA, 1621 bp, Homo sapiens
  misc_feature (1)..(1): n is a, c, g, or t
  misc_feature (1279)..(1279): n is a, c, g, or t
nctatgaaataggagtgtgcttcgttctgtgcggttgtggttctcgtttatcgtgtgtgctcctatcaggtgcgtggtgttcttttggcccgcgggggggtgccagtatttttcttatcacgtggtccccaggaggggttgtttgcgggtagcatgtgtgtttaacacttgttttgtgggccagcgtagtccaggggactaatacacccggggttactccctggggtctcgtagtaaaccgtgtgttgcgccttgtttgcttgctgtccgtgtgccacaaaccgaaccgctgggggtccccgtctgtgcacttataccggccccgtcgtttaccgccggttgtggtggggccgaattgatgtcctcggtggcgaccattgtgggtgcctcaccctttggaggggatgagaaaacctgttgtgctccggtggtcctcccacctctttgtttggttggcgcccgcgttcctctcccgggttgctatccaaggggttttacccccccgggagggaaacccctccgtgtgcgcccctcttacactttttggtgactgcgaaaaggcatggggaggtaaataattgggtgtgacatggtccaccttcggtgcccctccaagtggaagggacgatttggtagtcacgaattgtctgttacaccccgacccgctcggttgtgctgcacagtgacaccatgggcccccccgggagcccccccgcctcttgtggtgatagcgtctggaccccccacgagggtgaggacccctctcgctcggtccgcgagtcgaggggtattctctaatgcgggccccccgtgtgcctctccccactcgaggtgtcctgcgcgcctcctcctctcgcggggtctttctttgccggacgtatgttttttcttgtcgggttcgcacgaatcttcgcactcaaaagggggccacgcgcttgggggccctccccacgcgcgcgcgaaacgttctatacacacccagtgtctcgcagtgtgtccttcatggagacagttatcccttcgcgcgggcacgcaccgcccgtccactcgcacagcatgtggaacacatgggtcgagagtactcttgtgagaagatgatttcccacgcccgttctcgggagcgcgatctcgaggggacacccacagagcgcgtgatggtctcacactcgtgcgcggcgctctctctttgggggaccccggtctcttataccccagctgaccacactctctctgggagtgtcccctgtgtagtttggcgagagtgtctcacgggatatcncggcgtctcttcccccccagagcaccacgatttggctcccctgtgggacctatccgaccttaccaccaccctggtgtgtacacctggaccttcctggggcaccccgagagagaggagtcgccacgagcgcctccgctctccgaggcacgtagagtcttgttctatagggcacagcgggggacactctcccccgcaatcggcgggcaaaccccctctccagtgtaccgacaagactccggtcttcaggggattttctctgtcctacttagcgcatgagttggcgctttattccacaccggttaaggagattggggcccattaatggtgcctgaacccagttga

SEQ ID NO: 589334 - DNA, 283 bp, Homo sapiens
agctgtcctcacggttcgtgcccatcaagccaactcccataacggagcgaggctggcagcagttcacttcgatacacgcattgtcctggcgtaaattagtaactctaatggccttcttctcttgcccgggggctcttatgcttcaaacacgaagggtcagtgccttttgatcggaagcggtcccatgtactacacacggtctcaatccctcccacttctgtcaagtctatagaagcgtgctcatgtgcatgtttcacactttttcacaggaccacatgatgct

SEQ ID NO: 589335 - DNA, 262 bp, Homo sapiens
gtaaaacccagcccatgacccctaacagggcccctctcagcccttcctaatgacctccggcctagcattgtgattttcacttctcacttccattaacgttcctcatacttaggcctacttaccaacacacttacccatataccattgatgcgcgatgtacaggagaagcacatacaaggccacacaaccacctgtccaaaaggcctcgatcgggatatctattatactcagaatttttctcgagatttctagctttacatca

SEQ ID NO: 589336 - DNA, 462 bp, Homo sapiens
ggtccacccaagggggtctatagtaacacagaaaactacagctatatataacataaaatacagctttaactattagtgatgcttaaacaaagcaaactatgatgcaatatgaatcaacttcattaattggacaagtccagctgaggcacaaattacgataagcactaaaacccccgcatgatgtgcaacgtgaaacctcacaaccccgagcaaggttctttctagtcctatgggctcatgtccaagttccataaccagaaaaagccactagtttttacattgttcttagacttttttactagaggagacgcacaatatatttcacccaagtctgtatgggatttgcgcacacagacaactttttctttgtgtgaaagatgatagcattgatgtcacagccttcattggccagctgccgtgtgaagcccataataaatttagggttgatggggtaccgagctc

SEQ ID NO: 589337 - DNA, 317 bp, Homo sapiens
ccggcaccgcctgcacctgcccttccgcccgccctccggacggccgcagccctgcgggtctacgctccagacccaccccctgccgacccctgcgctgctctgccgcctcttcccagagcgcccaccttgccagagacgtgtccgccgaacaagcagcagatcgccgcacgtacgtcaagatcaacgcgtccaagataccaggtcagacgatacacacaaacagaacgatcaagggaccaatactttataggacactgaaacctagagaaatgcaaacacaaggacagaacacagagaaaactaataaacgaaaacaa

SEQ ID NO: 589338 - DNA, 1402 bp, Homo sapiens
  misc_feature (569)..(569): n is a, c, g, or t
ttctctttctcttctgtcgtctcgtggtcggggttgtggctggtggtcggccggggggggaggggcgggggcgggaggggggggggagggggacgacgatacaatacgtacttctcgtctatgcctggcacgtgattctagttcctcgctctgctgcggcgtgctggctggttgttgcttgcctgcgttggtgtctccgattaagattgtgctggctgatgattgccgtctctggtccggcgtcacggcctccatccatttttggtttgttgtttctcgtcgcgcctcgttgcagttttgttcctcgtcgtggtcgtgtgtgcacatcgcggtagttttctctagcagagttttgttcttctccttattggttactctaccgctggggtctactcggcgagttatctgtgctgccgctcttttttgcaagctagcctacgcgtttttgctgggcgcggcaactcttttgtggtggccgcccacaacgtgtgcgggcgtgcggcgggcagccttgttgtggggccagcacgaatggcaccggccgccggcgccgcctcgtgttcggggangcgtcgcgttggtgccttcgcgctcctctccgcactcttttgtgggtggtggtctctgtggtgtcgtcggtgtgcgcgcccctgctgggttggctgttggaaatcaccggtggggtttgtctggctcatatgctgtcttgctgggggtgggcttccccaccgttggttggtggttggttccaggggcgtgatgttctttttcttgcttttgtgcgcggccactaccccccgtgggcccccctcccctgttttctttggaggggcgcacccttaattggtggggccacattttccgcctcgcactagctggcccccccgcccacattggggtcgggggtgcgccttatgtgctgctggaaaaatattctgtgcgaggtccactctctatgagacccgcccgtccccggcgccccttggagaggtttctctggaacagaatacgacctatgtgtttctttttggggaagcttgttctgtctccccgccctttttgtggtagaaatgtgtgtccccacacctcgctcgcaccaggtttatgtgtgagctccttttcacgggtctgccgcacacagcttgcgcgcttctttttcgcaccactcctctcgcgaaaggcacgcctcgtggtaacacaccggcccccctcgtgtcttatgcggattgggtgaaaatttaggttctgctgatcccccggcgctctttgatctccatgactgtcccattttctccctctcttctttcgcgtgcacaggcccccctgtcttacaaacgattttcttctcccccaaagcaactccaccccatttgtgttctgtcctatcaatgatacacagaaa

SEQ ID NO: 589339 - DNA, 1616 bp, Homo sapiens
  misc_feature (765)..(765): n is a, c, g, or t
agcgggggtcctcgtcgtcttatgtgccatcccgttctgtcgcgcgatcgatttctgctgagggcggaacgccttggcatgcggccggctactgtgtttgaggatgcagctcagttcgcggcgtcgctgaatctagctgctcggaggctcttgatccttagtgagtcggcctagatgatacagaatctgaacagttgtctagacccccggatacggatgagtcaggcacgaatagcagcactgcgatgatccaatgaggccgtgctcctggaaagatgtgtcctggtattcgctccggtaggcaattctttcgtcactttcggtcgatttcgatgcgcacagtagtcttacggcactcgtattggtctccccgggtaagtcacaatgtgagctaatctgtagaggcatgttcaaatggattaacttgaactagtgaaattaattgaaccgaagatgtgcactttcgcggcaatcgcgaagggagcgaaaagggagcgtggtacagcaacagggatccgtttgcattgttgcccacgatggacttccccttttgtccctacaatttccaggagacgtaccccgtagagacctcgttgaacagtggggatgtccctcacaggtgccaagcccccaaaagcaaagaccgagttgttgccttcttccttgcgaattgcgatgaggcgttacgcgtcacgttcatggcggccacacttcaaggaacccttcttccttttcctttgcagaaccaccagttgaagtctgtgntagtcgtgtgagcacaaagggccttgcaaattactgctgtgcgagttaaggcgaacaccagttgaactgacgcggttctaattatcatagaaggcacgtgccccgttgttacccccacgttccagtcgattgcctggagggaaaaattcccatttaggggtgtttctctcgcggcatgcgaatatacagggaatcggttcccggacatgcggattttcatcgagttagaaaacacggcttagccgggtaagcgtgcgccggagagtgaagaggggtctccttccgataaattgcgcgagcgagcatctgtttgaccgcttgcacgctccgcagatggaggcaaatagaggtttcgttaaccgcattacggcaagggaaatttagtctcacgtagagagacaccgattggggtaccacggaaatgttcccttttgagagctagtgtcctccattacaacatgggcgttttggcggcaccaacaggcggggatactaagcgcgtgggagtgaccgtcatactacacaagaggggaagtctctcccgaggttgttgcaccacggactattgctctatgggaagaggtccgtcacatggttacgaagcgccaaaggagtggccactttataggggcacaccttgtttgcctatattgtggccacggatgagtaagaggggtattataagcgcacgcccgactttttggtgccgccctataagggagacattgtgctttgcgcatagagcgtttgtgagacaagacactacaccgcgcggtagaggcagtttcttccggcctgcagagtgtgtgtgcgtcgacagcaaatagtgcttcgtcatgtagtccatattc

SEQ ID NO: 589340 - DNA, 688 bp, Homo sapiens
  misc_feature (307)..(307): n is a, c, g, or t
  misc_feature (311)..(312): n is a, c, g, or t
  misc_feature (314)..(314): n is a, c, g, or t
  misc_feature (317)..(317): n is a, c, g, or t
  misc_feature (338)..(338): n is a, c, g, or t
  misc_feature (350)..(350): n is a, c, g, or t
  misc_feature (353)..(354): n is a, c, g, or t
  misc_feature (362)..(362): n is a, c, g, or t
  misc_feature (397)..(397): n is a, c, g, or t
  misc_feature (410)..(410): n is a, c, g, or t
  misc_feature (414)..(414): n is a, c, g, or t
  misc_feature (416)..(416): n is a, c, g, or t
  misc_feature (420)..(420): n is a, c, g, or t
  misc_feature (434)..(434): n is a, c, g, or t
  misc_feature (445)..(445): n is a, c, g, or t
  misc_feature (448)..(448): n is a, c, g, or t
  misc_feature (463)..(463): n is a, c, g, or t
  misc_feature (503)..(503): n is a, c, g, or t
  misc_feature (508)..(508): n is a, c, g, or t
  misc_feature (514)..(514): n is a, c, g, or t
  misc_feature (545)..(545): n is a, c, g, or t
  misc_feature (550)..(550): n is a, c, g, or t
  misc_feature (598)..(598): n is a, c, g, or t
  misc_feature (602)..(602): n is a, c, g, or t
  misc_feature (679)..(679): n is a, c, g, or t
gaccctctgtgccttcttctttgttttgtgataaacataacttgccaacagtctctatgcttatttacatcttctactgttcaaactaagagatttttaaattctgaaaaactgcttacaattcatgttttctagccactccacaaaccactaaaattttagttttagcctatcactcatgtcaatcatatctatgagacaaatgtctccgatgctcttctgcgtaaattaaattgtgtactgaagggaaaagtttgatcataccaaacatttcctaaactctctagttagatattccgagctgggnagtnntnaanaaattgggttctatgacatanttgtcgcaaaanggnntgctgttncttaaagcattatttacagtaggaactgggtgagntaaaatcctgttncccntncagntttgcctgcttgangcctggaagcntgntgtgggtgaaggagntgacaggggtggcccagtgaacttttccagtaaatgaagncaagncactgnaataagaaacctcctgaactgggaacaaagnatctncaggcaagcaagaatgcccacaccaacaggccttatttttctgtgtangtantcaactgtatctcccccacccttgggattagagttcctgctctaccttacccacagataacacatgttgtttgctantgtaaatgt

SEQ ID NO: 589341 - DNA, 162 bp, Homo sapiens
ccggccgtttcgttgacctcttcaccaccatcaaggccgcacttcttcggggtcaacgggattggtctgaaggtcgttgccaacgccggcgccgggttctcctggcgtgacccggacccgggtggcctcaactcccagacctggtgggacctcgccgtccat

SEQ ID NO: 589342 - DNA, 142 bp, Homo sapiens
agcggctggtcgggtcccctccccgccggtcccccgcccccatccaccgggctctgccaggctcaggagcccgatgattcgctgcccgccagtaccgaaccctgcttcggctcctcgagggcccggggactctccgaggacc

SEQ ID NO: 589343 - DNA, 227 bp, Homo sapiens
tttttccccccccccccccccccagggggggggggggggggggggtgaataaacccccccccccccctttttgggggcccccccccctttttttttttgggtttcccccagattttttttttacgggccctctccccccaattttttttttggccccccccggggggttgaaaaaaaaaaccccccccccttttaaaaaacatttttaccccgggggggttttttta

SEQ ID NO: 589344 - DNA, 317 bp, Homo sapiens
acctactcattttagaaataaatgtaaaggaaagagtggacgagtatatagaacctccatcatgaaagatagagacatgagtcggaaactatcaggatattctatagaacaaccgggctgatagggtgaaaaaatcaatgttacaggaaaaagaaatatgtatggggtgtatgggcagtttctgtgctatagtcaggagacataacaactgaatgcataccaactcaactatgaatagattctgaacggtcccacagtctggggatttctgaaaatggaccattagaatgtcagagaattcgtgtttattttcttag

SEQ ID NO: 589345 - DNA, 160 bp, Homo sapiens
gcttgaggatcccgcacggtggttcataccgaaatcagcaacaactatttagctgttccccaaccttttcctccgaccccctaacaaccccccgatacagcgaccaggtatgaacaacagtgcaggtatgaacaacagtgcaggtatgaacaacagtgca

SEQ ID NO: 589346 - DNA, 187 bp, Homo sapiens
gttaatcttcagatttttgaataatttatttcaggtgtcatatatatatattgagtggctgaaaatatattttgtacctaaaattaataataattgaattataaaacctacctaattgtcacagtagtcaactacctaaaatgtttctaattattgggacactgtatatatgtattaatgttagtaa

SEQ ID NO: 589347 - DNA, 266 bp, Homo sapiens
aaatggtatttaccattcattaagtgaaagtggatcatcataaaggtcttcatcctcatcatcttcacattgagtaggctgaggaggaagagaaggggtaggtcttggcagtcttaggagtggcagaagcagaagaggtggaggaggtggaagggaagggaaggggaggccagggaggcaggagaggcaggcacacttggtgtccatgttacagaaatacattataatttttcttccttttttttttgggcttaattcctctaaaa

SEQ ID NO: 589348 - DNA, 334 bp, Homo sapiens
tgtgtgtccacctgtgtttgtcttggtgtgttcgtcctggtttgtgcgtctaggtgtgtgtgtccaggtgtgtgtgtctaggtgtatgtgtccatggtgtgtgtgtcccggtgtttgtgtctaggtgtgtctctttgtgtcgagctttttgggcttcttgcatgtgtaatttaacatttttcagcaaattagggagcttttcatctattatttcttggacattttttctgtttggaactttatttctgcttctatctctctcacatctcctctgatactctcattaaggatgtcccaagcttctattcatatttcttaattatttttccctctc

SEQ ID NO: 589349 - DNA, 776 bp, Homo sapiens
gcggctccaccccttccacgtcatccgcatcaacaagatgttgtcctgtgctggggctgatccaggctccaaataggcatgcgaggtgcctttgagaaagccctagggcaacatggtggactagggtttctacgattggccgaagtatgatcatgtccgatccgcaccaaatgcctgcaggaattaaggagcgatgtgaattggaggcacctgcgacaggaggcccaagtgtacgagatgtccatggactcgccgagaagcatcccaccatcttcaaggaggagagttggggactgtacacctaagttcccaagtgcttgatgaaatggtgaagaccatggatggttggagaggccgggtcatcccagactgggctgtgggtgtccagtacatggccagtgcgttggaccatctggaactagagatggtgaggtcccctgcagttctaatgagtggcttccaaatgtgtctggcgcgcgcatcttaatactcacgcaagtgaaaattcctacttactgtacgcaccttaccgaaaggtgattaaaagaccttgaaatccatgaagggcaggggagaatggcttcataaaaaagtctagtaaaccgcattttggtacgcggcggacgaaaatggaaggattacttgcatggtagggatgcaaaaattggggaagataacagtggacgtggtcaccggaagaaagagtcggggagacaagatttataaaccaccgggggttgcgggcacactggttccaaaagaagtcaggagcgaag

SEQ ID NO: 589350 - DNA, 419 bp, Homo sapiens
  misc_feature (7)..(7): n is a, c, g, or t
  misc_feature (14)..(14): n is a, c, g, or t
aatgggnaatttcngattaaaaagtcccccgtacttgtgcccaactttaattagcttggggagcaaaatcttatatggagtgttgtggaagggtggaaagatttctttgaaaagtttattcacattgtagaacagcaaatgacatttttacagtatttttttgtaaagcaaactattttgtgccttgaatttggtatatgtgtattagtgaaacattgtaaaagtgaatttctacctctgtatctatgtgtaccatcctcttgtaaattactatgaactactatgtgattgcttctgtttgttcgttctaggatgtcttttttaaatagtgaccaatgtttaaggctgttaaaataagccaacttttacaaatcgggatgttttctaaagaactgattaaatacgtacataactgaaaa

SEQ ID NO: 589351 - DNA, 469 bp, Homo sapiens
  misc_feature (23)..(23): n is a, c, g, or t
  misc_feature (29)..(29): n is a, c, g, or t
  misc_feature (195)..(195): n is a, c, g, or t
  misc_feature (235)..(235): n is a, c, g, or t
  misc_feature (294)..(294): n is a, c, g, or t
  misc_feature (309)..(309): n is a, c, g, or t
  misc_feature (322)..(322): n is a, c, g, or t
  misc_feature (338)..(338): n is a, c, g, or t
  misc_feature (355)..(355): n is a, c, g, or t
  misc_feature (360)..(360): n is a, c, g, or t
  misc_feature (446)..(446): n is a, c, g, or t
  misc_feature (464)..(464): n is a, c, g, or t
ggtgagcgttccagcttccgganccggangggcccggcgtacccagcccccagcccgacgtgaccatgctgtcccgcctcctaaaagaacaccaggccaagcagaatgaatgcaaggagctgcaggaaaagaggaggcgagaggctatcgctgcagcgacctgcctgacagaagctttggtggatcactcatgtnggtgttgcccagcctacatgaaccagagctggaccatgangtgaagaccctacagtccaagctgccccatttgccaagcagacagccattggatcggantgtggagaacttcancaggcattcaagnaattgggatttgagantggctcgagcatcgagnggacngcgcaccatgcatgcacggatatgttacaaggcatgcatctgcccttctagcctgttcctccccaacctatcctctacttaccgcngggaaggaggagctgacncttgt

SEQ ID NO: 589352 - DNA, 218 bp, Homo sapiens
gacgaccacatgaggacacagggagaagacgccgtctgccagccacagagagagaccccagaagaaaccagccccgccagcaccttgatcttagacttctggcctccagaactgtgggaatctaaattcctattgttgaagcttgtggtactttgctgtagaccgggcttaacggaccaacacacatcagataacacatggctggacaggactgtttc

SEQ ID NO: 589353 - DNA, 285 bp, Homo sapiens
tgatcgagccggtccagcggaccgaaacatgacgtaatacacagtgcttaaatatgaaacaaaattattttataaaaaagcaaaagactacagactatatacaaaagggacctggaatctgtaaggtgattccaagaaacgaaataagtagaaaatccatggtgaaacctgaacattctacctctgctctggagaagggctatcatacaacattcagtcagctgaagatggatgggtagaggtgtgtctatacataaactgcagtcattttggctggttccgctg

SEQ ID NO: 589354 - DNA, 768 bp, Homo sapiens
catgaggagaaggtatttcaaactggggaagagtcataatcctggggatgtttcacatgtggtcagctttaacccttctacagacacgggccctctcctcggtgaggagggacctcgggcatgtgtggggtggtggtgggtgggctcccctctctcccttatttagcagaaagtggtgtggggcattgagccaggttatatgacttgggatgtggtgctccgtgcacattaacaacctgtggtgagaattacaacgtgggaactaggacaatgtgcgggaaagcattattctctcagtgagggcggttaaccaaagaggcttgggctatcccaagggatctcgtggttggccgggcacgggtggctctcacaccgtgttaagtgccagcactttggggacggccaaggggggttagatcactggcaggctccaggagttcgagcccagcctgtggccacctgtgggtgaaacccgtgttcctctactaaacttacaacaattagctgggcagtggcgaggatgggtgccatgataatccccagctacgtggggaggctgagcacgggcagaaatgctggaacccgggaagcatagtttgcagtgagccgagaattgcccaacagcacctccagcctgggttaacagagcaaggactccacctcaaaataaaataatccctaaataccccagcgggctccggggggttaccaaccccagtaaaacccgcggggtgaaccgggtcccctaaatttggccttattgtgcga

SEQ ID NO: 589355 - DNA, 144 bp, Homo sapiens
cgaggcgggcgatctagaggatcgtttgcgggcctttcacgcataatgtagatcaattcaacttaagagctaacattaaataattatctgagtatcttaggtgtcttataaaataaatttgaagtagatgagtttatactcaag

SEQ ID NO: 589356 - DNA, 361 bp, Homo sapiens
aacatgacaaggatgctcagtgtggccaccgttattcaacatagtactggaagttcttgctagagcaatcagacaagagaaagaaataaaaggcctccacattggaaaggaagaagtcaaattatccttgtttgcagatgatatgatcttatatgtggaaaaacctaaagactccacaagaaaatgattagagctgataaattcagtacagttgcagtatacgaaatcaacatacaaaaatcagtagcatttctgtgtgccaacagtaaacaatatgaaaaaaattagaaaactaatcccatttatagtagccacacatggaaatttaagtacctggggaagttaaccaaagaaggttatt

SEQ ID NO: 589357 - DNA, 404 bp, Homo sapiens
  misc_feature (290)..(290): n is a, c, g, or t
  misc_feature (327)..(327): n is a, c, g, or t
  misc_feature (349)..(349): n is a, c, g, or t
  misc_feature (354)..(354): n is a, c, g, or t
  misc_feature (385)..(385): n is a, c, g, or t
tcaattatatccatttttccatctactctaagcctgcacccatgcaatatacacctggagaaaaatgctgagaggtctcagtgttgctggacactaatttcaagtgggcccttgttggcgtgtggtaatccttcatatttccttaataaattgattctcccacttttcaagacaatcattaacacattaacaactctctcctcaaacttccagtgctgcccctggaattttttttttttttttttttttgaggacaggggttcacttttggcccagactgaagtgcagtnggagcaatctaggactcacttgcagcctccacctccnggggtttcaagtaatttttcanggccntcagcctttggggagtaggctgaggtccccngggggcacgtgaccagggg

SEQ ID NO: 589358 - DNA, 127 bp, Homo sapiens
ccagagacggcggacaggacagcacgagcaccccaacgacctccctcctagcatgatcgacccgctgcatggaacaatgctagactaccctccatgctggacaaaaagcctttcatttcaacacagt

SEQ ID NO: 589359 - DNA, 116 bp, Homo sapiens
ccgggtgcccggtctcatgacatttccttgcagaggtttaaggatgggcagctgtcaacgcgggaccagtgctgctactgcctctgcccctcctgccaccctttcccctttaaata

SEQ ID NO: 589360 - DNA, 769 bp, Homo sapiens
gccaaaaccgttcaccatggaaagaaaaaagatggtcaaggaagcccagagggagaaaagaaaaaaacaaaattcctaaacatgagaaaaaaagaaaggagaagacagccaagaccaataaaggcaaatagaatgagaaccatattatggacagccattttcctcagtctcttttctcgcctgaactcttaagctgcatctggaagatggcttattgggtttaaccatatcgtcatcgtcggcccttgtttgtaaagaccggtttccaaatcgtcctcatgtaactgctgcacaaagctctcaagttctcgatgttacatcccgcccctcgactctgactggtgtatgacagaggatctatttaatctactatacttcaataacgaattttgtgcatgttcccccccgtaccctattgctcccccgtcccatatccctccccaaacctgtagatccgcaagtcctccccgctctatataataatattacttccctaattgatttattctcgcctctccgcctaatatttaaagttctcccgtctgtccgtccgcaccatctctgcacaacatcctattactccttcctatttcactcccccccttaccttatttttaccacctttccccccaccctcttttaatatcttacaccttatcatatggtgtcactcccatcttcatctatgccctatacgtccaaatacggtgctctatgctaccgatttatcctttatatcttgtcccctctcattcacccaactacctcg

SEQ ID NO: 589361 - DNA, 533 bp, Homo sapiens
  misc_feature (238)..(238): n is a, c, g, or t
cgcaccagcatcctgcacaagagccagcaaagagaggcgcgcgtggaattaaaatccggggtagcccccggcttctcattgagcacccaccaccaatcaatgctcagcagttggaacgtgggaccaagctaagaaggcaaacccattcctgcttgccgacttccggcaagtcagacaggttgaagaacagaagagacgaaaccctccaaaggaagaggggcatcatgtcttccaactnttcttccgcgagacaatggaacgtggtgcaaggtagacatgtattacaccgctgctccatgagagacatcagtcagactatccaatcccctagctcttgaccattattgaaatcgcttctcacagatgcgagacttcactatgaatgaacacgtgaagatatttagagtcgaggtggcagctcctttgctatgacgataagtgaagaatactatagcccacgtcattgaagcgcgcccacgcgcttgtccaagtgattggataaaactgtaaaactatacaccccaaagcccacc

SEQ ID NO: 589362 - DNA, 188 bp, Homo sapiens
aacaggaaccccacccttttcagccgggggaaattttttttgacccaaaactcaaaccgagtcaacccaaagttccaagttttttgcttttttttctgggggtgggttggtttgtcccaaaagtcagtttgcaagttgaaacttcatgaaattatttgtagcagaaataaagtacattgtccaaatca

SEQ ID NO: 589363 - DNA, 214 bp, Homo sapiens
gggtcgaatcagagctgtagctgccagcctacgtcagagtcacagcaacgcgggatccgagccgtgtctttaacctacaccacagctgacggcatcttaggatccttaacctcctgagcaaggccagggatggaacccacaacctcatggctcctagtcggattcgtttctgttgcgccatgacaggaactcctgaggcatgtatttttctggg

SEQ ID NO: 589364 - DNA, 367 bp, Homo sapiens
tgaggatccccgacctatgcctgccccttccatcttcggtgagcctggccgcccagtttcaccctctttgccgccatcgctcatcaacagggttcttgagctccaaattttcctccaccgcttatattccttctctttctgatgattcgcagcctctcggcagcctgatcccgctgttccaggcccttatccaacttgaccttcagagcctagttctccttccgaagctgctcacacagggtctgcagaatgcaggtgcgctgctcattcttgtgcaccttgtatgccaggcgcatgaactccagggccatgcggcccaggtgggtgaagagctggccgtggtccagctcctcggcacacacactca

SEQ ID NO: 589365 - DNA, 617 bp, Homo sapiens
gctatcaagctggcagggtcaccaaggtcctgggcaggaccggttctcagtggacatgtgcacgcaggtgcgctgtggaattcatggacgacacgagccgatccatcatccgcaatgtaaaaggccccgtgcgcgagggctgaagtgctcacccttttgtgagtcagagcgagaagtcccggaggttgcgctgagcttgggtgctcgctgggtcttggatgtcgggattcgatcgcacttggtcgatgggaatggtctgtcgagcaggtctgctccttttttgtatgtgccgtcaacaccgtaactgagatgctcctttaaatagagcgttgtgtttcaagttaataaaaaatgaaaaaattaaataaataagagaaaggaaagaaaaaaaaggagtcgaagggggcgttggtaatggggcgggtgcgggaagaagggcagtgctagttgggaagggtggaaaaagggcgcagaagtgggtctatcgtagaacgcacgtttgttttatgtgcgcagggggggataataccggggggggcgccatttagagtgggggtgtgtagacctattgggaaaacgcgagggttgaactatggggttagatgatgtgagcacaa

SEQ ID NO: 589366 - DNA, 137 bp, Homo sapiens
gtaaaactgctcaggccatcaagggtatgcatatacgaaaagccacgagatactgaaagatgtcactttacagaaacgtgtgtaccttacgagttacatggtggcgttggcggtgtacacggaccagcatgggactg

SEQ ID NO: 589367 - DNA, 112 bp, Homo sapiens
  misc_feature (1)..(1): n is a, c, g, or t
  misc_feature (26)..(26): n is a, c, g, or t
  misc_feature (34)..(34): n is a, c, g, or t
  misc_feature (39)..(39): n is a, c, g, or t
  misc_feature (91)..(91): n is a, c, g, or t
ngagaaaaaagtttacaatacactgnagtaggtnccaantgcgtgatggacgtgaggaaagactgccaacccactttctaaatccctaggnagggtatgtatgtttctgatc

SEQ ID NO: 589368 - DNA, 1761 bp, Homo sapiens
ggccaataagcgggtctgtcatccaggtcgctgatagtacactccatgttgcgcagggctttggacccttgtggaaccaagtcggctcttgaggctcgaagattgtgcgcgcatctgggatcatggaggacgccacccagaatggcgagactgcgtcgactgaccgatcatacagtcgcattatgtgtctgagtgcatcgggtgctgctgtgggcatggaggatgtcatccgggacgaggggtctcggatcgaaagggacgacgacaccttcgcgcaacagttcatagaacgtttcacactcgcggaagaccactagtcctcgcatatgcgtacagagaaacgcctcgaggcacattgccgtctgttgcttcgagggccgaatcactccggggtaccaggaggggataccccttcattggcgagcaggtagcccaacttggagttgcggtccgaagtagtatacgcacaatagttacgccgggctaagtagaatactccaacctcggagtttgacgcgcaccatggcgggatagcatacaggttcaccctacgcgtatggcgagatggtaatgcagcgcccccagggcactagacctggcgcttgaaagaccggggacggaaatccctgtggacaacggctgcgctccttttggtgggacatatggccgattccaccaatgggggtgctaatccaggcaattccccggttccatgagcattggaccacggtccgcgaacggatacaagccgcagtacagcctggtgggcacagttgaccggacaccagaattcgttttaagacggccttaggaatagcccttagaggacacggacgccggtgtttgggccacgatggctgcgttttgtgaaaggcaatcgactgtttcaccttaccacaagcgaggcgagggaaaatacacgaaggcaacgacgccacaccaacggcctggacgacgcggtggaaatagcgccgacgttacaacacggggttcgaacaagttttcggcaagcagcgcgaaaggaacaagcatattggcaggcagcacccttagtcatattgctcgggtagagaccatttgtggtcacccgggaggacaccgacacgatcccaagcccaagacagggggcatcctctgaggccccccacttagttgtgtgaagggagccccaataagtaacgttacagaaagttcacaggttgacaggacaagtggaaacttgcgcaccaacaaccacttgttgcgaagagagacaagagggtgagacgccacacgtttgagtaggccctaacaggcacgggacccgaatttggaacacagtgtatcaccggggaccacactttttgctcatatgggcttttcaggtgcccctcttgtggtggttatagccaacacatagcttctgtacacaggcaagcagaaattggacccacacgtgtaggcacgggtggacccaggaaagtgggacttcacccgtggattccaaaagggggtagcggcgaatagcgagctacacggttaggcgctcacaacatggtggaagccgcacccacagaaaagatgggtagggacgacacaagaacagaatgcaggtcctattatgttgtgaaacagcccattactgcagaggaacgcgcacgaaagcagtgttggatgtacccccaatatcgaagtggtacccctccagcaagcccactagggtgaaacccaagccccccggtgacagcgttgctatgagaagagagccacacagagtactcg

SEQ ID NO: 589369 - DNA, 190 bp, Homo sapiens
taaaatcggtttttatcccttgcccatgaaaaaattttgggaaaaaacctgcgtgggggtattccggttttgaaaaaaaaaaaaagggccttggtttttgttgaaggccggattttggataaacctttatgttggcccccctatggtcagggctggaaactaaaaaggacctggttttttggccgctgga

SEQ ID NO: 589370 - DNA, 100 bp, Homo sapiens
ttaaatgtcctttgtccaatgtgaccatttattcatattgttttgattaccctcgtgttactacaaaatggcaataaatactatgggattgtttgtttta

SEQ ID NO: 589371 - DNA, 102 bp, Homo sapiens
caggtaattgaggaagcagcttactattgtagttggtgtgagatggaggaaggagctagggaaataaaaacctgtacctccatgtgcccacagaatccttct

SEQ ID NO: 589372 - DNA, 110 bp, Homo sapiens
ggcggtgaagagctgggtcgactcaggctagttcttctggagctcaacttcttgccaaccacagtgaccaagctgagccaaacagcagctaattctggcgcgtgacatac

SEQ ID NO: 589373 - DNA, 140 bp, Homo sapiens
aacttttgctttcctgaaatttatccccccctttaaaaatttttgcttgcaagcccctggataggttgtgttttaagggtgagctgcccaattttccctgccgggggtcctataaataaatgtttttttttttcctgcca

SEQ ID NO: 589374 - DNA, 115 bp, Homo sapiens
tgtgatcatctcccagaaagagagggctagtctcatgagaaaacccagattttcttggcttagtccaccttgacagctaatcactggaaatgggtgtgggctggtaacagtcctc

SEQ ID NO: 589375 - DNA, 709 bp, Homo sapiens
  misc_feature (53)..(53): n is a, c, g, or t
  misc_feature (56)..(56): n is a, c, g, or t
  misc_feature (65)..(65): n is a, c, g, or t
  misc_feature (69)..(69): n is a, c, g, or t
  misc_feature (72)..(72): n is a, c, g, or t
  misc_feature (75)..(75): n is a, c, g, or t
  misc_feature (78)..(78): n is a, c, g, or t
  misc_feature (80)..(80): n is a, c, g, or t
  misc_feature (108)..(108): n is a, c, g, or t
  misc_feature (115)..(115): n is a, c, g, or t
  misc_feature (124)..(124): n is a, c, g, or t
  misc_feature (252)..(252): n is a, c, g, or t
gttttcagaacttttcttgtcaccccagggcgaatacagagtggcaggtggtnatnttggggggnattnatnttntananaactgaaaatctgaactgggtgcctgtncccgtcnagggttacnggcagatcccgtggacagcatcaccatgaacggagaggccatcgcctgcgctgagggctgccaggccattgttgacacccggcaccttttttgctgaccgggcccaaccagccccattgccaacatcnagagggacatcggagccagcgagaactcagatggcgacatggtggtcagctggtcagccatcagcagcctggccgacattgttttcaccatcaatggagtccagtaccccgtgccacccagtgcctacatcctgcagagcgaggggagctgcatcagtggctttcagggcatgaacctcccccccgaatttggagagctttggattctgggtgatgttttcatccgccagtactttaccgtttttgacagggcaaacaaccaggtcggcctggcccccgtgggttaagcctaagttttttcagccccctcccaggaagatttggcctttgtcctgggccccctttaaatggatttaattttcctgactgtttttcccaggggagtgtggaggttttggccctgttccctgtcctaccaataacgtagaataaaaacataaccccctgaaaaaaaaaa

SEQ ID NO: 589376 - DNA, 112 bp, Homo sapiens
tccaacaactctccctggttcaacctgtaaaaagtgggtcgattgctgacagactgggtcttccctccctgcatttcagacataccagttactgaaagcaaatcagttttaa

SEQ ID NO: 589377 - DNA, 850 bp, Homo sapiens
  misc_feature (850)..(850): n is a, c, g, or t
gcaggtggatcacgagatgaggggttcgagaccagactggccaacatgtgaaaccccgtctctactaaaaatacaaaaattagccaggtgcggtggtggacacctgtaatcccatctactcgggaggctgaggcaggagaattgcctgaacctggaggtggaggttgcagtgagccgagatctcagacacagcaatctgctgtgtctgaacttatacaattgcactcttggtcagatactctgtaccacaactgggtctcagattaagctgggggttgaagactaatcttgtttcggagagaggagcgaccaacaaaacacaccagacgacatcgagaaccgacgagaatcaaaaaaatagacacctaaacagagagccaccaagccagaacacagaaaggacaaaacaaccgacgacacacgctacagagaaagaaccgaacgcgaacgaaaaaacgaaagcaaagaagacgaagaacaaacagaaagcaaacacagcgcagaaaacaagatacagagaaccaaagaagcaaaaaaaacagaaagaaacgaaggaagagaaaaaggaaaagagagcgcggcgaaagggaagggaacggacgcgagcgcgggaccaagccacgaacagagacgacggacaacgcagaaagcagagaaagcaagacccgcgcacacacacaggggaagccgcgcagccgcaaccgcgcgacacacacggccccacaacacaagcagaacgagcaggggcagaggccaagaccgaagccaggacgcggagaagaaaaagagagaggggaaaggggggagaagaagaaagacggcgcgcaagcgatgaggcggcaagagggan

SEQ ID NO: 589378 - DNA, 952 bp, Homo sapiens
ggggctatgtgacctgcgctaagcggaagctggcgctcttttccgtggcgcctcggaggcgttcagctgcttcaagatgaagctgaacatctccttcccagccactggctgccagaaactcattgaagtggacgatgaacgcaaacttcgtactttctatgagaagcgtatggccacagaagttgctgctgacgctctgggtgaagaatggaagggttatgtggtccgaatcagtggtgggaacgacaaacaaggtttccccatgaagcagggtgtcttgacccatggccgtgtccgcctgctactgagtaaggggcattcctgttacagaccaaggagaactggagaaagaaagagaaaaatcagttcgtggttgcattgtggatgcaaatctgagcgttctcaacttggttattgtaaaaaaaggagagaaggatattcctggactgactgatatcgtacatgctgactctccggcgcgacacgtggggtcaccacatagaagcagacttaagacaagaagtactcggcaagatacatcttgtgcaagtcttcatcgtagagaagaagagtagatgtcgcgtccagttatgtatggtcaaggaaaagcgcctgtataaatagaagaagggtaactaaacctaggaccaaaggcactccgaagaattcagccagtctttgcttacatcgcacgtgatccttgcaagcacgaaacggacaggctgctcatttgctcgtgaaagagagcgagcgtacccgagacacagaaaaataaagaagaggctgcagaatatgctaaacttttggccaagagaatgaaggaggctaaggagaagcgccaggaacaaattgcgaagagacgcagactttcctctctgcgagcttctacttctaagtctgaatccagtcagaaataagattttttgagtaacaaataaataagatcagactc

SEQ ID NO: 589379 - DNA, 483 bp, Homo sapiens
ggggagcccggtaatcgcataaaacttaaaactttacagtcagaggttcatttcctcttcttaaaaaaaaaaaaaaaaaaaaaaaaaaaaaaaaaaaaaaaaaaaaaaaaaaaaaaaaaaaaaaaaaaaaaaaaaaaaaaaaaaaaaaaaaaaaaaccaggtgggccgcttgggccaagcggactttagactggggcaggttaaggcagggggccgaaattggggctaactgggcaaattggcccaaaggggggcggtttaaaaattaacgggccggggtttaacaacgtcgggacgggaaaaacccgggggtacccaaactaaatggcctggaagaaaatccccttttggcaagtgggggaaaaaccaaaaaggcccgaacggatggcctttccaaaaagtggcgcaccctgaagggcaaagggaaattggaagcggaaaaatttggtaaaaatccgggtaaaattttggtaaaaaaaggta

SEQ ID NO: 589380 - DNA, 1437 bp, Homo sapiens
ggggctatgtgacctgcgctaagcggaagctggcgctcttttccgtggcgcctcggaggcgttcagctgcttcaagatgaagctgaacatctccttcccagccactggctgccagaaactcattgaagtggacgatgaacgcaaacttcgtactttctatgagaagcgtatggccacagaagttgctgctgacgctctgggtgaagaatggaagggttatgtggtccgaatcagtggtgggaacgacaaacaaggtttccccatgaagcagggtgtcttgacccatggccgtgtccagccctgctcactgcagtcacaggggccattccctgttcaccagcacccaaggcagcaactggcagcaacagcacaagcagcaacacatccagttacagtcggttgccattgctggcatgcgaacatctgcagcgattcatccaacatgtgcgttcattggtcaaacaacaaggcagcagcaaggcatcatatccatggcacatgcacctgcatcacatcaccagatagccaatcgaccagccttggagcccccgaagacagcagcgtcagccagcacatccagcaacaacattgttccaatcatcatcatcacaagaccagcatgcatcgtccggcgcagatatagttggtcaaagcaacaagcccgttcaacataacagcacaggtaaagcaacaccctacggcaccaaaagaccagcccaacagatcagtcacgcgaatctagggattcacataccaaacgatggtccctgccagacaccaaacggacggcgatataggctcatgacagcaagcagcagtcaccaaagaacaacatcacagagacagacggcctggccagacttactggcctcaaacctaggcgcacacgacgacacggacagggacggcataccgggcagacacgccgccagtgcaacacaagggcgacagcagaccgcacgaacacttgacatccttcggaggacgctgtactacattcgacacgacctcgaatgccaggcacaggcaagacgtaagaaataacacggaggtagcacaaacacatagagtgaaggaacacagcaactctgcacaccgagacagacacagggggacgcgaccgaaccagaaagaaacaaataccactacagaaggagggcaccaaaacgatgcagcaccagaacccaccacgaactgcatcgtaaccacacaaggggggccccaacagaacgcatagggtagtatgaaagcaataagaaacaaggcacggagagattgatcaaccgaggagtacctgtggcaaaacagctagacacggcgaccatgggaccgcagcacacgatcagaagtacgtgaggacacaaacacgtgcaacaacagacctaccagaaacaaagccacgaggacgatcagaatacacgacagagcaggaaacaa

SEQ ID NO: 589381 - DNA, 915 bp, Homo sapiens
  misc_feature (204)..(204): n is a, c, g, or t
  misc_feature (278)..(278): n is a, c, g, or t
  misc_feature (290)..(290): n is a, c, g, or t
  misc_feature (325)..(325): n is a, c, g, or t
  misc_feature (328)..(328): n is a, c, g, or t
  misc_feature (377)..(377): n is a, c, g, or t
  misc_feature (384)..(385): n is a, c, g, or t
  misc_feature (387)..(387): n is a, c, g, or t
  misc_feature (398)..(398): n is a, c, g, or t
  misc_feature (409)..(410): n is a, c, g, or t
  misc_feature (416)..(416): n is a, c, g, or t
  misc_feature (431)..(431): n is a, c, g, or t
  misc_feature (455)..(455): n is a, c, g, or t
  misc_feature (476)..(476): n is a, c, g, or t
  misc_feature (479)..(479): n is a, c, g, or t
  misc_feature (526)..(526): n is a, c, g, or t
  misc_feature (548)..(548): n is a, c, g, or t
  misc_feature (614)..(614): n is a, c, g, or t
  misc_feature (631)..(631): n is a, c, g, or t
  misc_feature (893)..(893): n is a, c, g, or t
gcttaagattgaaacagactattacaacaatatttgagatttcacagagaactgcatgcttttgttattaaaagacttttgttgaaaaatttgacctttacctcttatgaacgaaagaaatatagaggtttcaagcatttttgccagcacagagtcattcacaacaaccttctagatgcttattttccaccttttcctacaganggtaatattcagttaccagagggccatctccaccactgaatgattcagagcttcagagctcaaaagtgatcagnactcacaaattngcataattggtccaaagcttgatttagatgtttgnggngcagcaaacatcaaataatataatgccaaatagaatattatagtctctntggggtnntngctcatcggcnacggccgcctnngactgngattttctgtgcttngtttctattagtacaacaccttcnttcttaatgcttcttggggcntcncgggttttggggattgatgtgtttttggcgttccgcagtgatggtcnctttcgaaaactgcgatatacntctgcatgttacactgacatacaacacataagtgttttgtcacacatcaacttttagcctcggatnatagaatacgaagggcnacactggacataacaccacagaacttttgaatatccccttttcccaattgttaacaggtagtacttttttctaaagagaaagtgatgaaaaatccaaaatttctgcatccagtgtttgactccaactttctactttatcgtctcctggtaccaccatatcctgatgcagttctggttttcgtgtctgagtttgaacataccgaatagctgcccgagcctccatgaaggggtgagtaagcctattccacgtgccagggtaggngggaggtaggacgggtatacac

SEQ ID NO: 589382 - DNA, 1489 bp, Homo sapiens
ctctggtgcaatttcgatctgttcgagctcgtattcctggttgttgcatcgaacatacaatcgaagcagacacagtgctcgttgccaaggcccgaggcccgaacgatatatcgtgtcggctagagtgtctttgactatgcatgttgcgcagttgggatgtcatgcgctacgctgccccaatatctgtgcccatgctgacgcggtagcagctggtagctcatcgatcgtgtactgttttcctgaaatttcagatcggtcatattcgaccttattgactcaaaaggaggcggccaggtatcagaacatggggacagtgaacctagaatagtataacatagaagtataacatagaagacaatatcatgtaactcaagaccaggcgcatctaagaatatcggatgtggtgacgttcgtaacggatgattctgatccctggtatccattgtagtacgccgtattaaagggtatgttcaaagatactgtagaaaagcgaaaaaatgcaaatcgagagaggtagagagaagttaaagtggaccgtttggagggaatatatatacctattgtggattgcaaagatgttgcttcaagcgagtaatggatcgatattagaagaagtagagtaacaaataattagaatataatacttacgtagaaggactttgtggtgcgtaaagacaattattgcgaaggaggaacatactaagagttggaaacggagattactattcaaatacgaagaatgctggtaaaacaggttttaacttggtttcgcaaggttatggtcagattgaacagtggtagtctggaatagaaaatgtaaaataagttgggatcggggtggctgaggaaatttgctccctattcaaggaggttagatttgaccaatttttgcaattgaatttgcatctttaccttgatggggggagttaataaattgaggaaatttggtttggaaactaagtttattaacattaaatgtgtgggctaattggttccaatgacaaaagtaattttgacgtagtggggagtggcagtccacggtttaaacttgcgagaaaagaggtggacatttttggaaggttaatagatacggggtgtgagcatcaaaaacgtggggttcgtgcaaaataaaataagccaaaagttttggtttgacgaacacgatttaaacgacaattacgcgaatatgggggaaaaagaggataaaggtgggagagagcatggaattgttggagaacttggtaacggtacgccagggtctgtaaacggggagggaagttcgcacaggaaattttgtgcacgtatgtagaacagtttgttttacaaggagaagggagggtaacaaaatttacatagagtgggttacaacgatgtgtatgaaagagctctgaaagtatacgggggacaaaaaagaggcaagagatagttgtggaagagagtatgttagcagtgaacagcatatgagagaggagagggtgttaaaataaag

SEQ ID NO: 589383 - DNA, 369 bp, Homo sapiens
gcttaagattgaaacagactattacaacaatatttgagatttcacagagaactgcatgcttttgttattaaaagacttttgttgaaaaatttgacctttacctcttatgaacgaaagaaatatagaggtttcaagcattttcgcgagagggttgtcagtcacaagaactttttaaacgatgatctgtcacatgctcgtacggatgctgatagtctgtaaccagtacggcgatgatcagcaatgaatgattctagagcctacagagctcaaaagtgagtctgtaactcaactaaatgtggctatgaatagtctcaatcattgcatgtgaggcggatacagccggtgatgcctatatgaatcgaacctgtc

SEQ ID NO: 589384 - DNA, 202 bp, Homo sapiens
  misc_feature (67)..(67): n is a, c, g, or t
agcggagagttgttgcaaagtgctcagcactaagggagccagcgcacagcacatccccctttcggancgagccagcagcagcagccacaccgaggtatgatgccgctcacgaggatctgcttccgatactcaacaggaactctcggactctggcatgaacggatgctcgtggtgaccggatgtggtcccaatgccaagcgtc

SEQ ID NO: 589385 - DNA, 423 bp, Homo sapiens
tcttcctctctgtttgcttatggcacaacagagaaatggggtaatttttcaggagggtggagagaaacacttgaaacttgtggggaaactctatgaccagtgtcatgacaccctagtacagtttggtggatttttagcatcaaatctaagtacagaagattatataaaacgagtgccttcaattgatgtgctctgtaatgagtttcatacaccacacgatgcagcattttttctgtctaggccaatgtatgcacaccatatttcgtcaaaataccgatgaacttaaaaaatcagaaaaagggaagtaaacagcaacataaagtccataaatacattacatcatgtgagatggtgatggctcctgtccatgaagcagtggtctccttacatgtttccaaagtctgggatgacatcagtcctcag

SEQ ID NO: 589386 - DNA, 785 bp, Homo sapiens
tggggtaactcctttaactaaaatagttcaaatcaaggtttttaccacactatcaaaaagttctatttcttctggtttccccagcgtcagaggggttgaatagaaggtaaaaacgggccgggagtccacggggctcccagctctaaacgggcggccaggggcagggaaggggggggctccaggtctcacggggggcaccttctacagaaaatagacgtagcgggccggggcccgggggacagaacaccagacgtgtccagtccatctccaaaaagcagcacaaatacttggccccacagtatggaaagaattatacaccttcatacgggtcgtggagctcagggcatttagtttaatgaaaacaagaacaacaaaatctcatgcagtatagtgtatctcggggttcccctcaaggtcttccccagcaacaaaacaaagtgtgaggggccccctttttaccgctcttataaaccacggtggtgggggttctgctatggaaacctctggggtatcaacaaggaggtgcgcccctctctacaaacaaaataggtggcgtccccaggaatgtggtttctcgggagagggcgcccagtgagtaggcggcttcttggggccccactcgggggcgtcgtgaggggagacagaaggggagaagaccactccccatttcgtgggtgcccccggggtggaggacactttgaggaaccccaagatgttgcccaatggggcccggaggccggggaggatacccaaggaatccaagggatttcaaaaccttttgagag

SEQ ID NO: 589387 - DNA, 548 bp, Homo sapiens
  misc_feature (1)..(1): n is a, c, g, or t
  misc_feature (4)..(4): n is a, c, g, or t
  misc_feature (23)..(23): n is a, c, g, or t
  misc_feature (30)..(30): n is a, c, g, or t
  misc_feature (36)..(36): n is a, c, g, or t
  misc_feature (38)..(38): n is a, c, g, or t
  misc_feature (40)..(40): n is a, c, g, or t
  misc_feature (45)..(45): n is a, c, g, or t
  misc_feature (91)..(91): n is a, c, g, or t
  misc_feature (106)..(106): n is a, c, g, or t
  misc_feature (111)..(111): n is a, c, g, or t
  misc_feature (120)..(120): n is a, c, g, or t
  misc_feature (127)..(127): n is a, c, g, or t
  misc_feature (169)..(169): n is a, c, g, or t
  misc_feature (172)..(172): n is a, c, g, or t
  misc_feature (186)..(186): n is a, c, g, or t
  misc_feature (206)..(206): n is a, c, g, or t
  misc_feature (211)..(211): n is a, c, g, or t
  misc_feature (213)..(213): n is a, c, g, or t
  misc_feature (219)..(219): n is a, c, g, or t
  misc_feature (223)..(223): n is a, c, g, or t
  misc_feature (232)..(232): n is a, c, g, or t
  misc_feature (235)..(236): n is a, c, g, or t
  misc_feature (247)..(247): n is a, c, g, or t
  misc_feature (251)..(251): n is a, c, g, or t
  misc_feature (254)..(255): n is a, c, g, or t
  misc_feature (266)..(266): n is a, c, g, or t
  misc_feature (273)..(273): n is a, c, g, or t
  misc_feature (280)..(280): n is a, c, g, or t
  misc_feature (295)..(295): n is a, c, g, or t
  misc_feature (305)..(305): n is a, c, g, or t
  misc_feature (308)..(308): n is a, c, g, or t
  misc_feature (312)..(312): n is a, c, g, or t
  misc_feature (315)..(315): n is a, c, g, or t
  misc_feature (354)..(354): n is a, c, g, or t
  misc_feature (363)..(363): n is a, c, g, or t
  misc_feature (379)..(379): n is a, c, g, or t
  misc_feature (433)..(433): n is a, c, g, or t
  misc_feature (462)..(462): n is a, c, g, or t
  misc_feature (474)..(474): n is a, c, g, or t
  misc_feature (478)..(478): n is a, c, g, or t
  misc_feature (482)..(482): n is a, c, g, or t
  misc_feature (525)..(525): n is a, c, g, or t
natngttaagggatttttttctnatagctntaattncngngcttntttgtcgaaatgaaaactgaaaacaagtttacaaaacagttgattnctaatcgtgttttgnaagcngttaggggntccccgncccccaatagacccgttctggggtttcccccagataaatttnacngcccccgcttcagngtttttcaaaatacaaaagnaaaangngggggntgtntttttcggnggnnaatcgggcccntgcnggnnggggggggganagccacntcccccncagggggggggggcncccggggggntgngggnctnggggggccgcctgcccggcttgcccgcgcccctgctggnggggccccngacatcctgccaaagngtctgggcgggcccgggtgtggggggcggcgggccccctctggccccccggcgnccggggggcagagggggccctgcgtcccntaggctgcctgngggngggnggggcggcctgcgcgcgatagtggggtggctgtgggctcccancctggcccctgggaaccgtggga

SEQ ID NO: 589388 - DNA, 393 bp, Homo sapiens
tgaggacccccaagcccgccatacacagctgacacccacccactgagagagcggttatttatttatttatttatttatttattcttattttttgagatggaggctcactctgtcatctaagctggagtgcagtggtatgatcttggctcactgcagcctctgcctccgaggttcaagcgaatctctgcttcctgagtagctgggattaccggcatgcaccaccacacctggctaatttttgtattttcagtacagattggctttcgccatgttggccaggctggtctcaaactcctggcctcaagtgatccacccacctcagcctccctaagtgctgtgattacaggcatgagccactatgcccggccttctgggtgtatggacggcctttgt

SEQ ID NO: 589389 - DNA, 337 bp, Homo sapiens
  misc_feature (1)..(1): n is a, c, g, or t
ntcttctcccgaaaggttatctgctgtctgttcacactgagaacctgtaccccacagagctcgctccaacttcaaacctgtgtgccctatctcggcatgtttctgcacgtctcccccattctctttactgatcttcaagtactctgccacaggaccagcaaccagcgagtcaaatgcctgcacatatgaacctgctcctgcttttaaagccgtgtctgcatacccacggtgcatgtcagagtgtatgagatactgcctacaggcggccctgtgctctctactctctttctcccatattgcgcatgtcagccattatggcccacgtgctgcggactgc

SEQ ID NO: 589390 - DNA, 224 bp, Homo sapiens
tacttccacagggtgtggcaaaacaatcgaacaggggaaagaatagtcctttcaacaactggtgcagagatgattggatatctatgtgcaaaagaatgaagttgaactccttcacaccatatgcaaaaattaactcaaaatgtaccaaagacttaactgtaagaactaaaagcatgtaactcctagaagaaaacagaggagtaaatctttctaatcttggatta

SEQ ID NO: 589391 - DNA, 806 bp, Homo sapiens
  misc_feature (426)..(426): n is a, c, g, or t
  misc_feature (529)..(529): n is a, c, g, or t
  misc_feature (734)..(734): n is a, c, g, or t
  misc_feature (743)..(743): n is a, c, g, or t
  misc_feature (748)..(749): n is a, c, g, or t
  misc_feature (756)..(756): n is a, c, g, or t
  misc_feature (765)..(765): n is a, c, g, or t
  misc_feature (776)..(776): n is a, c, g, or t
  misc_feature (782)..(782): n is a, c, g, or t
ggacgcgtgggcggtcgcgttggcagcggatgcgggaagccggactctgggcgtcatgtactacaagtttagtggcttcacgcagaagttggcaggagcatgggcttcggaggcctatagcccgcagggattaaagcctgtggtttccacagaagcaccacctatcatatttgccacaccaactaaactgacctccgattccacagtgtatgattatgctgggaaaaacaaagttccagagctacaaaagtttttccagaaagctgatggtgtgcccgtctacctgaaacgaggcctgcctgaccaaatgctttaccggaccaccatggcgctgactgtgggagggaccatctactgcctgatcgccctctacatggcttcgcagcccaaaaacaaatgagttaggctgcagaggactggtttgtnttttgggcataaaccctttgaagttccttgtttcattgttaaattaaaattttttttttttacttggatggcttaacatttttgcaagaaaaataggaagatntgaaagatgatgtcttggttggtttatgaaatgcatatggcttgtcagaggctcattcgaccaggtaaaagccattggtttaaagaacatggtgctttgcttctagggttggtagctcctgattgccctggaggttctggatgaaggtgaacacaggcttgttaatgtcagtctgtgctgaggacctcaggcacttgaggttgcnttttgagcntgggnngcagganctttctggnttggtgtggtntggaangaacacagaaagcaggtcatgtga

SEQ ID NO: 589392 - DNA, 182 bp, Homo sapiens
tgttttcatgtaactaatactaacataagttcttctatagggtgatagataggtccaattgggtgtgaggagttcagttatatgtatgggattttctcaggtaaagtgggtgtttgagctttgaacgctttcttaatggggctgtttaggcctaactaatgcgcgctgttttaaaattttct

SEQ ID NO: 589393 - DNA, 414 bp, Homo sapiens
tagtctgctacggctgcaaatagcagtgatttcggacagcttcttgtctgcaaagcagttagcccttgatccatagtgtactcgaagcgttcagcatgtcacagttcggtctgcatttagcgtctttagtaatgagtcacttatagatgttcactcatcagcggcccatgttaatgcggcttcagccctctcattcacgagctccacatgtcatcatatgcactctgcagtagacagtgaccttagactatagacaccagggctataatgtcctcatctagcccttcagatatacctatgacctagcctcctacatgttgcctcataaatgctccacacccctgtaatgatcctagatatagatcaatatgacgtctataatggatacacagcacgttgtcataaacgcgtgag

SEQ ID NO: 589394 - DNA, 641 bp, Homo sapiens
  misc_feature (426)..(426): n is a, c, g, or t
  misc_feature (529)..(529): n is a, c, g, or t
ggacgcgtgggcggtcgcgttggcagcggatgcgggaagccggactctgggcgtcatgtactacaagtttagtggcttcacgcagaagttggcaggagcatgggcttcggaggcctatagcccgcagggattaaagcctgtggtttccacagaagcaccacctatcatatttgccacaccaactaaactgacctccgattccacagtgtatgattatgctgggaaaaacaaagttccagagctacaaaagtttttccagaaagctgatggtgtgcccgtctacctgaaacgaggcctgcctgaccaaatgctttaccggaccaccatggcgctgactgtgggagggaccatctactgcctgatcgccctctacatggcttcgcagcccaaaaacaaatgagttaggctgcagaggactggtttgtnttttgggcataaaccctttgaagttccttgtttcattgttaaattaaaattttttttttttacttggatggcttaacatttttgcaagaaaaataggaagatntgaaagatgatgtcttggttggtttatgaaatgcatatggctggcaaacctaattcaacagtaaaggccttggttaaaaaaacggccttgcctcttgttgggcccagaattc

SEQ ID NO: 589395 - DNA, 138 bp, Homo sapiens
ggaccctgtatacggaaatacagaaagtggttctcactttcagtatgatctcattgcagaataaacaattgtcatataaatgtagctgggtacaatggctcagacctctaattccagccactcaggaggctatggctg

SEQ ID NO: 589396 - DNA, 573 bp, Homo sapiens
  misc_feature (355)..(355): n is a, c, g, or t
ggacgcgtgggcggtcgcgttggcagcggatgcgggaagccggactctgggcgtcatgtactacaagtttagtggcttcacgcagaagttggcaggagcatgggcttcggaggcctatagcccgcagggattaaagcctgtggtttccacagaagcaccacctatcatatttgccacaccaactaaactgacctccgattccacagtgtatgattatgctgggaaaaacaaagttccagagctacaaaagtttttccagaaagctgatggtgtgcccgtctacctgaaacgaggcttctgtacttgatcaagattgctttgacccgggtaccgactcgatgtgctgctcgacatngtagggaagggacctatctacgtgcgcgtgatcggcgcgctcatatcatagtgtttgcgcaatgccactaataagatcgagaactgaaggttagggcataggaagtaggagcttggggacatgtattgatatgtggctgtaagacctctttttgataagttgccttgtctaatccatgtgtttaagactttagaagaagtccttggggtattgtgaac

SEQ ID NO: 589397 - DNA, 211 bp, Homo sapiens
ccccagggggggggttttttttggggtttttccccaaaggggggggggttccggggtttttggttaacggggaaaaaaaaaacgggcccgggggggggccccccaaagtttggggtccccgggggggtttccccccccccccccccggggggggatttttttccggtgggggttgggaaggttccttaaaaaacccccctggttttgttta

SEQ ID NO: 589398 - DNA, 564 bp, Homo sapiens
  misc_feature (375)..(375): n is a, c, g, or t
ggctgcgtgactgaggccagagggcccgtggagaaccactggagaggccagtgactgcacgagaacgccaggcaacttactaactctagtcaggcggctcagaatctggccacttccacatcggcgctgcaaggaaacacaaggctcagttggaggcagcatggggtctgaggactcgggggtgcagaggaggggggaccacgggcgagctgccaggagacctagaaccctggagcactcggagtcggcacacagctggggctctggctctccctggacggcgcctgcggagcctgcctcacttgcgggcctggagggagccaggagcctgcctcagctgcagacggccccccgcagagcccgggcagagtgagngactgtcactggggccagcaccgtgtgcaagcccaggttatctagcaggcgactgagtgccgagaaaatacctggcagaggtgggcacaaggcggggcccccacggcaaagacgcacgccgggaaccggaaggaggtccatacccaactcgtgcaataaataaaacttttattcaaacaagtaactgca

SEQ ID NO: 589399 - DNA, 567 bp, Homo sapiens
tcgcgcagcttcagccttgctcccctcccaaagtggcctccccggagcggagcgcacctagggtcctcttccgtccccccagccagctaccgttcagaccagcagcctcggggggcaccccccggcagctgcactccctcccgtcagccctgcagggtccccaggcatgactctcttccgatcctgggagactctccactcctcgcatcatcttgctactgctcacaatctggcagtcccgctcgtgcgccggaatttcagggaagagccacgtccatgtttgctgtggtgttcacgtgaccgatatctggacctcttcaccaagctacatctcactcctacaacacgtgtatgaaggtggtctacatagcctgctccttcccacacggactggttgcttaatagcacgtaccagagctagttacagatgggaacacatgacgcgtcacgagtggagatccttgatacgaccccaaaacgccaattcctgggagtgtcttggtcaaatcaatgagtacaccccctctggaagataccttctggacctttctacacatacttaactgg

SEQ ID NO: 589400 - DNA, 833 bp, Homo sapiens
  misc_feature (644)..(644): n is a, c, g, or t
cccccaaggttcaggagcatttttctacctaatcttccagaatttgttgccgaaaatcaacaacagaaaggcagtgaaagaagacagatccatgatctgcctgtggcctggctgcccgtgggccaggatgcctgctgtgaccaccagggagacacagggaccaacgtcctttgtgaaggatgcaggcactggctttgcagagccgccctcctagcaacttggggatggaagggtggtgggaagcaggacccgcccagacacaggtgtaggcgattggaaggtgtgggcaagggccccctatgagggcagagggcctgctcctggacaccctggcacatcccaaatatacaccaggcaccaggggagtggcccactcaacccgtgaggaaatggactcagacccggactccagagtcccactggaattggacccataatggccctgtggtccccggagtgagcgtcagctcaaacctggacccagcagccctccaggtctgcagatccacactagggatggagccagtgtcttgggtccacgttgtggggcttgggggacagaaagggcaaggtcagactaacagcacagccaggagcctgcctcagctgcagacggccccccgcagagcccgggcagagtgagngactgtcactggggccagcaccgtgtgcaagcccaggttatctagcaggcgactgagtgccgagaaaatacctggcagaggtgggcacaaggcggggcccccacggcaaagacgcacgccgggaaccggaaggaggtccatacccaactcgtgcaataaataaaacttttattcaaacaagtaactgca

SEQ ID NO: 589401 - DNA, 139 bp, Homo sapiens
cgtatttctccatcgtcgggcgcaccagacaccagtggcgtcatggtgggcattggccagaaggactcctacgtgtggcgacgaggcccagagcaatgcgtggcatactgaccctgaatgtacccccattgatgcatgg

SEQ ID NO: 589402 - DNA, 82 bp, Homo sapiens
tcataagaaaactcatcatgcagtaaggaaatcccatgaatgcagtgaatgtgggaaggttttatcctccaaaaaaaacttt

SEQ ID NO: 589403 - DNA, 157 bp, Homo sapiens
tatattccttgccctcatagaattcatagtttagagagcaaaactcatagtattataataccacagccatcatcatcaatattctactccactgtattccccccttttctctatgccgggtcactattcttagtgctttcctatctaagtattctgg

SEQ ID NO: 589404 - DNA, 215 bp, Homo sapiens
ttatacctggaaacgggaaggagacgctgcagcgcgcggacccccaaagagacacgtgacccaccaacccgtctctgacatgagtgcctcctgagtgtgcttgtgccctggtgcttctaccctgcgtgagatcacacttgaccttgcagcgtggatggctgaggaccacaactcagtggcactgacgcttgttggagaccagacccacgcaggag

SEQ ID NO: 589405 - DNA, 494 bp, Homo sapiens
catgcctcttttcttcatgagtcagttcttgcaacagctgtttttgtataaattgtacatttcatctacggttacccaactttgttggtgttcagtagtgcatagtgattctcatactaatccttgtcatttctgttacaatcagtaatagtctcttcaggttttgattctagtaatttgaccagttttttcgtggtcaatctagctaaagtttggtctattttgctgacttctgcaaagatgtgatgtctttagtaaatgctctctgattttctctaatgtttgtactctttcatctccactctaatctttattttttccatccttctgctagcattgcatttagtttgctcttctttttttctagtaccttaacatgtacagataggttattgatttaatatctttctcttcttcaatatatgtacttacatccataaatttccaacttcataatgctttcatgtcatcccgtaagttttagtacattatgt

SEQ ID NO: 589406 - DNA, 117 bp, Homo sapiens
gataaacttatgcaaggcgtgtgagatgtcccccatgctgtaaatgcaggtctcttggtatttattgagctttgtgagtgactggtggaagcaggacacctggaactgcggcaaagt

SEQ ID NO: 589407 - DNA, 645 bp, Homo sapiens
  misc_feature (5)..(5): n is a, c, g, or t
  misc_feature (134)..(134): n is a, c, g, or t
  misc_feature (141)..(141): n is a, c, g, or t
  misc_feature (158)..(158): n is a, c, g, or t
  misc_feature (161)..(161): n is a, c, g, or t
  misc_feature (163)..(163): n is a, c, g, or t
  misc_feature (165)..(165): n is a, c, g, or t
  misc_feature (167)..(167): n is a, c, g, or t
  misc_feature (179)..(179): n is a, c, g, or t
  misc_feature (186)..(186): n is a, c, g, or t
  misc_feature (190)..(191): n is a, c, g, or t
  misc_feature (194)..(194): n is a, c, g, or t
  misc_feature (230)..(231): n is a, c, g, or t
  misc_feature (238)..(238): n is a, c, g, or t
  misc_feature (241)..(241): n is a, c, g, or t
  misc_feature (264)..(264): n is a, c, g, or t
  misc_feature (289)..(289): n is a, c, g, or t
  misc_feature (308)..(308): n is a, c, g, or t
  misc_feature (350)..(350): n is a, c, g, or t
  misc_feature (352)..(352): n is a, c, g, or t
  misc_feature (372)..(372): n is a, c, g, or t
  misc_feature (408)..(408): n is a, c, g, or t
  misc_feature (428)..(429): n is a, c, g, or t
  misc_feature (461)..(461): n is a, c, g, or t
  misc_feature (465)..(465): n is a, c, g, or t
  misc_feature (471)..(471): n is a, c, g, or t
  misc_feature (482)..(482): n is a, c, g, or t
  misc_feature (486)..(486): n is a, c, g, or t
  misc_feature (494)..(494): n is a, c, g, or t
  misc_feature (500)..(500): n is a, c, g, or t
  misc_feature (502)..(502): n is a, c, g, or t
  misc_feature (507)..(507): n is a, c, g, or t
  misc_feature (511)..(511): n is a, c, g, or t
  misc_feature (516)..(516): n is a, c, g, or t
  misc_feature (518)..(518): n is a, c, g, or t
  misc_feature (523)..(523): n is a, c, g, or t
  misc_feature (527)..(527): n is a, c, g, or t
  misc_feature (531)..(531): n is a, c, g, or t
  misc_feature (552)..(552): n is a, c, g, or t
  misc_feature (561)..(561): n is a, c, g, or t
  misc_feature (577)..(577): n is a, c, g, or t
  misc_feature (643)..(643): n is a, c, g, or t
cagtnatactccaaacttacaggttacttactatctgataaggaatacaagatgatagaccgagaaaggcttgaggcaaacacaactattggaaccaggttaccagtacatttaaacactattagaaccttgtnatcaganaacttacatatcacctnccntncncncgctcccccccncccttcntcgnnccnctccatcttctaactcctcaatggctatttaagtcnntcccctnccnggttaaacattaagactagggantaccgcccccccccccccccccccncccccgccccccccccccncccccccccccccccccctcccccccccccccccccccccancncccgcccccccccccccccncccctccctccccccccccccccccccccccccccncctcccccccgcctgaaganncacacctcgctcttgagtccaatcccactctntctncaagcnttatcaaaagncgtntacctggncattcncnggatngtangcatnangaagntagntagngagaaagggaatagggacggnatacaagancatccaacaacccatncaatatgaatgttgttcgcgatagtacaaagatagtacaattgaaaagcaagctgaagttaatgantt

SEQ ID NO: 589408 - DNA, 193 bp, Homo sapiens
acacctacctgagtctgggcaacagagcatgaccctgtctcatttgagagaaaaaaagaaaaaaaaaaaaggccggcgcagtggctcacacctgtaatcccacactttgggaggccgaggagggtggatcacctgaggttgggagtttgaaaccagcctgaccaacttggagaaaaccttgttctctactttt

SEQ ID NO: 589409 - DNA, 191 bp, Homo sapiens
ctgctcggcccagacaagctttctggattcaagatgtaccccattgactttgagaaggatgatgacagcaactttcatatggattgggggggggttgtatccaaccttcgggccaaaaactatgacattccttctgcagaccggatcatgagcaagttgatcgcaaggaagatcgtcccagccattgccac

SEQ ID NO: 589410 - DNA, 439 bp, Homo sapiens
  misc_feature (51)..(51): n is a, c, g, or t
gatgatatgctaaacaaggagtggatttttcatgcctcctctttttgaccnatatagggtaacttcttgatgttgccgtggcatttgtaaactgtcatggtgctggtaggagtgtagcagggaggatgatgggaggtcagtcttgtctctattttggttttggtgggttttggccagctccttcactgcaacctgttttatcagcaaggtctttatgactggtattttgtgctgaccttctatgtcatcctgtgacttagaatgccttaaccatcagggaatgcagcccagtagtttcagcctcatttttcccggctcctatttaagatggagttgctctggttcacacacctctgacatgatcgttgcccactgcggcttccacctcccgggttcaggagaatgggatgagcccgggaggcgaagcttgcagtgggcc

SEQ ID NO: 589411 - DNA, 302 bp, Homo sapiens
tatccagctaagcatttaacacccttatcctttattatagatctctgccaagtagttccttcagcctcaccttgagagaagaccctccatgtcttgcatggtattttccacaaggtcttcattgcctctgttgcatcccctttctctgacatcgtctctgtatctctttctgcttctgctccaacctatctgacccccttgttgaattttttttccgtaaagcatgctcctgcctcagggcctctgcacttgctttttcttctgcctggaatgctcttcccccatatggacacgaatgttca

SEQ ID NO: 589412 - DNA, 795 bp, Homo sapiens
  misc_feature (2)..(2): n is a, c, g, or t
  misc_feature (13)..(13): n is a, c, g, or t
  misc_feature (51)..(51): n is a, c, g, or t
  misc_feature (110)..(110): n is a, c, g, or t
  misc_feature (125)..(125): n is a, c, g, or t
  misc_feature (171)..(171): n is a, c, g, or t
  misc_feature (257)..(257): n is a, c, g, or t
  misc_feature (289)..(289): n is a, c, g, or t
  misc_feature (293)..(293): n is a, c, g, or t
  misc_feature (314)..(314): n is a, c, g, or t
  misc_feature (316)..(316): n is a, c, g, or t
  misc_feature (332)..(332): n is a, c, g, or t
  misc_feature (338)..(338): n is a, c, g, or t
  misc_feature (344)..(344): n is a, c, g, or t
  misc_feature (346)..(346): n is a, c, g, or t
  misc_feature (350)..(351): n is a, c, g, or t
  misc_feature (358)..(358): n is a, c, g, or t
  misc_feature (370)..(371): n is a, c, g, or t
  misc_feature (379)..(380): n is a, c, g, or t
  misc_feature (393)..(394): n is a, c, g, or t
  misc_feature (396)..(396): n is a, c, g, or t
  misc_feature (407)..(407): n is a, c, g, or t
  misc_feature (411)..(411): n is a, c, g, or t
  misc_feature (414)..(414): n is a, c, g, or t
  misc_feature (423)..(424): n is a, c, g, or t
  misc_feature (777)..(777): n is a, c, g, or t
gnatggctgaggntcctgtagaccacaactaggggcattttctgggcacanaggtaaggcatgcctgggggctggaggaggctggaggaggatgcccaagctccccacantcctcaccccagacnggggaagctggatatcctccgtgttgtcctctccccatagctggtntgaggctgtggtttacacgcaggcacaggtaggcgattctgagcatcaacgcagatggaggggagggtgagccgtcgtgggagaantggcccaagaccagcacctggctggtgtcgcnagcnccggctgcattggtgggtgangnaggtctggctggagtntgggtntgaagncntggnnggggaangttgtgggggannaaggagcnntgggtgtgaacannantgtggaggaanaagnaantagtggtgnnaatgggaaaaaaggataaaggaataaggatgtaaaaaatgagtgagttttggagtataaaaaaaaataggggaaagtgggtgagaagtggaaagtggtaaaaaaggaagtgaaatttaaaagggggaaaaatgggaatttataaatggaattaaaaggaagaaaaggggaaaaaagaggaagtggggaagatggagttattgggatggaagggaatggtggaagaattattggaattaatgaagggaatggattgatgggataaggtaaaagtgttatgaggtaaaaaaaagaaataagaatagaaaataagtaaaacaaaaaggatagaaaataaataataaaaaaggatanaaaataaataaaaaaaaa

SEQ ID NO: 589413 - DNA, 756 bp, Homo sapiens
ttcgtcaaccacgccgtcgcccacgcgtgggccacgccaggcctcctccctgaggctgcagccccaggcacgtggggggcactgtcctcacgcagcaggcactggtcatgttccattgtcagctgcctccacctgcacagactcctgtctgtggagaccagaagcttccagaaccatctgttggtgctgctggtggctgtggcccatagtgttctggaaccacctgccctggtcccaaatgtgcagtgtgagatgtgcacacactcagggccccgtgacctggaagccgcagtcgtgtccccagcaccttgggaatgagcctgtcctctgtgtgaaggagggggtggttctcaaaccactgactcttggtgctcaggaggggcctgctgctgtcctgggcatggggtggtcattgttcaagactgaggcagactcagtctttgaaagggtgcagaggccaggcgcggtggctcacgcctgtaattccagcactttgggaggccaaggtggacagatcatgaggtcaggagttcgagaccagcctggccaatacggtgaaaccgcatctctactaaaaaataacaaaaattagtcgggcatggtgatgtgtgcttgtagtcccagctactcaggaggctgaggcagaagaatcacctgaatctgggaagcagaggttgcagtgaaccaagatcgcacgactgtacaccagcctgggcgacagagtgagactccgtctcaaaaaaacaaaccaaaaag

SEQ ID NO: 589414 - DNA, 258 bp, Homo sapiens
cccaaccccccccccccctttggtaatttttttaaaacaaattttccttgcagccaaaaaacccttttttttaggaaccttccggttaaaaggaccccatttcttgtttactttcttaaacaaaattttgactttttccacccccacgggggaataaaataaaaaggcccccaaactttttccacccccacaaggatataaaataaaaaggcccccaaaactgttttgattttaaaaaaggccattttaaaattttta

SEQ ID NO: 589415 - DNA, 982 bp, Homo sapiens
gcggcaatgctgcaactgcgggactcggtggactcggccggtacgagccccacggcggtgctggcggccggcgaggaggtgggggcaggcggcggcccgggcggggggcggccgggggcggggacgccgctgcgccagacactctggcctctcagcatccacgaccccacgcgcctgcgcccggctgtcaagggagtacttctgttgttcctggcccgggaagcatcgagcagtgcagtggaggagatcctgctgtggttggttgcggccctgttggaggactggctgagatccgagtgacgtgtggctgcttaccgaggtggatcacctggaacaatgagaaggacgcggctggtgctggtcacggagcaagtccctgcttatctgtaaactacgacttcatcagtctccagtgccagcaggttggtgcggatagcgctcaacgcagtagacaccatttcctacggagaattccatgtttccccctaaatcgctcaacaagcgagaaggttagggattcgaatccagtgggacaagcaaagtcgtacattccttcataaccagatggaatccctggtctaccaagtgccctatgccactttcacagaacacccgatggctggcgcagatgagcacgacagcatctctgtgtcaggttggaaagcttcaagggtctgttaatccaagctgtcaaaacaagccaagaagaaggcctttgccaggaccaggcgaatggcgtgctgatccttggagagccccagtgtcatcgagacctacgtgggactcatgtcctttcattaccacgaggtcgaactgggctactccattaccaggggcacaataggctttaagccgctggttctggggggctactccccttcccaaaaggcacggatgtggggctggagaactggacgcctgcaagcatcatgctgcctgtgacgtgacgagtggatctacatggggactagaaacaagatct

SEQ ID NO: 589416 - DNA, 946 bp, Homo sapiens
gaccctggcgcgtgtgaccctgtacacgtatcctgaaagactggagggtccttcaatgctctcatcgctggctcagtacagcggggctcaggtccgcgctggtcgtcctggatcagcccatgttccagttttggtcgcaaagccgagatcgcgagctgcgcatggatatttctccgcaaatttcctgccaggcaaggtcccagcatctgagggtgtatgatggattctgtgtgtaagagagcaaacgccgttgcctactatgtagagcaactgaggagcgtgcgggggaagatactactcagatggcatgcatgccacaggtggctgcagtgtgcgctgaggcttcagctcgattgcctgatatcgtgccctccaagtactagtaccctggggtgttactccagactatgggcactctaatgcagcacataacagaatcatggccagcttgagaatactgcaaagggagggaacgttgaaggcggaatttctgggggctgtctggatgcgttagcttcgaaggaacagagtgcacttgtgtcttgggtgtgcgcgatacagaaggtgacatttgagcatggacatcagctagatcttgtctagtcacccatggttagtgagctctactaaggcatggttctagaggccttctattccctgccatggcctttgcccaaataccaaatgcgctgagttcctcagcctgcattaactcagtccccagtttccgaggctagtcttgtggcagaagtgagaacttgtggtgagacagattggccccagtttgatggctaacaacagtttgccgaaaacccaagctaaggacggacacacgcaccggacaagaggaagggtccacggtgaagagaagcaagaaaccccaggctgagcgggaaggagacgaatggggggttgccctggtcctgaggaggagatgatgcctgtg

SEQ ID NO: 589417 - DNA, 394 bp, Homo sapiens
  misc_feature (392)..(392): n is a, c, g, or t
gcctagtatttttcagtattaagactgatttaattcccatttccagaagagaaatatacatatacacaggactagcctaaaggcacagtttaaaaatacccagcccaaggcccgggtgtggtggctcacaccccataatctcagcacttgggaggccgaggtgagcagatcacctgaggtcaggtgttcgagaccagtttggcccaacgtggtgaaaccccatctctattgaaaatttaaaaattagccaggtgtggtagcagtcacctgtaatcccagctactcaggaggctgaggcaggagaattgcttgaaccagaaggctgaggttgcagtgagccgagattgcaccattgcactctagcctaagagacagagtgagactccatctantt

SEQ ID NO: 589418 - DNA, 323 bp, Homo sapiens
ccccccccccccccccccgggggggggggtttttttgggggggtaaatttttttttttcggggggggggggggccccccccccctggggggttttaaaaaaaaggggaacccgagggtttccccccccggggggggtttttcccgggtttttttttttcccgggggccccccccggggggatttttaaaaagggggggtgtgggtgcccccccttttccccccccctttttttgggggggtttttgttttttttttttcccccccccccccccccctcccccccctttttgggggggggggggttttttttggggggggggga

SEQ ID NO: 589419 - DNA, 849 bp, Homo sapiens
  misc_feature (19)..(19): n is a, c, g, or t
taggctagtacgaggcggnggtgaatcggccgaggtgccctgtagtccagctactcgggaggctgaggcagaatgcttgaaccccagaggcagaagttgcagtgagcagagatcacaccactgcactccagcctgggtgacagagcaagactctgtctcaaaaaaaaaaaaaacaaaaaaaacaaaaaaaatttcttcatgtaaattttaccgggcttgaaaagggcccacactcgggattacggacggttcttcaaatagtatggggctggggcacggggggctcatggcctggtaatcccggcacttggggaagccagggcaggcaaatcagtggaggtcaggagttcgggaccagcctgggccaacatgggtgaaaccccgtttttactggaaaatggcaggataacgctggggttgtgatgggcaggcgcctggtgggtcccatctacttaggaggctgaggcaggagaatcacttgagttgtgggagcgcggagggtgcagtgagccgagattggagccacaagcactctaggctggggcaacagacaggactccgtctcaaaaaaataatttaaaaaatttagggccaggcacgggggctcaatgcctggtaatcccagcacttgtgggaagctgaggcgggttggatcacctgaggtggggagtttgaggcagtctgacaaaggagaaaccccatctctactaaaaataaaaaactagcggggtgggtggtcgcatgcctgtaatcccagtactcgaaaggtgaagaggaagaatgttgacccgggagcggaggttgggtggagcggaaagcattgctcagtgggaaagagtgaatcttctc

SEQ ID NO: 589420 - DNA, 297 bp, Homo sapiens
ggtgaatatttagcttcacaagctacacctccattcatttctgccattcctgaacagcaaaaccaaggattttgatgcaaattctccctgctggaacatattccctgatcctctcaacaagctcacctctctaagctgctcagctccataacctgctcatgagttctttatctttccttatttagaaaacgtaattaggtaaaattaacagcaggacatatagggttaattcacagcctttggacagcatttaggtacagccatttaggaacagccatttaggtaacagccatttag

SEQ ID NO: 589421 - DNA, 123 bp, Homo sapiens
acggtctatgaagtggatccccctaccccacttaatgcgtgggatatgatttgtcaaagaatgcttcatgcccaaaataccagcctgtatagcagtgttacactgtatgatctgcggcgcacg

SEQ ID NO: 589422 - DNA, 864 bp, Homo sapiens
  misc_feature (453)..(453): n is a, c, g, or t
ggtttggtgcacgtgggcctcgcctcccggtgtggtgtttgagatggacgcgttccgggttttgttcccccgtcctcaatcttccgtgtgctttggtgtcgagcccacagatcgtcttgcttgtagggcttatggtaaacccgtgggtcttttcccccgagggcgcccggctttgtgtgcaaaggttcctcgcgggttgtcccctggatgccggcggccaagcctctttagggagctgaatgtcttctccagcgaaaagatgtgagcgacagctcgtggtccaccttgttgcgccagccacccacgctgctgcttctggggagactggcagttcgcgttcctccgtccggccgtagagagtttggtgtcttcctcacccggggagttcttgcctgaggtcaccaagaagttacaatcgttgtgcggtgagagattgctatctgcgcgaatggngtctctatatagctggccccttcgcctaagagtgaaaagatagttcaggttgtatatatacccggccccccgttggggctatccctccgctcgaggatcgctcgctgccccccttggggggggcccacagggcggggggtgctccagaggcccaagagtttggagcccgcagcgccgcgagtaagacgacggtcgaaacctcctcgtctctgatcatacacccaaaatgtagtccgccggggtgcgggtcgggcacaccgtcatgggcccacacgcgactacagagcggggaggccggaaagagaggtgggggaacccgggcagccaagactgataaacggacagacattggggccgcataatgcccacggggggaaactcaggggggccccctcgtttctaacaagacag

SEQ ID NO: 589423 - DNA, 217 bp, Homo sapiens
ccaccaagtttgaacatcattcagcaagcacatagaagattcacaacagagaaattagttcaatgcaaatgaaactgctggacaatgaacgctttggaaaatcataatagtcagattcaattgagatgcagtagcccacaaagcattcttgtacaaggagctcacagagttattgcagaacatcagacaacccagcaacagatgaaaacaagccaaa

SEQ ID NO: 589424 - DNA, 386 bp, Homo sapiens
gaaaaggggcatggagacaaactggatgctagttcttctatacagataaacacatggagttcagactagttacacgtcacttctaaagcaagcacgaacgagggacacgagagcaaacctgtacattcactagcgaatttgcagtcatttcagatttccactaggtaagaaaatacaattttgcgttagtttttccgtgctcgggtgtatgaaaaaaaaacccagccgacatgcagcaacgtctccagcgcttaggtccgtaaaaatgttctaagcacagaagtacatgtggaagaattctctcatcattttttgtaaaacaaagcgttctaatattttacagaacaagataggacagttttttttttcttttaaagaagttgaac

SEQ ID NO: 589425 - DNA, 952 bp, Homo sapiens
aagtcgtgctttaagttgtctcccacgaatggttgtctgggaacacaccatttggggcgagacgcgttttatgacacccgctgccttccttgcccaagctgcgtgcaacttgtgttccacccaggccgcaatattcctctgttcccgggggacacctaattaccaccgccccgcgtaaaaaaaccctatttcgcagggggggactcgaagaccccctttatgcgtgtgttgtcgccgcgtgactctccaggcaccaggttcttacacgcccccaaatgggccccccttctctttcacgggggaccattccccacgaatgagtgtgtattgaggacaacctttccgggcaaacccggcgaagtacctttgagttcatggtgattaaacacattcgatcccccgggccttccattccaatttcgggctaccactcccccgggccgtcttaagtcgcaagcggtcttatcctctcttctgcgttttggattaattccggccaaggttttgtcgccgccccgaatggtgcgaaccccggtgtgtggtcttcctcctctctgacgtcccgcactcgtctttgttgttcactccctcgattgctccagattgctcctcccctgggggacatcgtacgatccctccctcccccctgggggggaacccccacacaggaaatctgcttataacaccggtcacataaaacaataacttatctttattaagtcatcttaatataccaaacaaaataatcataatagattatctcactattagtgccacacagtgcctgccagaagacgtcttcattctccgtatgcaataagacacgcaaagagcaccctccagttctcagaaactctctcctaccgaccttcttcactgatgtatcgaagtgtaccttcgacctccacgatctccaaataccctttgctttctcaaccgccccacatgacaa

SEQ ID NO: 589426 - DNA, 430 bp, Homo sapiens
cccctcagcacagatgtagagttatagtactagagaggatccgtgatcgctttaagcctgtcctcgagctcaataggcaagcctgttatgccttcatactctgcgtccggtactccatggtttatggatgcaatgctgcctataatctctacttcaggaagctacgaggggcctaatcagattgagggaaggaacggtatgtcttttcttctggaggccggcacctggttctgtatccccctggagcagcctttttgaaatacctaggcttataaacaatgcttctcttcctggatagttctcttgtctggctgctcccctttttaccgcccccagattgataagtaatgaaagtgcgtggcagtgagggtcaaaggacagtctacatatgtgattgttccataataaacttctggtgtgagtctttcta

SEQ ID NO: 589427 - DNA, 772 bp, Homo sapiens
accataggaagacataaaactttaaaaggcaactcaatagatgatggaaacgcacttacaagtggtgaccaaaatttttaggtgaagtcgagcactctaattagagaactggaggaacctacatataacacttaacttcccctaccctgcccctccccaatgagaataccatgacaaacctagcttttaaaaaatattttaagaaagagaatgaactgtggaatttattggcaggcaatggaatgtgtccaatgacacatgctgaggttctgaatacataagtgaagcttttgtacatttgaattgggtcccgcttatgttcttgaatctgttactgaaacattcctatatctgtttgtactatttgcaaacccctttgtagttataaattgtctgactagttcttcccttgttaatagatacactaccagttgagagactcagcatgatcaacaagatagagcgactgttggcatcttaataggtaaccgtgagttgattcagtatcttgagagtttacagtttgtgttgtctaacaaaaagttgaaaggttctagttatataagtgcaacatttctgtatactgtacacagtctataataactgacactgtcagtggtcgagatctctctgtgtgttatacttccagggtaatacttgacacgtattcagaatcttacaatcatccatttgatatccgatcacaattaccgataaaaatcccttccaaccctttcgttgcctcaggacgcccataaagctttttttcacc

SEQ ID NO: 589428 - DNA, 568 bp, Homo sapiens
gaggtccagggttcaagacatcctggccaacatggtgacatcccatctctactaaaaatacaataagttagctgggtttggtgttgggtgcctgtaatcccagctactcgagaggctgaggcaggataatcgctcgaacctgggaggaggaggtggcagtgagctgagatcgtgccattgcactccagcgtgggcaacaagagtgaaacgtcgtctcaaaaaataaaaaaaaagtccgggctcgatggctcacacctgtagtcccagcactttgggaggccaagacgggtggatcacgaggtcaggagttcaagaccagcctggcctagatggtgaaaccctgtctctactaaaactacaaatattagctgggcatggtggcatgcacctgtaatctcagctactcagaagtctgatgcaggagaattgctaaaacccaggagggagaggttgcagtgagccgagattgcaccactgcactctagcccgggcgacagagcaagactccgtctcgaaagaaagaaagaaaggaaattccccaggcaagtacctcggctgatttcataaa

SEQ ID NO: 589429 - DNA, 351 bp, Homo sapiens
tgtgttgggacgcctcatccctgcacccaggggccctggcattgtttccgcccctgtgcctaaaaaactgctcatgatgggtgggatcgatgactgctacccctcagcccgggggtgccctgcccccctgggcaactttgccaaggcccccttttatgccctttttaagacctacagctacctggcccccgacctttggaaggaggctgtattcccccagtctccctatccggggttccctggccccctcgtccagaccccccccagagtttccgtgcagcgggctcagggtcccgctgtgggtaccacatagggttttttttccagaaaaataaagtgaatttagggtga

SEQ ID NO: 589430 - DNA, 143 bp, Homo sapiens
tgtgttatgtcggggctgtcgagctagtcgggactgtcgggctagtcggggatgtgggctacgtcgggcgtgtcgtggctagtcgggactgtcggctcgtcggtggctgtctgggctagtcggggctgtcgggctagtcgggg

SEQ ID NO: 589431 - DNA, 402 bp, Homo sapiens
cccgtgccttctttggcagcagtgacaaatccttgtcatatcgagatggcttttcctcctcctcttcaaacatcttttagcagcaacagcagctcaaggaactggaattatttcaaagttaaaatgcaggctttgtagaccctcttagacagacagattcaatttcaaaggaaactttctttggctgggtactcagtgagtggtacacagggatttggggaagtaaatattcaactgttcctggttgtggagaaaaggaaaagcagaagtgcttttttttattacctctccccaacgcacaatttgtttcctttcgtttcttggaatttgggaagatggaggaaacttaagtgggggacccacctagcctcctgatggatgctgggctcactttaaacctcc

SEQ ID NO: 589432 - DNA, 629 bp, Homo sapiens
  misc_feature (274)..(274): n is a, c, g, or t
tgtctctgtgtctgcatctgcgtttgtgtgtgtgcaactctctgtggtgtgtgcttgcatatgtgtgagggtatgtgtgtttctgtgcgtctgtgtgggtatatgtgtgtatgtctgtgtgtctgcgtctgtgtgcctgttggggtatctctgtgtgtccatgcgtgtgcccatctgtgcagtgagcaccttgaaataggccgcccaggaggcagagggtgcaccttgaaattgggctaggaggcggagcctgcgccttgaaataggccgcccnggaggcggggttgcaccttgaaataggctgcctgggaggcagagctcgcaccttgatatacgccgcccaggaggcagggcttgccccttgaaataggccgcctgggaggtggggttgcaccttgaaacaggccgcctgggaggcggagcttgcaccttgtaataggccgcccgggaggcggggcttgcaccttgaaataggcctagaaggtggggcttccaccttgaaataggccgcccaggaggcggagtttgcaccttgaaatagactgcccaggaggcggaggttgcagtgagccgagatcacgccactgcactccagcctgggcgacagtgagactctgtctcaaaaaaaa

SEQ ID NO: 589433 - DNA, 245 bp, Homo sapiens
  misc_feature (38)..(38): n is a, c, g, or t
  misc_feature (224)..(224): n is a, c, g, or t
cttctggttactctgaggatcccgtctaccctcggtgntgcagtgctgggatcggcgtgagccaccatgcccgcccctattttttaaatttgttgtagagacaaggtcttgctatgttgcccgggctggtcttgaactcctgtgtctctgtgtaaaactcccaaatgtgctggtgattctagtgcgtgagcctgccttgcccggcacttgcaccaatttctctngcatgcgtctccactcccacg

SEQ ID NO: 589434 - DNA, 256 bp, Homo sapiens
tgtctctgtgtctgcatctgcgtttgtgtgtgtgcaactctctgtggtgtgtgcttgcatatgtgtgagggtatgtgtgtttctgtgcgtctgtgtgggtatatgtgtgtatgtctgtgtgtctgcgtctgtgtgcctgttggggtatctctgtgtgtccatgcgtgtgcccatctgtgcatgtctgcatccgtgtgtgtgtgcctgtcgctgtatctgtatgtccatgtgtgtctgtgtgtgtccatctgtgcat

SEQ ID NO: 589435 - DNA, 412 bp, Homo sapiens
gaaaaaaaaaaaaagaaaaagaaaaaaagaaaaaaagaaaaaagaaaagaaaaaaaagaaaaaaaaaaaaaaagaaaagagaaaaagaaaaaaaaaaaaaaaaaaaaaaaaagaaagaaaaaaaaaagaaaaagagaaaaaagaaaaaaaaaaaagaaaaaaaaagagaaagaaaaaaaaaaaagaaaaaaaaaaaaaaaaaagaaaaagaaaaagagaaaagaaaaaaaagaaagaagaaaaagaaaaaaaaaagaaaaaaaaaagaaaagaaaaaagaaaaaaaagaaaaaagagaaaaaagaaaaataacaaaataacaaggctctaacacactggggaactaactctctatctactactactatatctactaacactactatataaatatatctctctatatactata

SEQ ID NO: 589436 - DNA, 345 bp, Homo sapiens
cacgagggtgaccaggactcctcgtcggtgagtgaccccgagggacccattgctgcacaaagtgctgtccttcgtcagggatgaccccgactttgagagcgagggatcaggacacacagctgagggcggatgactttcccgtgctagatgacccctccgatgtgactgacgaggatgaaggccctgccgagccgcccctagcccccaagatcactcgccccgccttcatactgaataatgactcggacctcttcgggctggagctggaggaggccggacccatagacagcactgaggaacgtaacgagggaaaaaccccctctaaggacaatacgaatactaccc

SEQ ID NO: 589437 - DNA, 797 bp, Homo sapiens
  misc_feature (32)..(32): n is a, c, g, or t
  misc_feature (71)..(71): n is a, c, g, or t
  misc_feature (80)..(80): n is a, c, g, or t
  misc_feature (144)..(144): n is a, c, g, or t
  misc_feature (165)..(165): n is a, c, g, or t
  misc_feature (173)..(173): n is a, c, g, or t
  misc_feature (204)..(204): n is a, c, g, or t
  misc_feature (214)..(214): n is a, c, g, or t
  misc_feature (260)..(260): n is a, c, g, or t
  misc_feature (283)..(283): n is a, c, g, or t
  misc_feature (288)..(289): n is a, c, g, or t
  misc_feature (310)..(310): n is a, c, g, or t
  misc_feature (315)..(315): n is a, c, g, or t
  misc_feature (367)..(367): n is a, c, g, or t
  misc_feature (370)..(370): n is a, c, g, or t
  misc_feature (385)..(385): n is a, c, g, or t
  misc_feature (398)..(398): n is a, c, g, or t
  misc_feature (418)..(418): n is a, c, g, or t
  misc_feature (442)..(442): n is a, c, g, or t
  misc_feature (460)..(460): n is a, c, g, or t
  misc_feature (464)..(464): n is a, c, g, or t
  misc_feature (482)..(482): n is a, c, g, or t
  misc_feature (488)..(488): n is a, c, g, or t
  misc_feature (494)..(494): n is a, c, g, or t
  misc_feature (506)..(507): n is a, c, g, or t
  misc_feature (549)..(549): n is a, c, g, or t
  misc_feature (776)..(776): n is a, c, g, or t
gtagtttggtaccgtcgtggggcatggttggnttcttctcggggtttagctggacggctggctgtgcggtnatattttcnaaaacctgtttgttttatacaaaagaatataccctaacacggtagggtctcataatgccttggngggccccaatttggtgctttnggattttnatgttttgttaacaaattttcaaactcgggngggtttaggnatgtcttcatattgggttccttcaactctgcgtccttttaaggggncggtttcaatggcggtagtggcnggganngtcttctcattggtgggttcnggggngccttcatttcctctgtggcctccatttaggactggggttctttttcctggngcngggattactgtctcngaatgggtctggncaggtttcggcttgtctccnggatcaatcatcttcacaacagcngtgtatttgtcaattacntccntaacaatagcctttttcntatggnatttcnctcccggtttcnngggtatgattttcacaataatttcaggcggggccagtggtcnggtcgggcagttcttttcttttcctcttcaatctccatgatttcatccagtgcagatttctttttcttcttttctttagactgagttgagctctgggaagattcttttcgtttcactgatgctgaactttcctatcgtcttcagtgcactcggtcccagagtacttgacttggaagatgttgctccggatgagctacatgctcctttactcaaattaaacgtgactntctcttcatcattttctctgc

SEQ ID NO: 589438 - DNA, 619 bp, Homo sapiens
tacgtaagaaactataatttcagagggcctcatagatggttcggctgataccacactaccattcaatttttagatagctaacttagtctcaagatctattttccctctctcaaggttgacatcatacgtgagtctaacgcgttatctagtagctactgtccagtcacatcattaacaccctcacagagcttgatgtcttccaagctctagggcacacgtcacaaatctgtttcatctcatagaagcaagcatccaatctcgtgtcaagcggtgccctctaagggtcatggtaagtcatgacaggccttgcagggtcagcattacttcttccagttaatcaaacagtaatggcgtgacagattgtgttcaacccagcaaagtcctcagcgacaccaaatgaagtggatgccatgtgtaccataatatctggcccatctgtcgaatcaccaatacacttgataacacctacgcgccaaacaaatcgtgcctatcaaacaggctgtcttgtgccgccaggatctatctggtaaagacatttcgcctgcatgtgacatggctagcacacccctccctttggttctcgcataacaggtaactctgtgtcacctgttttcagtta

SEQ ID NO: 589439 - DNA, 666 bp, Homo sapiens
agcggaggcggggcttcccgcgtccccaagctccagatcctggggtggctgccacgtctccctgccacgcgcctggggggacgggaagacgggacggagatgttagtggtgggcgccccccgagggttcaccactgtttcctgagaaacttccccagtgcctcatcgcacgcgtactccgtgtgcccgagggccggtcctgggctaggctccagtgcctcagcccgagaacgggtccccagcgccttccagagagacagctcccggacgcggaatgccagggcagcaggcccaggcggcgggctgcgacggagaagctgagaaaggagaagacacgaggggacggggcgagcgaggagctggcggaagcagggccacagcaggatagcggccgaggcccaaaagggcaacgagacagggacggagggtgggaaggccaaaatagcgcgcttcggacaactggaacagaggccgggaggttctaaccagggaaacggtccttgcaattagcacagttgccccctaggagaggcaagggggccaggggacacagaagcgccaggcggtggcaggacgggaggacaggaaagtccagacaacgcaaacacccgggcgcacatgcttggagaggcgacagcgaagagctcggacatctgggatactgccc

SEQ ID NO: 589440 - DNA, 88 bp, Homo sapiens
ggatttgctggtgcagtacaactaggcttaatagggacatgtcaattcaagcttctaacgttagaagcttgaattcgagcagtagtag

SEQ ID NO: 589441 - DNA, 213 bp, Homo sapiens
cactgcaggcagttgttggcagcttcaggttggaattctcaggagaaacattatgaattcacataatatgtacactttggggctctcaaatctagttatatgagttttttaacttttccaataccttgcgttgaacaacccacggaaataaggctgcgaaaaaatactactaccctatcctcaacataaagtggaattaaggatgaattcccg

SEQ ID NO: 589442 - DNA, 251 bp, Homo sapiens
gtacccagttgcggtacagacaggatagtttcactggcctgaaaatcatctgtgctccacgtgttcatcccctctgtctcccccagatcctgggaaaccactgtcttcttcatgtctccatagtcttgcctatgccagaatatcatagttggaatcacacagtatgcagccttttgggattggcttgtttcacagtgcagtatgcatttaaggcccctccatgtctttctgtggcgcaactggtacggcgg

SEQ ID NO: 589443 - DNA, 81 bp, Homo sapiens
tctcaacgtcagactccttggcagctgtatctggagtctggatgtgctctctaaagaccttaataaaatttgtacaaagac

SEQ ID NO: 589444 - DNA, 446 bp, Homo sapiens
  misc_feature (8)..(8): n is a, c, g, or t
  misc_feature (14)..(14): n is a, c, g, or t
  misc_feature (65)..(65): n is a, c, g, or t
  misc_feature (117)..(117): n is a, c, g, or t
  misc_feature (124)..(125): n is a, c, g, or t
  misc_feature (335)..(335): n is a, c, g, or t
aatatttngctggncgccgtgctcatgcctgtaatcctaacaactttggaggattgctggagacnaggagtttaagaccagtctgggcaacatggcaagaccctgtctctacaaaanaggcaannattagctgggcgtggtgcttgtgcctgtagtgccagctatctgggaggctgaggcgggaggatcacttgagttcaagctgacagtaagctatgattgcaccgctgcactccagcctgggtaacaaactaagaccccatctctctgtctcaaaaaaagtgatacttcgcaaagatgcttagactccaagaagcttttgcatctctttccancccaaccactgaggtactgtgtagcctcctccttgaataactaacctggtgagctgagattgcgccattgcaatccagcctgggcaacaagagcaaaactccatcacattt

SEQ ID NO: 589445 - DNA, 664 bp, Homo sapiens
aggatctggcacagaggattaaatgtgagacatatgttccttaaggagatgccaggctgactatacaagagtgcacgtagaacaaatatgactgttatgctgtaaggctgtctaaatcgatgaatgactcgtgcaccgataataacaccctaatcagagtgatgggtactacagcaggacttgacatgttgactatcctggcacacttgaagagactctatggatagtctctgtactcgatcatcatgggcgacacatctggagactacaagcaagtactgttaggactctgtggcggagctgatgaaagtacctatcccacaaggacaggaggatgctcaacactttgaactgtactccattcatttttatacactgctattagcattatctcagaatgctgatttacaagtcaaacgcctacagctgcctactagaatatagactggatgccttattattcacctataagtagtcattatgatgctatcaagctggactcgcgtttcaaagcttatactatctaaatggcgatttaaagctgaaatggatacgtattccatgttattaagagactacttactactatgcgtttcacagacattgaacctgataaattattgcatcattgcgtcttcatgacttttataacctgtgctggtct

SEQ ID NO: 589446 - DNA, 751 bp, Homo sapiens
tccgggggggggtttccccggggttgggtttggttttttccaaatccgaaaaaatctccttgggcccctgggggttccccccccccccgggcccttttcccccaaccccctggcctttcttctccccaacgagcaaattccttacttcgaggggaaccactatctttttaaaaacgatattagggtggtcgaagcttctcatacataccctcgtgacagaaactataagagcacgtgcttgcacattgtgctcgtggggggatgggagcttccttttacttcgtggacccccggtgtcccctccacaccaccctcgtaaacgcagggcattttatctcacgaggacgctctccaaatattaaaacccccttttccatgtgtggggcttcctccccagcttctccttctcccctctttgtacccatcctcccacatatttcggccccccgttgtcgttatgaagggatctggtccgggagctgcttcccacacaaggggggggaagaacccccgggtgtaaagaggtgggggcgccccgggggcgccccagtggtggcgccccgtggaatggcgcgacaccgggggggcgacctccgccgcgaaggatctatcggcgagaggagcgcacctcgcggcgccggtgggcttcccgcagcaccggcgaacacgtgggccgcgggccaccaaaggtccacggaagcaacccctcaggagaagcgacgagcccccgagagactacggggcggccggt

SEQ ID NO: 589447 - DNA, 861 bp, Homo sapiens
ggccgtcgctatcaccaggcgcagcggtcctggagctgtgaggagattcgggccgtaccaccctgcctcccctgcgtccctgacaccggacgtttctgtcctcgggagccattccaacaatctcgtaaaacagtggtggagttactatgaaggttctaggcgtgcagagacgatgcctcagccgaggatattcaatgaggcatatcggaaactggcgactgaagatggcgatccgaggattaagaaatcctggagatattaacgaagaatgcggagagaaaacttcaaagtcaagctaggcggaggcatactgaatggtgctgtcggatgctaaggaaaacgggagatctatgactaaattatgtgcgaaagaacggattactattgtgtggacggaggcaggtttgaaaatggtcagtgtaagaacaagtctatgaggcgaactgttggcgcttacacactcccagtaaaacacccagtagtggactgatctatcaatggagcaaagtatcagggtgaaggagacacgcggcacccgatactctcacagaatcatgcagctttctatagtaacgtaacccataaaacgcacagcaccttgtcttatacagtgtagacatccagatataggggatgagccctacggaaagagaaaagacagaggaaaaagcacacgaatagggagacaagaaggagagaatcagagatagagatatacgattcaattggatagatagagagagtggagaagtacaagaccaggaaaagtagaatctagagaaacagattgggaataatgggagttacagtagtagggaggtaacaaggggaattaataacatgtcaatatatgagaggact

SEQ ID NO: 589448 - DNA, 1070 bp, Homo sapiens
ctggtggcgcttcctgggactcgagcataatatggatcctggtgtgatccgcctctcgagcaactcagagctccaaggcgaggttcgcggcctggggcggatgctctgatcgagcgaggacggagtgcggcgcagtcgtgctccccgcgtatagatggagagtctttggcgtgtacagtacgattgccttctttagaagataaccgcttcgcaagaaaaagcgtgaatccaggagctgcaggttcagcattcaggaacaggatgtctggatggtcggcatgtggagtagcttttcccatagcactgtaggcatctagggcgtggcctgccggtgacgtacgttgactagtatgaggagtgtggctgacaaggagcctgcctgcaggaggtaagaatggtaccatacactcctgacgttagcatgactcttctctgagcggctgaccacgcaggtacacgatgacggccctgaggactcccggcaggaagccacgtgtacgtgccactgagtaccgaggagaatccggagttgcagacgctctctaccatgatagaagtggcatgcccttctaggaacctcatgtgttcccgtgtgaaccgccattatggcgtgaactggcgccagaactatgactgtttggcgagctggtcaggaactaagaacactcatgggtggatatgccggggattgagagttcaagatatgaatgaggcaatggcctcgatgactaggggagtaccgcagacccgaaggatgcgataggtaaagacaggaaagaaggtgctgttggtggttagaagcccgaccgaaagcctccggttgggaaaaaggcaagcaaggtaccaggaaaccaagcccatgaaaggaggctgcagaaaaaaacttctagggaggagaagaagctgtgcataatcttagtgggtgtcccctagggtattatatgaccgctctctgctacaaccggttactggacgagaactcttatattagcgacacacacttgtgggtcattggacacgcaccgcatatccggaccaaccttgtgtgtcggccctggggtgaggggtta

SEQ ID NO: 589449 - DNA, 136 bp, Homo sapiens
  misc_feature (38)..(38): n is a, c, g, or t
  misc_feature (106)..(106): n is a, c, g, or t
  misc_feature (126)..(126): n is a, c, g, or t
catccggcgactagcaccgggcccggaagcgccagccntacactcgccgcgcatggcctctgctccgagctcgctgcatctactcggcctcattctgcacgacgangaggggcaggcacggagganaagaacaatg

SEQ ID NO: 589450 - DNA, 244 bp, Homo sapiens
ttttttttcgagaaaaccattaccttcaggtcattgggcaatgcgacagaagtttctgcaaaccgcatcgggttttacctgcatgcgtccattccggcaaaaggtgttcatctggaccgggcacttcaaggcgaatttgtgtatcaacccaacctcgggggcagcatgtgctgacaggcgagggcatgcacgaactggcgggactggacagcatggtgattgctccctgatgcatgagagcaag

SEQ ID NO: 589451 - DNA, 196 bp, Homo sapiens
ccgagctattcgacggtgtctggattctaggcctgttagatgtaaacagaaagagtcaatgatggtgagaaagtaggtttctctcaagctggcttcctagctcatttatatatcaatatatatattttaattttattcttagctgggcatggtggcgtgcacctgtactgtagtcccagctactcaggaggctgag

SEQ ID NO: 589452 - DNA, 333 bp, Homo sapiens
  misc_feature (149)..(149): n is a, c, g, or t
  misc_feature (277)..(277): n is a, c, g, or t
ccagctactcaggaggctgaggcaggagaatcgtttgaacccaggaggtagaggttgcagtgagctgagatcacgccacttcacttcagcctgagcgacagagcgagactgtctcaaaaaaaaaaaagtgcacatgcttgtaatatttntcatataacatcatggaggtgctgtgtctgctgagcacattggtggagccctggttcagaacccaaagcttcccacttacaaagtgctgtggccagctgagaggagacaccacaggcctccagccctncccccaacagcttccctaaccagttgctacctcttatattttagacccaggggcct

SEQ ID NO: 589453 - DNA, 235 bp, Homo sapiens
ccacgaggtccaaccactgtatctatttcaaaatcaccgatgcggttacgttggtcaacgttacgccgttggaggccatgtttcaggtagttcactcaaagcgaatcaaagtttccctgatataaccaattgtagatagatctagtggctagtttaagctcatgcgcaatcacttccggtgaccagcttagacgtaaatggtttagaatggcttgctttaattttgcattcagtc

SEQ ID NO: 589454 - DNA, 163 bp, Homo sapiens
tagctgcctgctccgaaatatgctggacatagctgctgaatctgggattgttcattaggttcgaagcatgctcatgaagccaggttgttcagcaggccggcgatgtcgaagctgcccacgcctcccgtggggctgggggcctccagcagctcgccccttagtt

SEQ ID NO: 589455 - DNA, 154 bp, Homo sapiens
taggcgttagagtgaaactccgtttaaaaaaaaaaaaagatttatgaaacaattctgggttgggtcaaagaaggcaatgaaacggtccggtgaaatggttattgggatgagaagggagcggggggagcaatcatggtgggtaccggagcctcga

SEQ ID NO: 589456 - DNA, 793 bp, Homo sapiens
acatgagtcctcgactttttgcctgatctctgcactggactctgatctcactgtcgacgcgcccatcgttcacctatgtgcttgattgagtactctgctcggtggcgtcggtcgttccgagcaaacgagtgtcctggcatctggtgctcatggctcgggcatatctgctgtaagccagatctgactgtctcgctcgctcggggctcccgttctaatacacccctttctcatgtgcagctagcgctagacccgcccgctcaatgcgccaggtacgatagcggtgccttgttctcgcatattaggcataggagggtaccatcttggccggccttaccgtcgtacaacggtcgttctttagcttccttacgttgctaaacgccgactgcctgaacctccacacttgctgcccccgtaccatagtgcaaaggcccatggacggataaacgtcaagtgggtccacgaaaattccgccttgttgcctaaaccacggctcacacatgcaacacatagtgcttaaacgacggccggccaataattatcgggcacaaaactccgcgccacaactacggacgcacaccaacaccttacaggttaaatacacagatccttccctcaccgctcccccctccttcccccccgcggcaccgccgcccgctgccttgatctaaccccccctccctcccacgcacctgcccctcctccctcgacccctcctcccttcccccccccccccgcgccccccactccctcgcccctccccgcccttctcctgcgcgccccgttaccgccccgc

SEQ ID NO: 589457 - DNA, 631 bp, Homo sapiens
tctaccaggtgtctccagacaattcaacacctagcagagtgctgctcggggctgacagcataaatcaatgacatctttcagcccagagggttctgagagtgattgcattatgacagcacttcctgaggcgcccctggctcctgaggaatgagctgttcagggcatctggcaagcaggcaccagtccatgctagcacccttccttctggagagtcacccaagggagccaccgatcgctgctagaactggagcagagtcctcaaacaacagtctgcacacagacaagacccgggatatttctttgatccagctcctgccttacaggacttcatcttcacccattcctgaggaaggagagaggaaaaaaagacctctcatacaccccctcagtctagtgttaactgagcacacactgtgatctgggtaagagagaaactctgccatcttggtgctttcagacaatacacatcaaattacattatcaacgatgctggatggcgctaagagccggggagggaaagcaagggagtacaggccacagaccgtcctggacttcgagtttgacttacattttggctttgccatggtacaaacgccatacacattcagtatactcctccgcttacagattg

SEQ ID NO: 589458 - DNA, 686 bp, Homo sapiens
  misc_feature (17)..(17): n is a, c, g, or t
  misc_feature (65)..(65): n is a, c, g, or t
  misc_feature (69)..(69): n is a, c, g, or t
  misc_feature (72)..(73): n is a, c, g, or t
  misc_feature (76)..(77): n is a, c, g, or t
  misc_feature (90)..(90): n is a, c, g, or t
  misc_feature (97)..(97): n is a, c, g, or t
  misc_feature (109)..(109): n is a, c, g, or t
  misc_feature (111)..(111): n is a, c, g, or t
  misc_feature (118)..(118): n is a, c, g, or t
  misc_feature (121)..(121): n is a, c, g, or t
  misc_feature (126)..(126): n is a, c, g, or t
  misc_feature (133)..(134): n is a, c, g, or t
  misc_feature (137)..(137): n is a, c, g, or t
  misc_feature (143)..(143): n is a, c, g, or t
  misc_feature (149)..(149): n is a, c, g, or t
  misc_feature (153)..(154): n is a, c, g, or t
  misc_feature (186)..(186): n is a, c, g, or t
  misc_feature (188)..(188): n is a, c, g, or t
  misc_feature (193)..(193): n is a, c, g, or t
  misc_feature (196)..(196): n is a, c, g, or t
  misc_feature (200)..(200): n is a, c, g, or t
  misc_feature (210)..(210): n is a, c, g, or t
  misc_feature (219)..(219): n is a, c, g, or t
  misc_feature (222)..(223): n is a, c, g, or t
  misc_feature (227)..(228): n is a, c, g, or t
  misc_feature (230)..(230): n is a, c, g, or t
  misc_feature (239)..(240): n is a, c, g, or t
  misc_feature (247)..(247): n is a, c, g, or t
  misc_feature (251)..(251): n is a, c, g, or t
  misc_feature (255)..(256): n is a, c, g, or t
  misc_feature (260)..(260): n is a, c, g, or t
  misc_feature (264)..(264): n is a, c, g, or t
  misc_feature (273)..(273): n is a, c, g, or t
  misc_feature (277)..(277): n is a, c, g, or t
  misc_feature (280)..(280): n is a, c, g, or t
  misc_feature (296)..(296): n is a, c, g, or t
  misc_feature (303)..(303): n is a, c, g, or t
  misc_feature (318)..(318): n is a, c, g, or t
  misc_feature (324)..(324): n is a, c, g, or t
  misc_feature (336)..(336): n is a, c, g, or t
  misc_feature (343)..(343): n is a, c, g, or t
  misc_feature (354)..(355): n is a, c, g, or t
  misc_feature (365)..(365): n is a, c, g, or t
  misc_feature (371)..(371): n is a, c, g, or t
  misc_feature (373)..(373): n is a, c, g, or t
  misc_feature (381)..(381): n is a, c, g, or t
  misc_feature (414)..(414): n is a, c, g, or t
  misc_feature (416)..(417): n is a, c, g, or t
  misc_feature (445)..(445): n is a, c, g, or t
  misc_feature (449)..(449): n is a, c, g, or t
  misc_feature (456)..(456): n is a, c, g, or t
  misc_feature (464)..(464): n is a, c, g, or t
  misc_feature (486)..(486): n is a, c, g, or t
  misc_feature (501)..(501): n is a, c, g, or t
  misc_feature (568)..(568): n is a, c, g, or t
  misc_feature (662)..(662): n is a, c, g, or t
aaaattaaaaaaggagnagggattattgtgaaatttaaaggaaataaatgattaagttaaataanagtnggnnggnngatttggtttgangggtganggggggttttantngggagtnttnttttntgttgannggnattganttttgntttnntgtttgagatattggggggtggggattttggnanggggnttntganaggtggttangggtttagnttnntggnngntttgttatnngggtttngggngggnngtgntggnaggggggtnagtnggnagggttgtgttagggngttgggntggttgggggaggtnttgggntgtttgggggtngtaaatnttattttaggnnttgggaggtngtggtngngaggtaanggagagaattgtttttattttattgtgatagtntnnggagaggagataattaaaaggttggatntggnagatatntgggaagntggggaaatgaggttgttcatnaacttttaagagctnaaacttggctgtgtaatttcagacctagcttatggttggggacacctgaactggccccagggttgcntctctctcaacacaaggtgcatactgaacccttctgcagtgtagtacacgttgctgccgcaagtgcaaaggccacgagggaaagaccttttaancagagcaaggggaatctgaaatgc

SEQ ID NO: 589459 - DNA, 2372 bp, Homo sapiens
gtcagcatagttctgcaccaagaagcttggaaaagacttctttggtctgtgcagcttaaaggacaacatgcattttaaatcaagtatgtaactacttgttaataatcttggtaaatttttatactttccaaaactaaaatactaactcagagaaaaatcaaatgtttaatttttctctgagttagtattttagtttttttactttcgaaatgaagatgaatgtgtttggaataagaaatatgttttctggagctatttcaaagttctcttggataatagaaaacaacaacaacaacaaagtgggattttattcgcttattttaccctgcaaatttttactgaacagtgtgccatacttttttcctaggctacaaacctgtacagcatgtgattctactgaatatacgggcaattgttaacacaatggtaggtatttgtgtatctaaacatacctaaacatcgaaaagtagagtagaggcccagtgtggtggcttatgcctggaatgccagcactgcgggaggccaaagtgagagaatggcttgaaaccaggtgtttgagaccaggctgggcaagatggcaagaccctatctctataaattttttaaaaaaatattagccaggtgcggtggcttgggcctttatttctagctactcgggaggctgaggcaggaggatcacttgagcccaggggcccatgattgcacactgcattccagcctgaatgacagcctgcagcttacttttttttttaataacagtctgtttcaaagagcagaagtttttaattttgatgaagtccagttaatcaattgcttcttttatgattttttcttttttcggtggcaaatttctgttttattttgtctggaaataggtatagctctcattcctaaaaatattctcactgaggatataaatctggttgacagttatcatgttctttcagcatattatgccattgccttccaactctcagtgctgctgttgagaaatcagatgacacgctaaatgtctaaaaatgatcagcagaatttttcttttgtgtcttaagatttatttgccaaggtctcaataattttcttctgtattttcttctagaggttttatagttgtaggtcttatatttaggtgatctgtttcaagttaattttatatagtgtaaatttcacttttttcatataaattttatttttggcatatggatgaacaattgttctggtataatttgttgaaatggctatcttttgcccattaaatggcaccattgtcaaaaaataactgaccatgtatgtgtaggtctatttctggaatctctattcagatccattgagctagaaagtctcttcttttaccaataccttccttgatttctgtgcttttctgtaagtcttgaaattaggtacaacaagttctctgattttttttttcttcaaaactgttttcggtgttttaagttctttgctttgttgtataaactttaggatcaactcataaattttaaccccaaaaaaaagcccttctaagaattttatttgtattatgtgagtctatggatcttttgcgggagcactgatgtattaacaaccttggggctttccactcagggacaccatacatcctctacatttattggatttctttcatttttatcaccaatgtttcacagctttcatcatacaaatcttccacatcttttgttagactcatccctaagtttttgctgctctttcaaacagtaatattttaaaatttcaatgaccaattgttcattgctcacataaatacaatcaattttgtatatacagttattatttttaatctgacaatttatcccatactttgctagattctctgtagtttattaccacctttctaaatattctgtctaggtaacccagagagtcaaaagtaagaattattcatttggtcaactgattagattatttctgtgctcttggattctgttaatttcacactctataggctggatgttctgccatcatcaatttgcattccaagattttgtgtgtgtatgtctcaaaaatatgttaaggcagttttaacaattctttagaaactcagggcctggcgcagtggctcacacctgtaatcccagcactttgggaggctaaggtgggaggatctcttgggccaaggagtatgaaaccagcctgggcaacatgacaaaccctgtctctacaaaaggtataaaggttggccaggcatggtggtgtgcacttttggtcccagctattcaggaggctgaggtgggaggaccattggagcccggagggttgaagctgcagtgagctgtgatcatgccactgcactccagcctgggcaacagagtaaaaccctgtctcaaataaag

SEQ ID NO: 589460 - DNA, 157 bp, Homo sapiens
cggaggcgcccgcggctgcagtagctgctgagtcgggatctcttcgagctgtctgtgtccggtgcacgccggcgcgcaatgtgagccagaggatcagcgcagtcctttcggcgcgggccgggagggccccatgcaggtcggcaagcatgagctcccc

SEQ ID NO: 589461 - DNA, 874 bp, Homo sapiens
  misc_feature (196)..(196): n is a, c, g, or t
gtcccccatctcctaaaagatactccatctcctcggcataaaaaaaagtgattcttcaggtcaggagtacagtgtgtgaaaatcaccaaaatgaatagtggtccgtacatttagatgaaagtaaattatactgaatttcagtacattagttttaacactaaaatttacaagataaaatggactccatttagtatcnttttaaaccagaaataactggggaattaatggggataacaataattaatatctcttgggactttgtggaaattttttaaatttaacaagtacatttacgcagatcatttataaagcaggagtccatttaaacacttaccgactttttggggtggaaacatattaccaggtctaaataggatggtgcccatataggtgagcatccctttagcatcatgggaaccagcagatgatcctaatcttcataatgcctgagactgtgtcttaccaatgtaacctttaagtgaatcacataatgtgtcttggaacttgtctcccaacacttatggtgatggcaacgggttaccagatattggatgaggtgctatgtttgtgacacacatattatgtattcaacaacccttatggatatgaataccagataccatatggagtacggtctcaggacgattcaattaagccggggcaatacgatcccaacatgggattaaatctaagaggttagcaaataatggcaaattccttgacctcacgtgggcaatgttggttggacacggggcgaacacaaatcagggcgttgggccccagacggacatgcacgctgtcagcccctctttcggccaaacagcaataaaaaggctgcgggccaagagggagaaacttagaacacatgtgcgag

SEQ ID NO: 589462 - DNA, 1404 bp, Homo sapiens
gctagagtttcccaaaaaaggttagaataacttcctctcccggagacctcggttttgcacaagccggccttgaaatcagagcctttccagcaactccgagagcgtgtgctcggcgaccgcgggcttggcagcggcgcgcgctcgggccccggcgcccccagccccacgcgcgccgggcgggcgccatggaggagggctccagctcgcccgtgtcccccgtggacagcctgggcaccagcgaggaggagctcgagaggcagcccaagcgcttcggccggaagcggcgctacagcaagaagtcgagcgaagatggcagcccgaccccgggcaagcgcggcaagaagggcagccccagcgcgcagtccttcgaggagctgcagagccagcgcatcctggccaacgtgcgcgagcgccagcgcacccagtcgctcaacgaggccttcgcggcgctgcgcaagatcatccccacgctgccctctgacaagctgagcaagatccagacgctcaagctggccgccaggtacatagacttcctctaccaggtcctgcagagcgacgagatggacaataagatgaccagctgcagctacgtggcccacgagcgcctcagctacgccttctccgtgtggcgcatggagggcgcgtggtccatgtccgcctcccactagcgccgcgccacccacctccggaccggcgcgccagggctgtccgtcgcgtcggcggcgcaagtggaattgggatgcattcgagtctgtaacttctgaaacctgaacaacctcaggaggcccccacctctgccctccaccagcgtcgagagaagggacagcagtgacatcggacagaagacccgggctcccgtcctcccccaggacggtccccacataggaagggcactcccagccctcttgctggtgacattgtcatggtcatcttgtttctgtttggatttttcttctgggtcttatgtttggggggaggtttattctttctgaaaatgtctagattcaggaacacatttatgaggatttggattttgaatttgtatttccctctaagtgccttttttaatgtctatttttttaataaaacagaaatgcattcttgtacaattctgttgaaactggaccaaggctctcagaagaggacccccgagttccttcccctcccccgagcctctgcatgattgtttcaagtcagcctggaattcttactttcacgccgctattcttttcctttctccgtgattgcttggctagccattttaaaaaaaatattctctgttcagtgtatatgttgcttgtttgttttatttattgagatatttttacaagctaagtgactgcagtgtggctgtgtatcctgctccccacccaggaaaaataaagacgtccgcgcagcaaaaaa

SEQ ID NO: 589463 - DNA, 965 bp, Homo sapiens
gctagagtttcccaaaaaaggttagaataacttcctctcccggagacctcggttttgcacaagccggccttgaaatcagagcctttccagcaactccgagagcgtgtgctcggcgaccgcgggcttggcagcggcgcgcgctcgggccccggcgcccccagccccacgcgcgccgggcgggcgccatggaggagggctccagctcgcccgtgtcccccgtggacagcctgggcaccagcgaggaggagctcgagaggcagcccaagcgcttcggccggaagcggcgctacagcaagaagtcgagcgaagatggcagcccgaccccgggcaagcgcggcaagaagggcagccccagcgcgcagtccttcgaggagctgcagagccagcgcatcctggccaacgtgcgcgagcgccagcgcacccagtcgctcaacgaggccttcgcggcgctgcgcaagatcatccccacgctgccctctgacaagctgagcaagatccagacgctcaagctggccgccaggtacatagacttcctctaccaggtcctgcagagcgacgagatggacaataagatgaccagctgcagctacgtggcccacgagcgcctcagctacgccttctccgtgtggcgcatggagggcgcgtggtccatgtccgcctcccactagcgccgcgccacccacctccggaccggcgcgccagggactacctccagtgtcccctccttggggagcctctaaccaccctgctggcatttgtggtgactcctgaggcctcgtatatcccctagcggcctggcagctgcgacggtttgtctgcctgtcaccccgggagcaccttcaggactgtgtccttgtcatgtatccggatgcccggctcagcccatgccctgcacaagtgggggtcatggagggagcctctgtttccccaccaagtacaccaagaaactacactgtgtctgatgc

SEQ ID NO: 589464 - DNA, 570 bp, Homo sapiens
  misc_feature (132)..(132): n is a, c, g, or t
cttgcctcagcctccctactatctggaatgacaggcgcccaccactatgcctgactaaattttgtattttttttttcccatattgcttcagggcttgataagcttctttttttttttttttttttttttttngagacggagcgtcactcttgcgctggctgcagggcaatggcactttcatgcgcgtccttgttaagagaccaccaaacaggctttgcgtgagcaatacggctgtttatttcacctgggtgcaggcgggctgagtccgacaagagagtcagtgaagggagataggggtggggccattttataggatttgggaaggtaatggaaaattacagtcaaagggggttgttctctggtgggcagggggggatctcacaaagtacattttcaagggtggggagaaatacaaagaacccttttaagggggggggaaagtttgtatgagtttccacaaacttattcgaggttgtttagatatcagttaatcctgcttatattacgattcgcgcactcctttcttcgttgtagcttcgtattcctctaactatataactaagtttctag

SEQ ID NO: 589465 - DNA, 435 bp, Homo sapiens
tatgcttgttggtcgtctctgcacggatccccggagacacttacggaagacacacattatctataggagcctggatggccacaagtgataggatctataaagataataccatgcatgactttaattaatagaaaacagtttatagtttatatcacacgaatagagacctacaacaaaaagcattactagagactacaaggaatatttcttaacaagaaaaggtctaattactaggaagacagatcaattctaaacattttatacttcgcctaaaaatgctcaaaacaaaaactacagaacaaggatcaacagactaatccacaatagtgggaaattctaacatgactctcagtatctgaaatacccagacgatatcattaatcagtatgaccctcttgtcatatactaaatgctactactaacaaatacaaatta

SEQ ID NO: 589466 - DNA, 760 bp, Homo sapiens
aatccgccgttgacagctcccgccagcggctgacccatttctctgcgttctcctcgctggaacccagccctctgctgcccgaaaccccacagctccctcgggcctgcacggggccaacgtgccgagcctctcttgtccccaggcagcctgttctgaggggctcacccacagccagaccgcattcatggctgcgctgagcacgggccagggggaggccccggggtggctgtccgtcgcgtcggcggcgcaagtggaattgggatgcattcgagtctgtaacttctgaaacctgaacaacctcaggaggcccccacctctgccctccaccagcgtcgagagaagggacagcagtgacatcggacagaagacccgggctcccgtcctcccccaggacggtccccacataggaagggcactcccagccctcttgctggtgacattgtcatgaaatgcattcttgtacaattctgttgaaactggaccaaggctctcagaagaggacccccgagttccttcccctcccccgagcctctgcatgattgtttcaagtcagcctggaattcttactttcacgccgctattcttttcctttctccgtgattgcttggctagccattttaaaaaaaatattctctgttcagtgtatatgttgcttgtttgttttatttattgagatatttttacaagctaagtgactgcagtgtggctgtgtatcctgctccccacccaggaaaaataaagacgtccgcgcagcaaaaaa

SEQ ID NO: 589467 - DNA, 246 bp, Homo sapiens
aacctacctactctacctactcctgcatcgcatctagctatagaagaagcgccggagaaggaacaggttgaacagtctaccctcccttagcagggaactactcccaccctggagacctccgtagacctaaacatacttactccttacaacctagcaggtgtctaccatctatcttaggggccatcaatatcatcacaaacaaataatacaatataaaaaaccactgacaaaaaccaaataacacaa

SEQ ID NO: 589468 - DNA, 221 bp, Homo sapiens
tggcctccatcctgaactctgatgaggaggagtcttgagcatgtatgagattgaggaggtacacatgaagtcccccagtttaatggggttgggccatccctctttcctcctccccgtgtacttgtggatcggaaacgttggtttggctggcgagcagaaattgttctctgtcgcagatttcgtccacaagtaacacaaagatcacctggcgcaaaaaaaaa

SEQ ID NO: 589469 - DNA, 753 bp, Homo sapiens
ggagatgaggtagggagatgggccggaaggaggaaaaaaaaataaactttaggctgtccgtcgcgtcggcggcgcaagtggaattgggatgcattcgagtctgtaacttctgaaacctgaacaacctcaggaggcccccacctctgccctccaccagcgtcgagagaagggacagcagtgacatcggacagaagacccgggctcccgtcctcccccaggacggtccccacataggaagggcactcccagccctcttgctggtgacattgtcatggtcatcttgtttctgtttggatttttcttctgggtcttatgtttggggggaggtttattctttctgaaaatgtctagattcaggaacacatttatgaggatttggattttgaatttgtatttccctctaagtgccttttttaatgtctatttttttaataaaacagaaatgcattcttgtacaattctgttgaaactggaccaaggctctcagaagaggacccccgagttccttcccctcccccgagcctctgcatgattgtttcaagtcagcctggaattcttactttcacgccgctattcttttcctttctccgtgattgcttggctagccattttaaaaaaaatattctctgttcagtgtatatgttgcttgtttgttttatttattgagatatttttacaagctaagtgactgcagtgtggctgtgtatcctgctccccacccaggaaaaataaagacgtccgcgcagcaaaaaa

SEQ ID NO: 589470 - DNA, 299 bp, Homo sapiens
ccccccccccgggccttttccccgggaagttttgtttttttaaaattaaaccctttttggggccccggggctggtgccggttgggttaggggccgctccgtcctagagggttttttaaaatttgggttgggggccctttttctcccccagccagggcccctcaacccgggctttttttggccccccccctttggggtgtttggctccccccaaggggggccagctttgggccccctttttggggtttttttttgccggtgggccctgggggccgcccctttaagcctttggctctttta

SEQ ID NO: 589471 - DNA, 605 bp, Homo sapiens
  misc_feature (217)..(217): n is a, c, g, or t
  misc_feature (303)..(303): n is a, c, g, or t
ttcaagtgtctacacagctaaatcatgcttccctcatacgctgcccaagccatcagttagcacaaagtgtccctatggtgaaaggtaccttcatgttaatgcaggaacagtggaacatctgtcacatgctgccaccacctgccaaaggttgctgtgcacagctagcagtccaccgtccagactcgacagcgcagtacactggaagacacaggccccntttccctccaagcagcaagtagctgatgaagatgaaatatggaagcaaagacgaagacaacaatcagaaatttctgcagcagtagnacgtgctcgtaaacggcgtgaagaggaagagcgaagaatggaagaacaaaggaaggcagcttgtgcggagaaactgaaacgatttgatgagaacttgccatcctgaaaaacacccatctccagaggaaatttggggaagggggccagaaaaagaaccggggccttgggaaggactttgaaaaagaccaggaccagggccgggggagggggggggaaaaaaccaaggggaaccaccaggaaaaggagaaagagttggagagggagcaggaaaaacaaagagaaatggagaaagaaagaaagca

SEQ ID NO: 589472 - DNA, 721 bp, Homo sapiens
  misc_feature (689)..(689): n is a, c, g, or t
agagagagagagagagagagagagagagagagagagagagagagagagagagaggcctaggcatgtggacgcagccatggctggccgcatctacatctcaagcttggctcctctcccctccttgcccaagacacaactgtctacgcatcgcatccgcaacggctaccgttcacaacgaggccactatcgtggccgcatccatatctcccgccggtcattcctcgccatgtggctgtccttgttctccactgaggatagcaacttgggatccaacatctatcatgacttcaggatggactggcttgcgcctgccacctgtgaacccatccagagtgccttcttcttctctggagacaagttctaccgactcaatcttcgcacacggccagtggacactgtggaccctacctatccacgctccattcctcagtactgtcttgcctgcccatctactggtcatttgaggagtcatagccctcatggccgggccctctgttactcccttctctcatctccttttcctaccccaatcgtcccttagccccgcgtttttcctgaccctgatctctctatctacgtccgtcttatttctgagtcttgcatcttttcttccatattcacgctctccttcgtgctagtgtattgctgctccagcgtttggcgtggggcccctgttcctcatctcgtcntctttttgtcatttctctgcacctttctggcg

SEQ ID NO: 589473 - DNA, 912 bp, Homo sapiens
ttataatcagatatctttatgacaataagttcacaaaggtcagaagagatgagtttgctaaacccagcggtgatacctaagttggaaagggaattgaaagtgtatgcttatgtagattcagaaaaggtatagttattttattcatgagcttttaatgcattttcgtgtttgaccctcgtatgtgatgtcagctacaataaggtgggtctagatttattacaaggagtagaagattcactcgctttgcaactgtaatcttcctcactgactttacatggacaggtatgaaatattagtgtatgggatcttcagtaacgcctttgtatttcctagatgatgtgaaatataggtatataactccatttaaaccaggtgatacgagtgatgtgaactgaccatcagggagggtattaacgtctgtctacaattagctcgtgtggaagtgtaaagtgccggtgacggaatagtcttccactttcaggattctagagtaagtctacctgggacagagggggttcacaacatggtggtgcttgaccatgtgatgtctttgtctacttagaagatgcatcctgtgttgtggacacgataacattttgatgcttgactggaatatgaatgcttcatggtgtcgtctactggcaaatagcattttttggagaactcaggcaccggtcaccagggttcattaaccaattttgtcaataagcaaaccaggtaatggtgggtcccgggagctgggattggcaaagatttgtaagtggcggttgaaccattatgtaaaagaggtgtaatggggtgtcggtgtgaccagaaatcgagacatgagtgaaaacaactgtgcgtcgtgatgtgacacgaagggtgttaccagtgccccagtggtgaagaatcttagaaaaagaatgtcat

SEQ ID NO: 589474 - DNA, 148 bp, Homo sapiens
aatccctgttctcttctacaaatacaataacggacatcatccgggcgtggtggcgagtgcctttaatcccagctattcgggaggttgaggcagaagaatcgcttgaacccatgaggcggaatttgcattgatcatgccattgcagttc

SEQ ID NO: 589475 - DNA, 345 bp, Homo sapiens
  misc_feature (189)..(189): n is a, c, g, or t
  misc_feature (192)..(192): n is a, c, g, or t
cccatgccactggggaatgccagctgtgagccagccaggcttccggttccctgcctgtgagcttgcatttccagcccttctctcagcacctttacccctcgtctctctctctctttctacacacacacacacacacacacacacacacacacacacatcttggttttttcttcatccatttcagaaatnttnacactcttggggggagaggggaggaatagcattaggagatatacctaattctaaatgatgagttaatggtgtagcacaccaacatggcacatgtatacatatgtaacaaaccacatgtaccctaaaacttaaagtataataataataaaattt

SEQ ID NO: 589476 - DNA, 333 bp, Homo sapiens
tcgatacgactttttttttttgagacagagttttgcttttgttgcccaggctggagtgcagtggcgcaatcttggctcaccgcaacctccacttcccaggttcaagcaattctgcctcagcctcccgagtagctgggattacaggcatgcgccaccacgcctggctaattttgtatttttagtagagacggggtttctccatgttggtcaggctggtctcgaactcccaacgtcaggtgatcctcccgcctcagtctcccaaagtgctgggattacaggtgtgagccaccatgcctggtctagggaattgacttctttttgaccttctgcact

SEQ ID NO: 589477 - DNA, 873 bp, Homo sapiens
  misc_feature (13)..(13): n is a, c, g, or t
  misc_feature (86)..(86): n is a, c, g, or t
  misc_feature (104)..(104): n is a, c, g, or t
  misc_feature (113)..(113): n is a, c, g, or t
  misc_feature (119)..(119): n is a, c, g, or t
  misc_feature (141)..(141): n is a, c, g, or t
  misc_feature (145)..(145): n is a, c, g, or t
  misc_feature (149)..(149): n is a, c, g, or t
  misc_feature (151)..(152): n is a, c, g, or t
  misc_feature (156)..(156): n is a, c, g, or t
  misc_feature (159)..(159): n is a, c, g, or t
  misc_feature (162)..(162): n is a, c, g, or t
  misc_feature (167)..(167): n is a, c, g, or t
  misc_feature (179)..(179): n is a, c, g, or t
  misc_feature (187)..(187): n is a, c, g, or t
  misc_feature (217)..(217): n is a, c, g, or t
  misc_feature (219)..(220): n is a, c, g, or t
  misc_feature (224)..(224): n is a, c, g, or t
  misc_feature (236)..(236): n is a, c, g, or t
  misc_feature (249)..(249): n is a, c, g, or t
  misc_feature (270)..(270): n is a, c, g, or t
  misc_feature (290)..(290): n is a, c, g, or t
  misc_feature (302)..(302): n is a, c, g, or t
  misc_feature (372)..(372): n is a, c, g, or t
  misc_feature (379)..(379): n is a, c, g, or t
  misc_feature (392)..(392): n is a, c, g, or t
  misc_feature (406)..(406): n is a, c, g, or t
  misc_feature (449)..(449): n is a, c, g, or t
  misc_feature (455)..(455): n is a, c, g, or t
  misc_feature (469)..(469): n is a, c, g, or t
  misc_feature (541)..(541): n is a, c, g, or t
  misc_feature (569)..(569): n is a, c, g, or t
  misc_feature (656)..(656): n is a, c, g, or t
  misc_feature (712)..(712): n is a, c, g, or t
  misc_feature (730)..(730): n is a, c, g, or t
  misc_feature (741)..(741): n is a, c, g, or t
  misc_feature (758)..(758): n is a, c, g, or t
  misc_feature (778)..(778): n is a, c, g, or t
  misc_feature (860)..(860): n is a, c, g, or t
ttgaggcctgcantgtgactgggtgttctgttaaaagggcaggttcctccctcctagccctgtatgccccaggtacctgccttganagataagctctctaatantcaacttgnagggtntcgccctaacatccaagatttngtancatntnntttnatnccnaaatncagatggttctnaactaatnctaaacgaaaactcaaaaaaagcacaccanannccanctgttgtttgtnagggatctcatantccagaggaaatgcatttgcntgttatggttttcctctctnagggcacctgtntgaacttggggctgatgcttccactggtgcctcataggggcctgggcctactctccacctgaattcacanttttctntataaggtatcangtggggaataagtncaagatggtgacaagaggctcccgaagcaacagagctatgctnatatcntggcaaggcatctnccacaatgctccagagggctggcgaggccgggacagcattaggacagagaaagggcagaggggtgcttgtgnagtgctcatcactcaggggagctggcangcccgggatgacaggcagcctgaacagtgctggaacaaagacagccaccctgcgccccttgtcgagcagctgctggtgatgggaagnagcacgtcggcaccacctccttcgttgcaggaaatgttttgtatcgggccaatganttcagttttccttgcctngagatgccttnatgaaggaaggggacanggaatacaggtgggcatgcngcagttggcatctctggggctgccaaatcttgagttcacttggggccaaggcactccacaatcccattccccttcatgccancgaagaagaagaa

SEQ ID NO: 589478 - DNA, 241 bp, Homo sapiens
ctaatgatatctagaggcattgctttcacatacctaagtgtatattaatcatttattagtatagcgtaaatacgtgagtttatctatataaatatctataaaatgtaggaataaaaaaggtatatccaaaatctatgttacatgagtaaaaatgtactctttagatcttggatataccttattattaaagaattaatatattatactatttatattttatctaacattttatctatactat

SEQ ID NO: 589479 - DNA, 176 bp, Homo sapiens
agagtgtactgcggccttgcttttgctcggggagctgttggaggccgtgccctgcatttggcagggctgtagggcatcattggcaatatcttagatgagtgtctgggctgctcaggagatgagccgaataatgcgggggtctgaggcctcgaagccagcacggttcaggtagtaac

SEQ ID NO: 589480 - DNA, 245 bp, Homo sapiens
ctgatgtgcgatcttgacattgatggctgctgactgcttagggtggtggttgctgaaggttgggtgacagtggtaattacagtgattttgttttgttttgtttctttaagagacagggtctcattctgtcactcagggtggagtgcagtggtacgatcatagttcactgcagccttgacttcccgggctcaagcaatccttctgcctcagtctttccagtagctaggaatatcaagaatcggcac

SEQ ID NO: 589481 - DNA, 149 bp, Homo sapiens
tatatgagactccacaactaacatcatcatcagtggggaaagctgcaactttttctgtaatactggtcaaggaaagaaacttacttctctactttcaacatagtactggaagtcctagtcaacaattaaataaggaaaaagaaaggcaa

SEQ ID NO: 589482 - DNA, 211 bp, Homo sapiens
  misc_feature (40)..(40): n is a, c, g, or t
  misc_feature (45)..(45): n is a, c, g, or t
  misc_feature (109)..(109): n is a, c, g, or t
  misc_feature (115)..(115): n is a, c, g, or t
  misc_feature (132)..(132): n is a, c, g, or t
  misc_feature (136)..(136): n is a, c, g, or t
tggactggatagggatgcaccagtgactgtcacatcaagncagtnccttttattctctctcctttagtatgcgattttaaagggtcattaggtcactatggttcccagnagtttncttggggtaaaacttgncagnattccttattaattggttcctgtcaatacttaaataaattattttacaattataagttttccgcattaaaaaaaa

SEQ ID NO: 589483 - DNA, 130 bp, Homo sapiens
gaactgagacttctgagaggaaaaactattgaatgcattagcctcattggtctggctgttgggaagaaaaatttgtcccctactatgatttatttatgccatcactgagcacatcgttgagaatgcggtc

SEQ ID NO: 589484 - DNA, 225 bp, Homo sapiens
  misc_feature (9)..(9): n is a, c, g, or t
agaggtgcnatgcctctcgggtgacttggaaactcctggacaaattccattctaacgttatttgtgacatgtatccaaaccaactgttgtagagattccacttgtgcatagccctactgtgttcccatgttcctgtggaaaagagaagtttacttcgcaatacttataaattaatgaatattcttcattgaggtgactgcaaatgcttctttccccagcagatcg

SEQ ID NO: 589485 - DNA, 304 bp, Homo sapiens
atgccccgaaaatcaaagaagccagtccaaagcccttcttcctgtgtgcatgagcttcgttacgaaggttgaaaatgagtatgcccttgtgctctatagtgggagtgactgggagcaggcaggagggtcctctttctgtccttgttacttcacaggactcagggcaggtgcaggtgctttggcggtgagcggaaccaaggctctatggcttggcccctccagtggggccatagttaagatgcaaaggagctacagtcaggcagcacttgggtagaactacagcgtctgtcacttaaccagtgtg

SEQ ID NO: 589486 - DNA, 811 bp, Homo sapiens
gcaatccctgtacgcaccgtcgtgatgcccaggaagacagggcgacctggaaagtccaactacttccttaaaatcatccaactattggatgattatccgaaagtgtttcattgtgtggagcatgacaatgtgggctaccagagcagatgcaatcagatccgctatgtcccttcgcgggaaggctgtggtgctgatgggcaagaacaccatgatgcgcaaggcctatccgagggctacctggaacagatcaacccagtctctggagaaatctgctgacctcatatccgggggaagtgtgggctttgtgttcaccaatggaggacctcactgagatcagggacatgttgctggccaataaggtgccagctgctgcccgtgctggtgccattgccgccatgtgaagtcacttgtgccagcccagaacactgggtctcgggcccgagaaggacctcctttttccaggctttagagtatcaccactaataatctccaggggcaccattgaaatcctgagtgatgtgcagctgatcaatgcactggtagacacaacgtgggagccagccgaaggccacgcgtgctgaagcatgtctcaagatctgccccttctcgcttgtgggcgtggtcatccagcagtgtgttcgacaatggcagcatatacaagcctgaagtgcttgatatcacagaggaaatgtctgcattctcgcttcctggaggtgtccgcgatgttgccagtgtctgtctgcagattggtaccgactgttgcatcagtaaccccattctgtcatcacgggtacaaacgagttctggcctg

SEQ ID NO: 589487 - DNA, 195 bp, Homo sapiens
aatttttttaatgaaaaccctttttaaaaagaaaaaaaaagagggggcaaagggccctttattggggggttcaaataaaaagccgggggtcatgccgggattcccccccctttggggggccaagggggggggttcccttgggccccggggtttgggatcagcctgggcaacataggggggcccggtttttcccca

SEQ ID NO: 589488 - DNA, 871 bp, Homo sapiens
ggcaggcattgtgcccaacaccatcacttacggttactagaacaaggcagtgctggaaagcaaatggccatctggtactccgggtggacgcctacgctgggccaagctccggaatgttgtcctgggggctgctcagttccgccagcccttaaaggaccgaaggcagcaacagcagcagcagcagcagcagcagcagcagaagcaacaggtggccgagcagcaaaagtcgggcagctctcagacagagccctatctggagcgtccctccccaacgcgccctcttcagcgccagactacttgggctgggcgaagtctacgggaaccatcttcacccatggggcgcctggtcaagagtggtagcctaggcagtgcccgtgggacacagcccacggtggaggctggtgtggctcacatgatagaggccttgggggtcctggaaccccgcggatcacctgtgccttggcaggacggaagcctctcagacctgagtctgacaggggaagaaatgggacctggaggcagcctgggggctcaggctccgacctgagtgcacagtccatgaagcctagaagggataaggtgggcggggtccaaaatagtggatgtcaggaggaggtgggcactccccaaaaaaagggctgggtggccagcatccaacaagattggtccaaccctaccggcgagacgatgatccggaatcgccacatgagtgccgtgacgagacgcagcggacggagaagacgaggaagctagtggcagagaggaccgaacgaggacagaaaacgataagggaagagggaacaaaaacaaaagacaaggagcaacaagggacaccggagaaagataagaaaagaaggaaagagcggaaggg

SEQ ID NO: 589489 - DNA, 122 bp, Homo sapiens
tttggcgtgtggcagtttaaagttattagttttaaaaatcagtactttttaatgtggaaacaacttgaccaaaaatttgtgctcacagaattttggagacccatttaaaaaagtttaaatgt

SEQ ID NO: 589490 - DNA, 576 bp, Homo sapiens
ctttggtcttgtctggctgtattagaatgagaggtacatccctggagaggtccatactaaatgagcagcagagtcatgttacatacccctggctgcttcacaagcaaaggatttaccctgggcaaggaagggaagggagagtcttcttccagactcccaacgcagaatgagggactgccctgactggcagtgggtgacagaggggtcagcagaaagtctgaaagggaaccagagacctgattatattcgtcacgttccaaggggtgtccttaacaagagagatgagtgagccctgagtcaggtctggaaaattacaaatcatcccctcaaaaaaaaaaagcaaactttgatccaattttcaactcttccatgttcttaaaaagccaacaatatcaccagtgaaatcagcgaaccggtacaggaagagggaagagcttcatcgttacagtaactctagaagtcagggtagaatctactccaacggtaagaaaagtctttgcttttgaaatgctatacttccacaaaggctggcttcaaggataggtactgccaggaactggttacagggtgaatagt

SEQ ID NO: 589491 - DNA, 198 bp, Homo sapiens
agatcgaccggtccgtatatggtgagcacgcgccggccactacagaacattttaaaaactagctgcgcctggtggcgcgtgcctgtggtcccagctacttgggaggttgaggcgagagtatcactcaagtgagcccaggaggtcgaggctgcagtgagctgagatggtaccagtgcactccagcctcgacctcctggg

SEQ ID NO: 589492 - DNA, 369 bp, Homo sapiens
ctgtcaccagtagtaattcaccatatgcaagtaccatccttatcatgcgagaatactcacgggttctgtaaaagtgccaagtgtacttaagatattgaaaattatggctcacttaagtatgatcattgtgtgattcctttaaatagcaaaaatgcccagtcctctttaggcctataatcaataatagtttccattactcataccatattcattgtacatacgcagatagttccttaaaaatagaactctctcattaatatctaattggacagaaagcagtataaggtaaaagtgagtgctttgtaagtgaaaaagtacatatctgaggcctttctcgtcacattttcgtatgtcaaagagcaaaaaccc

SEQ ID NO: 589493 - DNA, 712 bp, Homo sapiens
  misc_feature (320)..(320): n is a, c, g, or t
  misc_feature (367)..(367): n is a, c, g, or t
ccatggccacggaggacccccagagctgccacggccttggactccctgtgatggctgggtggggctacggctccgacaagaggctgagtgaaggcctggggtgctgccccctccccccagtgggtggccgtgactggggatgagcacaaccagctgtgctagaggagcaccaggcacgcgcctggcagggtgccatgtgacgcatggcgcggctagccggtgagcactgccagtgtggcaatggtgtgcgagagtgggcctgtcttgtggccctcgtgtgtgcctggggcacattggcaatgcctgctgtgttggatgtnggctgtggtgctgatgtgctgtgcttttgggcacaatgtgttgtggnacatttcccaatgtgtgccactgtttgggttgcccatgtgttgtgctgtggacttgtgaaggtggtgtgctgtgatgttggccatgccattgaccggtggcagcaagagtcccctcacccacaccctcatccccccccgtacccccacttcaccctgccgctactaagtcccactcgctgcgagttttcgggttgggcagacgcactgttgaatctggtagccagggttccctcgaacttggggggatctttttaaaagcaaagtaaatcctgccaccatgttgtagctcaatacaatgtgaactcactttttttttctttaaataagttgtgtcttgttcttgc

SEQ ID NO: 589494 - DNA, 102 bp, Homo sapiens
tcagacgatcccatatcgcttagtgctccccgggaaacggcttggtcctgatgcggagatgggggtaggcgatgaactcgggtctctcgtgctctccgtggt

SEQ ID NO: 589495 - DNA, 331 bp, Homo sapiens
gcatatcaaataacaaaagagatgctgttgacaaaccaagaggatttgccagaggtcttgatcctgaaagaataattggtgccacagacagcagtggagaattgatgtttctcatgaaatggaaagatctagatgaggcacactctgtgctggcgaaagaggcaaatatgaagtgtcctcaaactgtaattgctttttctgaagagagacaaacttggccttcttgctccagaggatgaagttcaatatctgttcacattgttctttcatctatttttatatatttataaaaaaactgggcctcacatgatgatttactaggtgtgacaaa

SEQ ID NO: 589496 - DNA, 178 bp, Homo sapiens
ggcgctagcggcattaatgacgtgtgcagaggtgtaatcatgatatgagtaaggacatcattgcttttgggattattacttaacagagtagacaattattctatctaaaaatcccctaaatattgtagcattgaacccttgaccagcactgatgcgcttcacttaatgtcgctagcgc

SEQ ID NO: 589497 - DNA, 490 bp, Homo sapiens
  misc_feature (249)..(249): n is a, c, g, or t
  misc_feature (306)..(306): n is a, c, g, or t
acagccccagaataaagcaaaaacagaaacacttctaatagtttcaataagagactagagattgactttgggtgtgaggcttggatttcatgtccatttctagtttcatctgtgccaggattagaattatattcattggccaggcctgtgtcacgaggtcatacagggtttccactgtccacacagtgcctttgcaagtattagaaaatggctcccctttctccagttagatgcagccctgtctcaggncatggtggcttggagaagagcatgcaggctggatttcaacccccctttctcccttangctgggtttcttccttgagtgaacaacatacttgttagtagctgtcctgtgcttattcctgaaactgggggtgaaatcagccaccacgccaaaactgaaggataagaagatgggcttcatctagggtatcagataatgggctaataacaaagggaggggacagtggggtgctgtgtgggcaaaa

SEQ ID NO: 589498 - DNA, 152 bp, Homo sapiens
  misc_feature (125)..(125): n is a, c, g, or t
ttcattcccagggcactagaatgatctttagccttgcttggattgaactaggagatcttgactctgaggagagccagccctgtaaaaagcttggtcctcctgtgacgggagggatggttaaggtncaaaggctagaaacttgagtttcttca

SEQ ID NO: 589499 - DNA, 205 bp, Homo sapiens
  misc_feature (6)..(6): n is a, c, g, or t
  misc_feature (27)..(27): n is a, c, g, or t
  misc_feature (75)..(75): n is a, c, g, or t
  misc_feature (155)..(155): n is a, c, g, or t
atctcntaatccatttcttatccttcncaatttaattcatattttggggacttttagggggatcagaaataaaangcactcagctgctcggggacatttttttaagggtaatataaatttcagtgtcaaactcttctcacattaaaatttttccngtgacctctactaaaattagtgttaggggctgtaatggaggaatctgctt

SEQ ID NO: 589500 - DNA, 167 bp, Homo sapiens
atcgagctctgtacccctagttttagaagtttcaatagcaggaagggagatacacacagagaagtgggaatctcaggagacggatgtggccaggtgcttcttacgggggttgggctaagcattattagtcaacgggctgtactgctattgaaacttctaaaactagg

SEQ ID NO: 589501 - DNA, 306 bp, Homo sapiens
ggtgaaaggagctctcctctcccgcactgttccgagaagcggttgttgacattcacaaagtgtatgggtgtgatgattccaggactattattgagtgacagtgacgcttcacatttggggtatttcaagatgagcgattctactgaccaaactgactagcgactaggaggtggaccactctgatcgtactgctgagaaggcagttggatgataatgttgggagagatgaagatgctgcttgattggagctagatgatattgtttataagacctcttatgacttgcgatacctacatcagatatttg

SEQ ID NO: 589502 - DNA, 387 bp, Homo sapiens
cgtgggttccttgcagaagcagtggcatatgttttatgcagatggctctgctgttattgctaaagagactctagggtgacaaagagagaaggaagatcaacaagaaagaagaagatggggctgggaccagcacagggagtgaaaggatgaacactggtcagagtctggacatattttgaatgggcccactgaaagaaagaggaattgatattttgaatgggcccactgaaataaagaggaattggccaggagcggtggctcatgcctgtaatcccagcactttgggaggatgaggcaggtggatcacgaggtcaggagttcaagaccagcctggctaacatggtgaaaccttgtctccactctgcaagaacccacgcgggtaccgag

SEQ ID NO: 589503 - DNA, 216 bp, Homo sapiens
  misc_feature (182)..(182): n is a, c, g, or t
ggctattatatgactcattatactcaccaaatcaggtacatttaatctttgaaaagagtatattgctggctgggcgcggtggctctacgcctgtaatcccagcactttgggaggccaaggcaggcggatcatgaggtcaggagatcgagcacatcctggctcaacatggtgcaacacccctngtctctactcaaacaaaacatcacaaggggcatc

SEQ ID NO: 589504 - DNA, 110 bp, Homo sapiens
tggacagcacagaggaggtggacagcacagaggaggtggacagcacagaggaggccggagcaggaacaggttgaacagtctaccctccctgtgctcctcctctgtgctgt

SEQ ID NO: 589505 - DNA, 193 bp, Homo sapiens
tagacggactcccctgctcgctgacctatatgtatgacgagtaccatttcaccaaaccagcaccaattaccagcaagcaacacgaggcaagcccatcacgtttgctacttttgacgcatcatcctgtgatgtagacaatgtcaattgcaggctgtacaatgttgtgcacgtcactcaaccgggcacttgaatc

SEQ ID NO: 589506 - DNA, 111 bp, Homo sapiens
cacgagcgcccaagtcactaggcgctgtggaggggctgtacctcgcattatgatgctgttgtgaactctgtcttcctccggagtactttcagctggcttaaattcaggggt

SEQ ID NO: 589507 - DNA, 1475 bp, Homo sapiens
  misc_feature (282)..(282): n is a, c, g, or t
tggggttggacgcacgagggtacttaattggagggtacatgacaagggggggatccctaggcccctcccctcttacaaggggtctactgtggcaacgtggtgaggaggggagattcaggtggtgggtgggggacgtgagtgtggtggcagggatctccccagcgaggtggagggtctctctctttcctctgggtgcctctggcgtggggcgtggtgtggctccaggggttctatactccttgggagaggccagtgtgtgggtccatgtgagggtcacaccanccgcgtgtgtggcgtgtgtagcccaaatttcggtgtggtcaataccgaggaaatgtgagcttgtgacaagagtgtggctcgtgtgaagggcaagtggccgaggccccgaagggtgtcaaagagggtggaagggaaggtgggtgtgtctcgcccgtgtgtggcacagtctcagagaggagagaaacacacgcgtgggggggccccagcgtgtgtaggccccagggagagtgggccctggtgaggggggggccactttcgcgagagcgccgcgtgtgcttctacaaccaaacctctttcttaggagagtgtgtccatatcaaatatctgtgggggacagaggtgtattttctctatagaaaagcgggcacgagagtctccaagggtgtctcacaccagcgtggaaccagcgttgtggggcccacgtggtgtggggagcaccaccgtgggagaaggggggccatatgtgcgccagggtgtagaacgctttcccgcgggtgttcaagcgccctccaacggggggctgttggaacctttgtgcggccaaacgagggcactgtggtgggaaaaggcgggcccaaggataaaagaggggcacggggggaactaggaattgttcctgtggggaaagaggccccccggggggggggcccaaattaacggggcgccaaccaatgttataacccccggggaggggggcggcccaactccacaaaacaagggtgctactacttgggggagcagaggcgccaaagttagcaatgggcgacaatgcgggacaacgggggtgggcggcccaattgaggaggcgtcctcttccaccaagcagggaattaacccccacaacaataggtgttggtccacatcgcgggaatgtgagaccctttggggcgccacaagggggggttggccaacaagaccagtatgggggtggaggtcagcaccggagaagggcacgactggcgtcggaaaagcaccacaggagaggcgacctgggtcaggcaccaaacaaacttcccacagggtggttccacaacccccccagtggaccggacaccagcgtcggggggccaaccacagccaaacgggcggtcgcacgcagtatgctagcacaacccttctgtggggagtcccccccccgtcgggagaaagttgaaacccccagcaagtctaacccaagcggaggggcagagaaa

SEQ ID NO: 589508 - DNA, 276 bp, Homo sapiens
ccccaaaaccccccccagggggggtttgcccccccgattggcccggactttaaaatctaaatgggttccccggttaatgccctttcccggatttattttcccccatttcccatcctttttttttcccccccccaagcccttgggataaaaccaaccgggggttgttttttttattggaagccccccggggccttttttgtgggcctttttttttagggttccccccaccggggttttttttaaccccaaaaactttttttttgtttttggggggga

SEQ ID NO: 589509 - DNA, 108 bp, Homo sapiens
tgacagctaatcacattcccgcccactttgtccacgccagcggccacatgactgaggggaaatggcaagaaattcagctcctgaaactgggcccaactgatagggccc

SEQ ID NO: 589510 - DNA, 779 bp, Homo sapiens
tgtgttggatgcccgatgcaagcgctagccaggcgcaatgcgcgcacatgactgtatgccatcctgaggacacccccgccccccggtgcattccggtaaaccctggcggaatcgcctccggatcccctgattgggcgtagagttgttaggtacgggtcggcttgtccggcaccccgacgcattccgcgcgcccacacaccgggtaaggtaatacatctcctcgtgctattaataacgtaacgcgtggtcttcatatagcatggtcccatcgagtattgtcgcgtgcacgtgtgtagtgcgtagccctgaatgcctgaggcttggctcgcagagatccactcgagtgtccggagtcaattggattctgacaatgatatacctagtacctcgagtgttatgacttcgtctaccagtctccgtgcatttactatccacgggtagcggatagaaatgatatgtcttagccttacagagcgtgcacccgaatcttcagatacccccccccgggtgggggcaaggggtacgaatcattggggacaggcagacgatctgtgagagctttgtcattaacccctaacgggcactcccggaccctagaaaccccaggagcgtgagcggggtctgtacaccagcaaagggggccccttccaggttatcccttcacgtgtcatgcagcgcacctaccccctttgagacgcaattccagggatggatttacagtactgattgacaggaacgggaagccatgacgggaggggacgcgaagatcgaaccggtgc

SEQ ID NO: 589511 - DNA, 169 bp, Homo sapiens
ggggaaagggttttgggggggttgggggggggggccttttttttttatattttttggggggggggcccccttgggggggatttttttttttccccccccccccccggggtttttttttttttgggttcccccccccctttcttttttcgggtttcccccccccccccca

SEQ ID NO: 589512 - DNA, 251 bp, Homo sapiens
gtattctggtcactctaaggatcccaaattgaggtcgggtggtcagcagtgagttaaggcgaagtggcagtagctgaaggggcctgagcagagcttgtgctgggaggggcctcgcattgacaggaagaagaggaggagatttaaatatccaggtctgaaagccagttaatagttctccttcatctgttcctgcattgtgtgtagcatctcctgcatccgccgtagttcctcgtatttctctctcgatctgt

SEQ ID NO: 589513 - DNA, 458 bp, Homo sapiens
tagggatgaataatattccattgtgtgtaggcatatatatggaaaagggttatatccaaaacttataaagaatcatacaactcaattttaaaaatgggcaaacctgaaaagacattctccgaaacgaacacagatggccaaaggtttttaaaagggtgctcaacatcacttaatcatcacggaactgcatataaaaaccactcgaagtactacctctcaccagttaggctagctgttatcaaaaaaaacaaaagacaacaacatgttgtgacggtgtggaactaacaaggaactctgtgcacttccgtggtgggacatgtagatgggttacagcccttactggaaaatcagacatggaagtttctaacagaaaaactaaacactacccatacgactccagcaatccctcttctgggaatatcctcaaagtccatgaactcaccaccttgtacaacatc

SEQ ID NO: 589514 - DNA, 2054 bp, Homo sapiens
  misc_feature (630)..(630): n is a, c, g, or t
  misc_feature (655)..(656): n is a, c, g, or t
  misc_feature (901)..(901): n is a, c, g, or t
  misc_feature (940)..(940): n is a, c, g, or t
  misc_feature (987)..(987): n is a, c, g, or t
  misc_feature (990)..(990): n is a, c, g, or t
  misc_feature (1169)..(1169): n is a, c, g, or t
  misc_feature (1259)..(1259): n is a, c, g, or t
  misc_feature (1268)..(1268): n is a, c, g, or t
  misc_feature (1285)..(1285): n is a, c, g, or t
  misc_feature (1540)..(1540): n is a, c, g, or t
  misc_feature (1560)..(1560): n is a, c, g, or t
  misc_feature (1620)..(1620): n is a, c, g, or t
tagggtttgaggggaaatgctggaaatggtaaggggtatggaaactatttcatataagtaatgctaggggtgaggtggatagaaagttttttctcaataggaaggtgtgttattgaggtgtggctcgatagccgaaactcgggggttagtgcgtgttctcaaattctcaataagaaacgacgggaaggttataaaagaatagggctctgtgggtgcacaaaaatagtgttgtgtgtgtatcaaagatctctcacgggggaaaagatgtggcgtctcatatatgtgtgtgtgtgtctcccatagagataagaagtgtgtgatacggtgagagtagacgaggtgtgtgtctatattcctatatatatatacatgtgtgtgtgtgggtgtaatattctcgcgctcatatatgaaagaacatatagaggcgcgaagagagtggccccgattggcgggcgatataactctcgaatgtgtgtgttgaaacctcgctgagagaaaacaatagatgtctccggacaactctctctccttttgtcggacagagtgttctcaacaaacggagggtatctcagcggtgagagactctctcgctgcgccataagctgtgttgtgggaaaaacatataaacanctccacatatttgtagtgcggcccnncagaggggtggtctcccgatgacagagcggcccgcaggagaggagtttatatcacctccgagcgagaggagtggtggtgctactccatgatagtgtggtgctgatgtcgatgaccaaaacaagacgaggggccgccgacgaacacgaacaagctggtcttatcacaagacgaggaagaggcaccccccactctttcttaatcttcatcaagcacatccaccaggctggtcgctcggtaggacaancatcaacggtctttaacaaccacacaacatggatgagcnatatcgtggtgggacccaaatagacgagagggacgtgcgacggcaanccnttcatacctaatacattacatcggttgaggcaggcactaaccgctctgctgggggctccgttcgtcgcgggagcggaccgacatacacctaacggtgtgtacttcactccccagccaactaaacgagaggtggtgtgcgcgcgactcccacccagagcaaacaactccacacacgcggncggggaggcctcgggaactaacaatatcaatgtagtagcgacgaagctacttactaggagagcacagagtgggccactaatcacccaacncccgccccnctgtgtaggagtaatantacaacgacgagaaaagaggagccgaatgtagcgttggcagtacgtctactaacaagaccaagccggcgaggagctactctaaagagacgcgaaccgtcaacaaaagacagggtcaggcggtgcgggtctgctcaagaacaacaacatatcacaacatcctatcggacgaagtgcgagaaggaggggcaccgctaccatcacaggacagatcatgccgaagagcgtcagctgtatgctctgatacagcccagccncacgaggaggatgaggcagntactcggggatgaacgagatatgcaggggagagacagcgaacgcaggggacggcggactntcccaacccaagacgttgcacactacacagaacagaccggccgagtgcgtagcagacgcacaaaccctcaacctagggcagccccaggacgaccccggcataccatcaacaatccaaacggcaggggagagaggatgacaacatcatagcggggcggcggagctacaacacgagcgggcgccacctaggctgagtgagtcagaacacgaagcataattactggacggcgcgcacgccgccaccacgaggtagcatgacgcaacacccccgcagagacggcgccacacaacatcggggcgacgcaacccagacggaaaataagtactactcacacccgaaaaacagatagccgcccgcggcgagcacacatcaagaggtcccgacagcacaagcaccatcacgatgagcagacagaacggagagaaggacacaaa

SEQ ID NO: 589515 - DNA, 883 bp, Homo sapiens
  misc_feature (45)..(45): n is a, c, g, or t
  misc_feature (65)..(65): n is a, c, g, or t
  misc_feature (88)..(88): n is a, c, g, or t
  misc_feature (100)..(100): n is a, c, g, or t
  misc_feature (102)..(102): n is a, c, g, or t
  misc_feature (130)..(130): n is a, c, g, or t
  misc_feature (142)..(144): n is a, c, g, or t
  misc_feature (154)..(154): n is a, c, g, or t
  misc_feature (157)..(157): n is a, c, g, or t
  misc_feature (160)..(160): n is a, c, g, or t
  misc_feature (175)..(175): n is a, c, g, or t
  misc_feature (178)..(178): n is a, c, g, or t
  misc_feature (208)..(208): n is a, c, g, or t
  misc_feature (218)..(218): n is a, c, g, or t
  misc_feature (223)..(223): n is a, c, g, or t
  misc_feature (243)..(244): n is a, c, g, or t
  misc_feature (249)..(249): n is a, c, g, or t
  misc_feature (256)..(256): n is a, c, g, or t
  misc_feature (300)..(300): n is a, c, g, or t
  misc_feature (312)..(312): n is a, c, g, or t
  misc_feature (314)..(316): n is a, c, g, or t
  misc_feature (318)..(318): n is a, c, g, or t
  misc_feature (329)..(329): n is a, c, g, or t
  misc_feature (340)..(340): n is a, c, g, or t
  misc_feature (349)..(349): n is a, c, g, or t
  misc_feature (355)..(355): n is a, c, g, or t
  misc_feature (382)..(382): n is a, c, g, or t
  misc_feature (384)..(384): n is a, c, g, or t
  misc_feature (391)..(391): n is a, c, g, or t
  misc_feature (397)..(397): n is a, c, g, or t
  misc_feature (399)..(399): n is a, c, g, or t
  misc_feature (415)..(415): n is a, c, g, or t
  misc_feature (429)..(430): n is a, c, g, or t
  misc_feature (434)..(434): n is a, c, g, or t
  misc_feature (442)..(442): n is a, c, g, or t
  misc_feature (741)..(741): n is a, c, g, or t
  misc_feature (783)..(783): n is a, c, g, or t
  misc_feature (866)..(866): n is a, c, g, or t
aaaaatattacaggtacacattgtaaaacacatgatcaccaattnaaaacaatctaaccagacanccttaacgtctgtcagtcaaccngaacctgaaatncnccccccctgacatgctgcaggcccaaancccatccctaannncccttccccnccntcnccctcaccctctccntcnccagagtccacaccaacctcctcataatcnttctcaaggncagcnatatcttcacgggcctttgnnaaatngccttcntccatcccctcacccacgttccagttaacaaaggcacgcttggnatacatcaggtntnnntngtggtccaggngagctcaggcntcagcaatngttgtngtgttgctcagcatgcacacagctctntnttccttngtcagntntccaccaggtaccatntttggaggttggtnntttntgccaacnttgaagccagttgggcaccaatccacaaactggatgctgcgcttggttttgatggtggcaatggcagctttgacatctttgggaaccacgtcaccacggtacaacaggcagcaagccatgtttttaccatggcgagggtcacatttcaccatctggttggctggctcaaagcaagccttggtgatctctgctacagaaagctgttcatggtaggctttctcagcagagatgacaggggcatatgtggccagagggaagtggatgcgggggtagggcacaggttggtctggaattctgtnaggtcaacattcagggctccatcaaatctcagggaagcagtnatggaggacacaatctggctaataaggcggttaaggttagtgtaggttgggcgctcgatatcgaggtttctacgacagatgtnatagatggcctcattgt

SEQ ID NO: 589516 - DNA, 352 bp, Homo sapiens
cgaggatcccccctgagatcacgccaccgcactccagcctgggctgacagtaactgagactcctctcgatagagggggtggcaacgggaggggaggggagggaaggagcaagtaggagaatagtcaattatgtattcatctcacaatcagttaaatggcaccttacataaggtaaacatagagtagctacctgtggaaatacttaacctttttatctgtagctatctacttattaacaaaaggaaccgcaatttcttgcatgacacagcttttagcttaatatttttcctttggcatagtgaattggggtctcgagtttttagtttcttctcacaatactaatggagatgta

SEQ ID NO: 589517 - DNA, 318 bp, Homo sapiens
  misc_feature (79)..(79): n is a, c, g, or t
  misc_feature (100)..(100): n is a, c, g, or t
gcagtatttggttttatgttcctgcctttatttgctaccctgaaacagcatggtactggcataaaaacagacacatagnccagtgaaacaggataaagancccagaaataaagccccatcctaaggccagatcttcagcaaggttgacaataacaagcaatggagaaaggactccctgttcaataaacagtgctgggataacaggctggccatatgcagaagattgaaactcaacccctacctttcaccacatacaaaaattaactcaagatggattaaagacttaactgttagacctaaaacttataaaattcctag

SEQ ID NO: 589518 - DNA, 232 bp, Homo sapiens
cggcggctgggccgagagacaggagggcactggagctgcctagctcctgcctggttttctggatgcgtcccagaagggttaccatgggggtacggaggatgggctcgacccaccacgtgactctcttctaacgaagctcccgcgcgtggtggaacgaggggacaggctccttcacccaacccaacaactccttatatcttcgcggcttgagcaacccgtgcgttggcggaca

SEQ ID NO: 589519 - DNA, 614 bp, Homo sapiens
cggcagcgatgcgcggtcgatctgaggatccccctggctctacctgtcgttgcgatggcatgatgtatatttagaaaacgccatcgtctcagcccaaaatctccttaagctgataagcaaattaggcaaagtctcaggatacaaaatcaatgtgcaaaaatcacaagcattcttatacaccattaacagacaaacagagagccaaatcatgagtgaactcccattcacaatggcttcaaagagactaaaatacctaggaatccaacctacaagggatgtgaagtaccccttcaaggagaactacaaaccactgctcaatgaaataaagaggacacaaacaaatggaagaacattccatgctcatggataggaagtatcaatatcctgagaatggccatactgcccaaagtaatttatagattcaatgccatccccatcaagctaccaatgactttcttcacagaatgggaaaaaactactttaaagttcatatggaaccaaaaaagagcctgcatggtcaagacaatcctgagcaaaaagaacaaggctagaggcatcacgctacctgacttcaaactgtactacaaggctacagtaatcaaaacaacatagta

SEQ ID NO: 589520 - DNA, 460 bp, Homo sapiens
tgagccctggagactgtcaggtcgtacgactgcaattcttctcagattcactctcttcctcattgttcttgttctgtaaatgactaagagagaccagagaccagacctccccacttccaatcactggttttgttgtagatgaactgcctcctttgctgtccggtacctaatgtggaccagacggtgctcaagaccctatcactagtacaacctcagtgtggaatgttaaatatgccttgcctggaagaaaaagaccaacttgactaatcagatcatcataactatgcatgaagtcttccacagaaagatgatgaaattttgttacacttccctaacctttgtctaaataagcattcccaaacatctacactttggaacactgacttctgttctttgagatgggtgcttcccaggtggcccatcctcaaactttttgcttgaataaactctctaaactaga

SEQ ID NO: 589521 - DNA, 129 bp, Homo sapiens
tacgtcgacgctggatttgactcagagaggacccccagagggtgtatacatcttccctatttattttcagcccttgagggcttcatatgtagatcaaagccaaggccccaggaaggtgacatactcctg

SEQ ID NO: 589522 - DNA, 346 bp, Homo sapiens
tcccggctatcacattatcaacaaacaggtgtcagccccgtacccctgcacgatgggacccacgactgcacaagaacgctaggtgcactacctgggccacctattagcgacccatgtaccgctgcgagtccaagcctggcttacgctggcaatggcatcatctgcggggaggacacagacctggatggctggcccaatgagaacctggtgtgcgtggccaatgcgacttaccactgcaaaaaggataattgccccaaccttcccaactcagggcaggaagactatgacaaggatggaattggtgatgcctgtgatgatgacgatgatagtgatgctgatgatggcg

SEQ ID NO: 589523 - DNA, 296 bp, Homo sapiens
  misc_feature (45)..(45): n is a, c, g, or t
  misc_feature (63)..(63): n is a, c, g, or t
  misc_feature (73)..(73): n is a, c, g, or t
  misc_feature (94)..(94): n is a, c, g, or t
  misc_feature (97)..(97): n is a, c, g, or t
  misc_feature (107)..(107): n is a, c, g, or t
  misc_feature (111)..(111): n is a, c, g, or t
  misc_feature (153)..(153): n is a, c, g, or t
  misc_feature (176)..(176): n is a, c, g, or t
  misc_feature (182)..(183): n is a, c, g, or t
  misc_feature (190)..(190): n is a, c, g, or t
  misc_feature (221)..(221): n is a, c, g, or t
  misc_feature (242)..(242): n is a, c, g, or t
gcaaacgtgggatgtactggtcatctggtagatgatcctcttccnatatgagagcttcacttntccagagctnatgagaaaggggtcctacaanccntgtcacccanatcnacacagcacaggatgtgaaggaggtcattgaatacgcacggntccggggtatccgtgtgcttgcngagttnnacactcntggccacactttgtcctggggaccaggtatncctggattactgactccttgntactctgggtctgagccctctggcacctttggaccagtgtatcacgtttgcggt

SEQ ID NO: 589524 - DNA, 450 bp, Homo sapiens
  misc_feature (37)..(37): n is a, c, g, or t
ggccaactttcccttgttcccgtgggcaaagggtttnggggggaccaaattggccaaccccccccttttcccttcaaggtgaagagccccttggggtttttggtggggcgccccctccccgccccccgggggcctgggattgttttcccccctttgccttaaaaactgctctttatgggtgggtttgattgatttttcccccccgcccgggggtggccttccccccttggggaattttcccaggccccccttttttcccttttttaaaccccccgctcccttccccccccccctttggaggggggtgtttttccccagtttccccttccggggttttcttgcccccctttccaaacccccccccaagtttcccttccccgggctccgggtccccctttgggttcccccttgggttttttttcccaaaaaattaaattttttttgggttga

SEQ ID NO: 589525 - DNA, 141 bp, Homo sapiens
gccggtatgcatacatgtccacagcgcatttcttccgcgccaggtcaagtaaggcaggtggtggttcatttttccaggccattttccacgggcaccatttccatcactgggcccagcacatttccatcaccagggccagca

SEQ ID NO: 589526 - DNA, 328 bp, Homo sapiens
tgtcatttgcaactcatggagattgaactggtattttcatagccattccttgcatgccttatggctgtatctctccacgagttcttgtccattccagcaaagggtgtcgtctctcgccacagtgttgtggatgcagatgtagccaggcaaagacactatagaagctgatgacagactatcaaatatactagaattagtacccttcttcggctggataaggtttcttcatgtcctacatgagcaacttttaatactttcttgtcaataaagagatcttcaggataataagcagatctatattggcgttgttgagaatgggcacattctt

SEQ ID NO: 589527 - DNA, 617 bp, Homo sapiens
cggaagaaccaggtgcgacgcacagtgtctgaggaaaagagggtcccacaaaggcccaaccatatatgggggtaaaaaaaagcaggaggaaaaccacctatttttcaaaagcagcctataagagtagctttttctctgaaaaaatatgcaattggggaccacacggcgcctgagacttggtggcgaagaaactaagatctggcgacttccctcccgtcaataagtaattaaacggccgcccccacataataaatctttggaaaaacatgtgcgggatagaagcaatggttatccactgacgcaaaaagcactcttctgtttgagaagttcagagcgagagactctctttaaaaagatcggcaaccacaaacggggtcctttcaaaagcgcgtgtcctgcgccaccactggaatatatacgggtaaaataaggagatggagatatttcaaagaggcattacagagcactcttatttatcgcataagcgcacgatcccctgacaactagtgagtgaagacggcattacacatcctggccgagatagtatcagttgtgtgacgaaatatacagataggaaaaatatttttttttaaacaacagcctcgttccacaaaaca

SEQ ID NO: 589528 - DNA, 678 bp, Homo sapiens
  misc_feature (93)..(93): n is a, c, g, or t
  misc_feature (145)..(145): n is a, c, g, or t
  misc_feature (149)..(149): n is a, c, g, or t
  misc_feature (162)..(162): n is a, c, g, or t
  misc_feature (239)..(241): n is a, c, g, or t
  misc_feature (253)..(253): n is a, c, g, or t
  misc_feature (296)..(297): n is a, c, g, or t
  misc_feature (299)..(299): n is a, c, g, or t
  misc_feature (316)..(316): n is a, c, g, or t
  misc_feature (322)..(322): n is a, c, g, or t
  misc_feature (324)..(324): n is a, c, g, or t
  misc_feature (332)..(333): n is a, c, g, or t
  misc_feature (340)..(341): n is a, c, g, or t
  misc_feature (351)..(351): n is a, c, g, or t
  misc_feature (364)..(364): n is a, c, g, or t
  misc_feature (370)..(371): n is a, c, g, or t
  misc_feature (382)..(384): n is a, c, g, or t
  misc_feature (387)..(387): n is a, c, g, or t
  misc_feature (389)..(390): n is a, c, g, or t
  misc_feature (408)..(408): n is a, c, g, or t
ggcggcagccgtgcgacaggatttggcccagctcatgaattcgagcggtctcataaagatctggctggcaagtatcgtcagatcctggaaaangccattcagttatctggagcagaacaactagaagcttgaaagctttgtggangcantggtaactgagantgtcagtctcgtgatctcgcggcagttgctgactgattttgcacacatcttcctaacttgcctgatagcacagccannngaaatctatcantatcagccttgggaaagaggatccagacctagagtcatttcanntntgaggagcaggttgctntccatnangacagcanncttggcnntctatactantgaggaaacgaangaacgnnttgggacgcannntgncnngcccaaggtgttgcgtgnggaattcctttggaagacagggacaacaagacacgctacaactggtagacttactaaacctggcacgagcttagcttgcacacgattgcctagcggctactactctggcagcgatgactgagtccatgtccagggcacgaggctttacactaagatccgaggcactctgggtgcttcagcaagtgagatcaagccaactgaagcaagttacgagatacagttactaaggtatgcgtatgctacgtgtacttgacttatagaaggaaacct

SEQ ID NO: 589529 - DNA, 362 bp, Homo sapiens
ccggtatgtctctagcccagttcattctttttactgtgtcacataaagcctaggtataacgtgccatggatacaatatcgtgccttatttcttttggtgctctagagctcagattgctgctcttctcttaggccctcttatccctaccgataataggggcaaaacttccaggcccgatcaggccaatgcttacacagtatgcctgtctatatctctggtgagcagatctttcttaactctgtgccactaaggtcaaattctaaaagcactcaaattatagctgttgctgccacgtcttcatctcttttcctctaagcaaaaaatcagaattaatgagctatacccactatcttcactgccat

SEQ ID NO: 589530 - DNA, 290 bp, Homo sapiens
attctctggtgcagtaacaaggggaaaaacaatacagaaagaggggagagtgagctatgcagatgttgattaggtgtttgatctctgaagaggacaaaaggggtcctaccggcattgggtattggttccctgcatggatgtggatgggacggtgtactctccatgtatgagctgggtacttctatagggagcgtgtgacgatggaggccatgggattgagccatgccatccatgtttcatgtccgtgcttgccctagtgagccgtgttgatgcaaatcacatagagattg

SEQ ID NO: 589531 - DNA, 273 bp, Homo sapiens
attacaggcatgaaccattgtgcccagccaagagatggaatttaaaagcaaatgcaggtatagtaggagcaaatggatgaaatagatataccattcagtaataagcctaagacactgctgtcgctatcttaatatcatatgaggtggattttaggtaagatatatagacatgaagggacctctgtagtgttagagagttattcatctcgtagacatatatcatagatatatgtctcatatagagctcaataatgagcaaattcccgcacttgg

SEQ ID NO: 589532 - DNA, 412 bp, Homo sapiens
tccccgtacttgcgctgggatattcaatactgatttaatgattatatactctgtgcatttaacaaaatttcacatgtaccccatgaatacgtataaatataacgaatcaggaaaaaaaaagaaggaaaagaaaaaaaaccttaaaggtaaagttggctaacttggagaattttttttttcttgagacggagtctcactctgttgctcaggctgtagtgcaggggcactatctcagctcacggcaacctctgcctcctcggttcaggcgattcttctgcctcagctaccaagtagcttgggctataggcccgtgccaccatgcctggttaatttttgtatttggagtagagatggggttccaccaagtttggccaggctggtctccaattcctgacctcaggtgatctgtccg

SEQ ID NO: 589533 - DNA, 387 bp, Homo sapiens
  misc_feature (30)..(30): n is a, c, g, or t
agtcgtaggcctgtgtaagactcctcgagnctgtccacataagatttgtgcactttagctgaatgtggtggcttacactggaatcctagcactttgagaggctgaggtgggcagattgctagaagccaggagttcgagaccagcctgagcaacatagtgagccccctgactctaaaaaaaaaatttttttttttaattatctgagcatgctggcatgcgcctgtggtcccagctacttaggaggccgaggtggaaagattgcttgggcccaggagattgaggctgcagtgagctatgatcacaccacttcactccagcctgggcaacggagcgagaccctatctcaaaaaaataaataaaatatttgtgcagttctctgtaaaaaaa

SEQ ID NO: 589534 - DNA, 191 bp, Homo sapiens
tctagaggatcctctgtgctaggcggagtgactggtgcatcaggctcgtacagcctcgactcctgggctcaagcaatcctcccgctcagcctcctgagtatctaggactacagttgtgcgccacatgcttggtcaattttttgatatttagtagagacaaggtctcaccatgtctcccagtcttgaactcc

SEQ ID NO: 589535 - DNA, 226 bp, Homo sapiens
atcgctagttcagctcttgcccacgggacactcatcaagtaggtgtgagttgtatgtctgtcctctacccccagaaacaagcctgttaattgttttgccttctcctctggcgactgtgtggtgagtcctttgttgcgtgatcaggttgcggatagacttgtaagggtgtttgcggcatacagtgtaagcattgtgaccgccaatgaacttgaatggtttgtactga

SEQ ID NO: 589536 - DNA, 287 bp, Homo sapiens
agattaaagagcagtcaaaattcctcagctagggaattcaaaggcaacttattagcaaatcacatcaagccttcctgggcttattccacagtattgacatagacctgtatatcttagacatcacactgttctctcgggatcgaaagtagtactgggtactgcatattgtgcagctacatctggcttgctatcttaacctttatgctgccattctttcaaatatttgtccagggcttaggggaagccattaaatgatctgacttaacactgtcgtcttgcccgccatt

SEQ ID NO: 589537 - DNA, 834 bp, Homo sapiens
ggcacaccacgagttctcctgtgaagggcccatgcttgccctagagtggacccagccctcacctcgcccgcagagctgacctgggagagcctgaaggggcatagagccaccgtaagtcaagggaaaaagggcagagcatgcaggggagatgaccatgatctgtagatggctacccggaaccgcgaccatgtaacccgatgaatccccccagctcctggaagagatgtcctaagatctcttagggacgccagacccggaaagtctcctgcatcccccattgctgacgtctaaggtggagagggcatatgcatccgtctgtcctgatctacggtgtctatgagctcgaaggggtaagaggcttgatgtagttgtcatggtgcctccagtcagactctccgtatcttgtcccatatttgcaaggggaggggatatggcggctggggctccagtcaccaaagctgaggtggcttctcattaaccctttaggactctgaagggtatggacctaacgtgaatgtgtgtcagggggagacttgtctggtgaggttagtggtcctcaggatgtgactagatacagtgcagtgtaataaaggaagttggaatgggagttagccgggcagtgaacgagtgtggggaaggattggatgctggggacaacaggaaggggcctcgggcgctcgtttggctgcactaactttggtagcatgcagtgtgcatacatagaccgggactggggagggagctaagcttgggctgggctgacttggggcttggcatagggtggaaagggctaacctggggctctgaccacacaaagacggggaggtgccctcg

SEQ ID NO: 589538 - DNA, 611 bp, Homo sapiens
  misc_feature (517)..(517): n is a, c, g, or t
ctgctccctcttcatcatgtgtgaaccaatacagacaaccatcccacatggacatccctctggataacaagagcttcctgagaccgcacagcatggacatgaagttcacctactgtgatgacagaatcacagaagtgattggttaccatcctgaggagctgcttggccgctcagcctatgaattctaccatgcgctagactccgagaacatgaccaagagtcaccagaacttgtgcaccaagggtcaggtagtaagtggccagtaccggatgctcgcaaagcatgggggctacgtgtggctggagacccagggaacggtcatctacaaccctcgcaacctgcagccccagtgcatcatgtgtgtcaactacgtcctgagtgagattgagaagaatgacgtggtgttctccatggaccagactgaatccctgttcaagccccacctgatggccatgaacagcatctttgatagcagtggcaagggggctgtgtctgagaagagtaacttcctattcancaagctaaaggaggagcccgaggagctgggccaggctggctccaacccaggagaagccatcatctctctggatttcgcgaatcagaacttccag

SEQ ID NO: 589539 - DNA, 137 bp, Homo sapiens
gtgaacccaagctctgccatttcctagttatgtgcaccttgggcaagtatttaaccactctgtgcatctattccctcatcatcaaaatggcataatattgttacttacctgatagattgttgtgagatcaaagattt

SEQ ID NO: 589540 - DNA, 492 bp, Homo sapiens
ttttactcttggcacctaagctgggccccaatcgcagaggtctaaggcttctggaaatttcgtgttccgtgtcaaggcgattttatgcactcacctcttagatgtatggggttataatcgcctgccaccaagcccggtttgttattgcttatggactgtggaacgtctcgaattgagaggttaaatcggaccggagctagacttgctttgacggggcctggccgttgctatgaataagaggtgtggttattgacagtccatatgtattagtgatggatggttgccaatatatgaataacaggattgaattgatcttgtgttggcatatggtggaatgatacaagctgacatgtgcatgagagtgcttgagaagatattgtttctaggaaatgcacattatttctgtgtggacgtgttttatttgggatgtaacacaccgggaacagtggcttgtacgtgccaccctggagagatgcaagagcccctgttgct

SEQ ID NO: 589541 - DNA, 863 bp, Homo sapiens
tgactcatttatgaactaggaataaagaagcctctattccctgaacccgagtgtaaatctttcatagtgctcagacaatacttggactcaatatccgacaattcttagacttatccatagttcttatatgtgaataagcccgttacgtcgaccactgtatcactgttgacttagactatgtttagcagtatagagccacataaatccttatagaccatggatacctggctataatgatccatgatccttctatagacagagcatctttactatgtggtcccaaaattctatatctttaattcacgttgggctagctaagaacttaatgcagcgctttaacgagcaactatggtgcagattcatcatgttcaacatccttatccgactacacatgtgtgccctgtgttgtggagacacataattgattgaaatgctaatgcagaaaaataggcacctagctcaattcaccatgtaccttgtgtaatgcgcgccacacaggtgtctgtcacatactggcggaggggtctatcactgcccttgtattagtggctttgctaaggaactttattaaggaccaaggaattgtttgggacttttgagacaaaattatactatcgattggccgtgggaggttaacaccattaagcctttgtatctcagccaagttacttgcgatccaattacgacatccccattagacacaggataggtgtattgcccttagagaatggtgacattcgttcaacccaggtcgcgaaaaaggggtatacattccattagtgagaaaacagtagagatagattgggtgtaagacacacccatggtgtaaaacgcgcaccaaagtactttgtgtgacccaaacg

SEQ ID NO: 589542 - DNA, 364 bp, Homo sapiens
ccccggtcccctggggggggccggtccaaattttttaaaccccccccccccccccccgggagggactcctggctccttgcgggcccgataacccctttcggcccgaacccccgggggttcccggccccaaatttgggcaagcttttctgggccccggcttttccagaatcccccccctaagaaaagggggtttccccaaaagaggttaccctgaccttttgaggccccccccgggccccttttgggagaaaaatttttgccttttgaaaagccccgggggtttttttggggtccttccccatttggggtaaacccgggtctttttccccctaataaaataaacccaatttttggcggcttgcca

SEQ ID NO: 589543 - DNA, 133 bp, Homo sapiens
taggtataccacatattaggctctgtatttagaaaacatctccatgctatctattaatcttctaggtgagcctgaatttaaatacatagggaatatgcatgggaatgaggctgtaggacgagcaactgctcat

SEQ ID NO: 589544 - DNA, 332 bp, Homo sapiens
  misc_feature (321)..(321): n is a, c, g, or t
  misc_feature (332)..(332): n is a, c, g, or t
gggattacaggtatgagccaccacgcccatccgagagaggaaacatttctatccttgcataaagtcgcgtgggcagcgtggctacactgctcaatgcactggatttctgggtaaagtaggggaagatcaaggaggacccaggggattttggcttgagccttggaagatgctgctcactgagggggggcagcctagagggtggggtcagttggcctcccctgcctgtgctgttggtttccaagtttccctctcccttctttgacttctgacagcttccgaagtgtgcacacagcctcttgtcagcacttgcgctctgccggngtaccgagctn

SEQ ID NO: 589545 - DNA, 253 bp, Homo sapiens
  misc_feature (171)..(171): n is a, c, g, or t
  misc_feature (187)..(187): n is a, c, g, or t
  misc_feature (222)..(222): n is a, c, g, or t
  misc_feature (228)..(228): n is a, c, g, or t
tggtaagtccatgttgtcaaatattgactatttttatattgggtgtcctacccaattaaaaaaaataagagggagaatgggcctagcagcaactcttatcatttgttattgatacaatcctaattcccaaagacaagataaaattgctgattactggctcaggaatatggntttaaaaagtggaagncattcattccttttccccaaagggaaatggcttangggatnccattaaacccccccggtgacccaa

SEQ ID NO: 589546 - DNA, 183 bp, Homo sapiens
cggatgtatgagcaccttgggaaaaagatcaggaggagtgcagctactttctagagcctcagctcacttctctccttctagctccagcctgtgagtgatgtaacgaggctagcgctggagagctgcctccctgtggaagcctaccctgcccagtcctgagtagtggacggctaccatgcatca

SEQ ID NO: 589547 - DNA, 1047 bp, Homo sapiens
cccacgcgatgcgacccagtcctgcgatctgcctagtgcagtgaggatacttggattgaagatgccatgtaatggaaagatactataggatctatccgccttttcttctatgaaactgcattcagtatggataaaggttgcgaaaatacagctataccagtggatgcgtgttatcgctgtactgtacccttaacctgtctcccctatataggaatggagtactatccttgaagatctggaatgtgaaggattgattaatcgaatagtacccactaatctatgaatcagacatcataagttcgatggtttactgcacattggtagtagaacactcgtaatgttgtcgatactcatttgataaatgatgagtgtgacccgtagttctacaacttcatgttacacaccatcgtcgtgtaattgttgctataaggggagtgatctcacgtcttctacgtgcaataccatgtcgcctcctgggttcccaactggtactctctgcatcccgaccatacctgagtaaacaagggatcaataggaaactacacacaatcacagcctaagacgtaaatttatttcaggtgaattctatacgctatgatgacctaggatgtatacaactcaatggtaggtgcgcaggtgcatgctattgcaccgtgctgtatctcttgttatccacacatgtttgaccctcaacacagtgttgccgtatcaactcgttgtagatccagtgaccctccctgccgtaaaacccagccattggatacttcatagtatcttgggcgtgtcacaaaacaatcgatgttctcgaaaagcaaagctcgtgggtcctgcacgccagaccgtctagcttgggagtatgatcattccccccggatcctattaagtaggccgataatcatgggaccgagggtcacacgtcctcctggaccattgcgccttccccatggttacaaggccacccgtgcagattaacaccctcttgtactccattggtacacgggctttcgacccacactgggaccaccatcttacgtcaacacgcccggg

SEQ ID NO: 589548 - DNA, 160 bp, Homo sapiens
tgacttgaggatccgcgtgggtaggtgggtgtgcactggtaggctgcatgtgctgggcagcaggtgcggtctcagcactccgggactcgaggctcgccctggcaggtggaggcaggttcttgacagctcctctgtcctcgtctctctgcaagtgaaccca

SEQ ID NO: 589549 - DNA, 119 bp, Homo sapiens
ttgtagcagctgaggctgaaggatgcttgagctcaggattttgagacagcctgggcgatacagcaagattccattgcaaaaaagaaaaaaagaaaaagatttttaataaggatccccag

SEQ ID NO: 589550 - DNA, 459 bp, Homo sapiens
ctgcaggtattcggcactaggagagtagtagttagagagagagagagagagagtgcgtgtatatcgacctatcttccgctcctccttctctattcctcctccccctcctccctccctcctccctcttcctcttccttccctttcttctctccccctcctcccccactctcctccctctccctctctcctctctcctccccctctttccttctcttctcccccctttccccctcctctcttctccctccctctccctcccctccctctcccccttttgctctctcctcctcccctcttctccttctcttctcctcccttcctcccttctctctcctctccctctcctccctctctctccttcccccctccccccctccccctcctctctccctcttccttcctcctcccctctccttctcccctctttctctcccctctcctcctctttcctttccttct

SEQ ID NO: 589551 - DNA, 717 bp, Homo sapiens
gaaagccacttctgctttctaaccccaggttccttaaatattgaaatcttgtacatttgtgaaattccagtatgtttgcttaaggtgttaataaaattagttgcatcatgtagtcattgagtgagggggagatataagccaaggattttaaatgacccttagctatagagaatttgctataagctagtcttgtttgtaaaaaaaaaaaaaaaaaaaagaaaaagaaaaaagtgtctttgtactggttttctggtattaagtaatgctgtaactggcatggcagtctttttttttaaatcaaatatagtggtgacgggccctgttgtagcagtgaatatagttaaaatacgtacgtttaaaaaaaaaattataaggcccttaccagttacggtcctatagctcattcctactagtttccttgcacagatttgtaatccccagtggtcccgtattggccactcaaaatggctctactatgctaaagtcctggtcaatagtcttaccctccttgaaacacttgaaccacttggatgactttagcttggaggagataccatctcccaggtggtgcttcctaagtcttggcaggcccctcttcccttcaataatctggtgctacgtatttttcaaaacaacttggtttgaaactggccttgtcctggtgtccagctcgctagctgatctcattcctcccagggtttccttaaccatttatag

SEQ ID NO: 589552 - DNA, 129 bp, Homo sapiens
aaattgaggtaggttatagtcagttatagcatactgaggagatgagtgaagtctcattcttgtcagtatgaaattatttcaaaattagttaaaaagagggtggaaagaaggcgggagagggagcaattt

SEQ ID NO: 589553 - DNA, 209 bp, Homo sapiens
accagcattgcaccatcttaatctaatcattcagaaagaacacattaacccaagttattgcatattcctattaagaaataaaagcaggataaggttatcgtgcaacaatcactttcctctctcttatccacttcattatcttatcgttaagtggatcatagagatgaaagtgattgtaccccgctaagttattgttccccgctgagtga

SEQ ID NO: 589554 - DNA, 435 bp, Homo sapiens
cacgaggtgcggaatgtgaccgatgccgtcgagtatctcgagctgggcggctggaatggcctttttgagcagggccgcgttcgtcgcgatcgggctgacccggtcttccgtgccagcgattaagagcacccgtgctcgcgccttcgcggcgacttcgtcggggctgtagccatcagtgagggtgaagcggaccgcctgccgaaacggagcggggttcacagcccgtgcgccattgcgaaccatggccagcaggtcaggcgaggtgtgcgagccgaccagcgcatcggcgcgggcgccaaagccatatccgccgctggcgatctgctgctctcgcatcgcgatgacgtcggccttctgcgcgtcggtgagcccacgcgggccggcgctcggtccgaccatcgccagcgtgacggtgcgctcgggatagtgcatcgc

SEQ ID NO: 589555 - DNA, 779 bp, Homo sapiens
ggatactgcgagtatggcggcgtcaaaggtgaagcaaggacatgcctccgtccggggggctatgggcccatcgactacaaacggaacttgccgcgtcgaggactgtcgggctacagcatgctggccatagcggattggaaccctgatctacttgggctaccatggaagcataatgaagatggaaccgtgagcgcaggcgcctacgaaatcgaggacttccgaggcgtcgctatcgcgctgtttgcctactgttacagggcagtaaaccgaccggagtgaccttgcatatgccttgcgggagaacctggtaggagtgaggccatcatcatgaaggactgtgcccgactgccaaggtgggggatgtctgtgttccagacaatccgctgggtgccccccttgatcggggagctgtacgggctgcgcaccagagaggaggctctccatgcaagtcacgggcttcatgtggtacacgtaggccctgtgccctccggtcacctggatcctcgtggcgctccgcccacctgggacggaataaagtgcttcttgcaagaccgtgttgaagaaaatgagccaaaatgcttaaatgatacaaaaaattttgtgggagacgagcgtagtgccgtagaaaagggatttcacaaaccaatgtggagaggggggccgtggtgtgtcgaaatgggtaaagtcgaagagggtaacaaaatgttgtgccacaagtgaaaatagcgggggagacaaagaaacggtgcggggatcttgttccaaaatgaaaatatacg

SEQ ID NO: 589556 - DNA, 324 bp, Homo sapiens
caaactgaacagtatcgtttgaaagctctcattattcaagctgtcactttttggcagggttggcttcccctccattttggcttgggtaactcctacttgccctcttgaggattccaactcacattagactcacctctctgaactggtctctcccgggttaccaggggatgcctcttcgttagtgctcccatacaccttcatggcttccctactcccttggtccttatcattctggtattgtcagcatcctgtctgttctcctggcgccccatattcttctcaacttggttattccctactgtgtgggatcctgggtacatctct

SEQ ID NO: 589557 - DNA, 341 bp, Homo sapiens
caccactttctttatgcacgtactttcgtgatgatttcgtcacattctgatacaaggttagatgtcaagcgacattgtagaggactgtgcatccatggatttccagattcatctatgctctcagggttagtcggcatcttactgtatacagtgtgtatctagacacaatcttgtgcttatacagttgtgagcagatctcttgtacaacgtctacatacttttggacatgcttgtgcctcatttgcctcaggtctctcagcaaagtctggtcctataaggtagaagaggaggtgtgcaaaacagtttccattgtgtgagtaatgttatcacctgtattagag

SEQ ID NO: 589558 - DNA, 628 bp, Homo sapiens
  misc_feature (249)..(249): n is a, c, g, or t
  misc_feature (515)..(515): n is a, c, g, or t
  misc_feature (518)..(518): n is a, c, g, or t
  misc_feature (579)..(579): n is a, c, g, or t
attaaatgttgggtaaaattgggtggttaaaaaaggagaatattttaacttaaaaagtgtgggagaagtaagaaataaatatgggggtttaaattttaggatatgaatgtgggaaaatgaacaaatgttaaaatgtgtttttaaaaagttaaagcagtaaataatttttattgattaagggataaattttgttaggtaagagacttttttgtaggaagaatacaataatgttttatagattttttaaanaatatagttatccaagatttaaattaagtaggattattattttctgaaggagggggtattgcagatgggtggtaaatacaacaaataagaaatctgagaatatgagaattccaatacggtgagagagaagataagttggcaacaggtgagaagaaaatattgtgggatttgaagagaaatgttaagtgtgttggctgaaatatattcaaagaagttaaattcagggaaggtgtaattattactttggactatataggtataagcantancaaatttaaggtagaaaatattgaaattagggggagattgtgtttttttataagatgacgncattatgaaggtttgtaggggagaaataataatggtcgtgattaattcc

SEQ ID NO: 589559 - DNA, 1726 bp, Homo sapiens
gggggaccaggcgccagcccaccctcctggggctgacatgagccattccctgctgatgcttcactctcctcccaaagcaaaccacagccaagcctgtctgagctgggcagctccccttccccagcccatgcgcgtcagcggacatcctcagctcgcttgttacttactcagcctgatgctcacacgctgcacgcacactccacccgatctccaccaccagacaccagctgcgccctgagccggcaccaccgctcgcccactgctgacgctcctgcctcctgctgggcgcaacacgagccacactagggctggaacgcgcaccactgctgccgcacaccgcgacacaccctttgcgcaatagccaccactctacgcacccccttcaagacactgcgcccatcggcacttactgcacacacagaacacctgacaataccacacccacttgccctgcccattgcctcccccatgactaaaactccccccaacacaaccccaccttccccccttctccaccccaactgcaaaccccaccccacttccaaccaccatcattcgactcccacgcgcaaccagcggcctgcccaccccctctctcatactaccctttacctcccacacccctcacttacacaactgccaccatcctatcaacccaccactgcccgcaccacccgcccctactcccccttcatgcgaccactctaccacctcgcgccctcacccccaacccgccacgacacacccctgcactcaccccgcctcccccctcgcaaccaccttcccttcgccctcggccaacacacgaccccaaccctcaccccaaaccccgccttcccccaaacccattccgccactccctcgccactcgcccgcaacccacacccccacaacaccggcacccacaccaacttgaacccccctcgcaccatctccaccacccacacaccaacacccatcacacacacacctcccacacaaccctctctccccgcgcccaccccacaacctgcacccacccaccaccccacccccacccacacaccccccccccccccaccacaaccccctaccccacacccccaccccaccccaccctcccccccccaccaccacccccacccccccactcaccccaacaaccacaccacgccacccccaccccaccacaaacaccaccacacacctcctcaccccacccccaccacccccacccctcccccccctccccccccaccccctccaccccccacaccaacacccaccctcacactctcccgacacacaaaccgaccacccacccaacactcacccacaccacccaacccacctcaaacaccgacaccacccacaacaaacacacaaccccacaaaaacccaacgccacccactacatccatcatttcacacaacaccactccctcccacgcccccactcacaccatctactcacaccactctacatcaacccacacacctccaatcaatctctattccaacactcatctaactccactcatcccttcaacaccagcactcaccctcaaacatcatacaccacaatccaacacatacacatcacaacgtgacacacaccaacaactcattcttaacaccacatactcctctctccacatccacaaacacaacccaccatccacccagagacaccactaacacaccacatacacatccaccatctctacactctctcaccacccccaca

SEQ ID NO: 589560 - DNA, 1052 bp, Homo sapiens
cttactggtgtgctgcatcaccctagaaacgtggctttggtgctgtgtgaaacgctgcctctgtggaagtctctcctcgctggtgggtggactgtggtctgcatgcgcgcccagctgttcttctgctgtgttctcacatgccctgcctgcctgcctgcctgcctctgtgtggaccattttgctgggtgatgtgccctcagtgtcgagctgcctgcccattgcagaatggctgtggaaagagcaagatgctgtgccccatgtgtgccctcttgagctcctgtgctccctgtgcactgtccctgccctacgtcctaccgactatgctgtgtgatgccctgtggggctgccatcgtgaggtggaaacccttctctgtgatcacatggcctggtgagacaggagtgggcctgttggctgcccatcgctgccaatggcttccataggttttacggcacaatgtttattcgaaaatctatttatagagaagaaacctgggaatgttatacagggcctccattaatatagtgccccaaagtagcttaggtgaagcgcgcacaaattggcgggccccggaccatccagagatacccgctttgacaacgcaccttgcgcaagacattacctcaggggattttaaacatgtgggaacactcaatctccggggcacccctaacaaagcgcaccaggtcggggagtgaacccatagacgacgaaaaagctaaaagagagaaaacgcgggagaccaataggaacgaggccccaaaaaaagcacagccagggagggatacactacaagagaggagccaataggcgggggacaaaacaaacggggaccccaaaaaccaatgagaggggggagcgagggaagaaaaaccgcccgagagagaaaggacacagggtggggagtccctgtggggcccgcggaagccgtggcagcacaaagaacaccgcgagggagataagagaacccgtaggggacaaaaaagcgcgaaaccccccgtggaggacacggtgacccacgaacaacagacacaagcggctaactcgcaaaaat

SEQ ID NO: 589561 - DNA, 1414 bp, Homo sapiens
  misc_feature (1115)..(1115): n is a, c, g, or t
cattgtcgttccttgtttgtccgcgcgctgttgtgtgtagtaggcacgtctgcttgtttttctccggcgcggtttttttttattgttggggagaaaataaataaggggggggatgtccccccaaccatttgttgtgcacactcacaggggcccaatatgccctctaccaactgcccccccttggggggtttttgggggggggccctcttttgtgttgtttttcccccccctctgggtttataccctcccctgtgggtagttgggtgtaacccatgtgttgttctggtggcaacgtgaccacaccgttggagtgtgtttctgtgggttgtgccccccacaggagagaggtgtgcccctctttgggtgcgcttatacaccccccgccttgtggtttttcaccggcgggaatagtgtgtttcctttgtcgcgcatgtttggttaccgcttggttcgccgccattgttcccccgcccccggcggggggaaaaagggcgttttttgtttatcctgtctcctcccttctgccgtcttagtttgttggagaaaacaatattgtttccgcccgcgcgtggcaccgtttgttttggcgaggaaaattttctttttaaggaacacaccatgtgtttttgtcgggagaccacttcctcacacacggcgggtggtttaataattctttgggggtgtacaccaccccccgtctgggggggcccacaccaggagttctcctttctcctccttctccgcgagaagataatagccttctttgttgtccccccccctcgcccgccgtatgttttgtgttgtgggaaaagagtggatcttccgcggatgtagctcccgcgcgagatcgtggggagaacaacatgggggttgtcaaccatcgttcccaccggtgtattcccccccgcctcgcgcacgtgtgtttcgccccccacctgaggcttgagatctcactcggggctctcttttgcgcacatcttttttggggtataaaattggagagagactcttccggcgagttctctctggtctcacagggtttgtccccccacactatgtcctctgtataagagaggagagcctctggtgtggctctgcccacagcccctctgggnggccccggggcacacacaggcctctggcgcctctgcaccctctgtccctccacatacccacagggctcctccctcctgtctctgggcctccaattgtgaccccctggccctcttcttaccagccccggccctgtggccctgttcaaaggccagaacccccgaccccttgactccccgggtggggaggtggcccaggatagctggagactgaatccagaccctgcaccagattcttccaggccatttctatttccaccatcgaattgaaccaccttggccccaataaagttgaaatttta

SEQ ID NO: 589562 - DNA, 1974 bp, Homo sapiens
  misc_feature (1435)..(1435): n is a, c, g, or t
  misc_feature (1831)..(1831): n is a, c, g, or t
tttaggaaaaacccatcggctcagaaccgcaagaatctagatcaacctggatactccattacaggaccatagatctgcaaggtatccgacaacgtcaatggtgtagagaacagtcagcgaaggacctacttacataacaaccaagatgtatgagtaccaaggcatgagagatcaaaatgactgacggtgaacctcccattatcacagactggcattcaaaatgagaagaagacaataccgtatggtactccaactgttacctaagcgcgaataagatgccacacgagagcactgctttcaaagcgtagcagaacataactaaaaccgcgaacatggctcccaattgtctaactactacccgaatgcgagtgcggagcaaatggacagcactatgccatgtcttccattggtgataagggcaccggcaatcaacaccattggatagatatcattgtgcgctcacctagtcgcggcgctccaaaagataatagtacttcattacgtagtatactcagtggcttaaatcgctccctactacaaaggggctacaccatagattgttgtttcttcgttgtccaaccctggacatttagcgccataggacaaaccctgtgagcacgtatccccataaattagttggataccgcaaacacggtacaccagccagctctgtggcaatttttggcgcccacagaaggttacgaaatcagcttccaaaggcctctatgtggcagcaaaccccaaaaaagtcctaagtgaaagcagagactaccattggcgtcacgcataggaacctttcaagaaaacccatgacttgcagtaacaccagagtggccctaaacggagagttataggcccacatggcagcacgacccactcggataacctttgggactaacgcaagaacagtcacagaaaggaactaagtaggaaagcccaatagtgtgcacgaacaagccaaaacacgggttcacacccatccacggcaacttgactcccttggctatagccaaaataattcagataatcgactattaaactcaattatcatttctattgcaataaacactgcgcttggactctaccgaccaacactccacggaagcgacattgtgggtgccatgagacgggatataccgccagataacatacttaacctctatccgctgtggctccgccctgtggttggcaaaccgacacctcgggacgcataagagcgcaacgactgctgttatagcacacggagcacctggaacacacactgggtgtagtatcccgttgttccgctatcatatgctgcccattgacattgacccaaggagcgtatcagcctgacacaatgcggcggcacaatcaccacagatcagccatcacacactgtgagtcggagacaccctacaagcgacacccaaaggagcaagtgtcccaccttganaagtaagcaacaccaggatggcggcgaagcaagccagcaatgcagggaggcacaacaaagcgacaaccaatgcacacggaggcaatcatcacgttgatctagaccaaccaactcgacaccgacagaaaggatggaggtcacacagcgaagagactcagacacatcagcgagtcccagcaggacgaacatcacatctcagaaacacacatggaggcagagtgcgctctcgcgagcacgacagcaacgaccacgtcactgcaaccgagactagagccgacgccagcacgccgcacagacggaccgcgacaatcgagtcccaactacgtctcgccatcagcagcagcgcacacacaccgccgatcatcgccacgccactacgactgacacacgcttcanaaatcaacggcatcgatcagcacagctcatcgacacaatcacgaccagacatctgagtgcgatatagcatcgagtcacagcacactcgatgactctcatcgtcgagtgcatcgatcatcggacagatcagatctgattggaca

SEQ ID NO: 589563 - DNA, 326 bp, Homo sapiens
  misc_feature (4)..(4): n is a, c, g, or t
  misc_feature (94)..(94): n is a, c, g, or t
ccgntaggagagtccttttttaagcaaagtgcccctgcaggccgggttttgccgccaggactgcccccttcccagagccctgtacatcccagantgggcccagggtttcccatagacagcctgggggcaagttagccctttattcccccaccagttcctgaatggggtggcctggccccttttttgcttaaaaaatgccctttatgatgccctgattccatcccaggaacccaacagagctcaggacagcccccagggaggtggtgggcggcctgtaattgatagattgattatggaattaaattggggacagcttccaaaaaaaa

SEQ ID NO: 589564 - DNA, 1256 bp, Homo sapiens
tggaaacacagtcttactctgtcgcccaggctggagttgcaggtgggtgcgactcctcagcctcacgtgcaagcctccgcctctcccgggtttcaagttgactcgttccggccacagcctccgtgagtatagctgggactacagtctcgaagcatttcagcaaacaagtggcaaggcagagccaccaggaaacgtacaccgtgattttctcattgacaaattacggataagtgcgtgtatttagcatagtgtggagccacttttcgtgtatttgttcaccatgtggacatttttgttggcaacacaagttcggaattagcaagtggacacctgttccccgtgtttggcagagtttaccccaagaggacagtggagcgaactcagctaactcactccccagcgtgggtgttacactactgtgaattgtggtcttacaaaaaccagccctccaataatttgatgtgccaaatcttacaagccacttgggtataccccccattttaaggattttgtgcgcattctatgtgacacgacacactacagcgctaccgattttgtgcaagcacccttttcatagaacacacacagacagaacaaacaactaaacacacacccacacaagacaccaacacacacgacacaacttcccgtacctcaacaaaaagaggacaggaaggagggccgggcgcagaacgtctaccctaggcggagggaaggagcgggaagagatgcgcgggctcagcacagtacggaggcaggagggaggaccacaggcgcgcagcgccaatgcaaaggaaccataacgggagtccgaggcgggggcgacgagagggacaaaataaaacatccccaccatagtctcgatctcaacactccacacaccccactaatcagacttaccatcaccctccattcatgaaatcatcaaattacacaacatgacacttcacactctaaaaaactaaaaccaaccccatcccaaccttcatccaccaaatcatcatcatcaacacacaatgcaggcagcgtaaagaagtaatcggacaagaggagagtagtgcaaaggcaaaggaggagcgagacgaagaacacaccgaaagacaggacgcggcagcgcaggcatagtcggacaggtggggcggcgggcgatggtgtggtggtgggtggggggtggcggggggggggcaggggctcggcgcggccgcgcacgtgagcgggcgctcagaggagcggagtgcgacagtagtgggcgcgga

SEQ ID NO: 589565 - DNA, 1683 bp, Homo sapiens
ggaaaaaaaaattattaatagctcaggttaaaaacacccatttaaacaaaacacaagagcattcgtaactagcgaacgctgctactactacacaacaaacacacttgctgactactgtagaacaagcattctcatcatggttttaacaactcatatgctcagacggcacagactcgcgcgctacactgcttgactgtgactaccacatctcactgcacaaccctgctatcatgacctaccactaactcctacttacttatcaacttcgctatgactctcagctcacaccctacagaaaactcacaccactacctgctcctagacagatcaccattccaaatcataggaacgcccaacacacacatagcagcacatatgacaaccacatttgacgaaagagagttagcatcattatacgaataagatatctacgatatacacctacacgctgaacccttgctgagttcacaaacaacgacaaacaacacaatggcccccaaagcgctgcgcgcgcacaacacctcaccatctttcccttgctgaactatcccactatcgacacacgacatacttataacaaacctcatcatgaacacaccttagcttatttcccacaactatcttcatcatacacgcgcacaactgtgacactccttacatacacacaccggcgccaactactcttaccacctggcacaacacccactctaaaacaataacgattaacatcacaagccacaccctatacacattcaacgacatacattaaccttacattggacaaagtaaacatatacctaagaaccaacttctacaccacaattacacttaaacttcgcaaccttttcaaacacccaccacctcactctcttcccttaccacctcggacccctacatttggaccatacacccacatatcctcaacattacccatcaccactgcaaccaacatccctacaacaccctacacaccacaacacacaacaccctattctacaccactagccacatgtcccatctccaaccaccccaacaaaccctcgccaacacctcaactcacccccactcattcccactctgaccaccatctaacacttcacctctacaccaactccatccactacaacacaccatcacatatacacatcctcattcctaactttcactacaacgtgcaacacacccaccatcaaccacatcacacatcacagctctctaatatccaaaaaacgctcacaccacattcctaaccaccctcatcccactcccaaccatctacataccaacacccacactccatccacaccatcactttcaccacacacattcatacgtacctctagcatctcacacactctaccagcacaatgcaacactaccccacacaactcattcacactctaccaatcaaacataacacactctaatcctcaaacactagctacgactaacacacacctcatatacacactaacaattcataccaacacaaaacatcataccagacaaacaatacatcacacatatactatcatccttaacacaatcacttgtcctactcacacaacacactatccatcagcaatcacactattctatcatcctcaactacaaaacacacacaaataagacaatacacaactaaatatctcacttacacattctatctaccacacatgataa

SEQ ID NO: 589566 - DNA, 268 bp, Homo sapiens
taaaaaccttaaaaaaaaaacttttacattttaattatataatacattcagcttaaaacttacgttcgttaaacaccccggcattagcaagcagtaaagtgatgattttaggatctttttcaagttgcatgacgtgcttgctttcatttgataggagagtgcatacgttaatagcaaagtccacttcatttgggagtccagataacagtgaaagcaccaatttattataatcatttggcgaattaaagtccatggacagcccataact

SEQ ID NO: 589567 - DNA, 439 bp, Homo sapiens
gaaccagggcaggtggtggagaaggtgtcatcggagctgagccttggatggcatcccagcagccacagctggacaagcaaagctgtgaggggaggcaagagctcaggccatcctcccatccacactggccaaaatgaaggactcacagaactgtgggaagtatggctggagaagtgactttggaagtgtctgtttactaaagggatgcatggaaagcacattcatatagacataaaatgtacacgacttggtcagtcacctgaggcttgttggtgaaaggaagttacagatttcaacatttgctgtcaagctcctctattatagaaataggagaggtaacataattggctttgggagctgcaagtagtttgctttccagtaacagcatctgttctctctgttctctctctcatactcaccatactatcatgcccacatt

SEQ ID NO: 589568 - DNA, 243 bp, Homo sapiens
ttcataacaggacgacgggttctcatgtgagatctatgctcctccacatgcctgttcacgctctacgcgattctcacatgttaccatttattacaggttactacaccttttgaaggtcatgttctggtcagctcttgtgatctgtgtagtggctgtgtagattcatgcttgacttttaaaatcctgggcattgtttgtgctgagcctcgtatgtttgtcagttcatgccgagtccgctgcatt

SEQ ID NO: 589569 - DNA, 635 bp, Homo sapiens
gcagaggaaaagaaagaatcagatctatagtcatttaaatatttcccatcagcatttacgtaaaccagtatactaaaaatagtagttttggttgagatttttgcacattaacttcctttaatttgtgagaatcctgccttttgggtggtgtcctcttatctgacaacacagttttaaatgctggctttatctggtttggttggtttactaataacacgtagttttggacccgtaattacttaacagctaggcatgggggagaccgaattggactgggccccaatcattgttctaccttccgtgagctgtgcagccataggcaactcccagcttctgctgtgcacctgtcttgagctggaaacaggtggcgggaagcattctcaaaggccccttctagcactaactttgtatgttcagtaaatatcagttccctggaccagctccttttattctggtacagaattattcttagcctatggggtgggggtggggggacagtagtgtctattatttgtgaattttggaaccagtgtcattactttacagtcaaggaggcatgttagagtgtctggattttatcccttgatacagcgccccatcccacataagagatgtcacttcaattgaaaactcga

SEQ ID NO: 589570 - DNA, 1121 bp, Homo sapiens
  misc_feature (998)..(998): n is a, c, g, or t
  misc_feature (1121)..(1121): n is a, c, g, or t
ccccgccctgtggtcacgctgtaatcccagtctcagggaggctaagaggcgggaggatacttgagccaggagtcgagactgctgggaatatagcgagacccgttcaaacaaaaaaaacaacgacaaaacacaaccagaattgtgcgcgcgccgcccgagccacccaaaaggacttccaaaccaatccaggctcggcggagcgggcgcccagaagagacgtagacacagcgcgaaacaccgacgtgcccaaaggaaacgccgcggagcacgcgacagagggacggagagccacacccaaaagcaaaccacgccggggggcaacacccagaaggtgagagacacaccaccagcgagagggacctccaccagacaaaacacagggagagtacaataaaaaaccgggtagcaacaagagcagcacaccaataaaacacaagacaccaccagccagtaaggcaagaaagaaagacagacaaacgacacagcaagaaaccaacaaagacaagcaacgaaagaacaagcaaaaaccaactaagccagaagcgagacagagaagacacagcaaacacagcaacaaactagaagaacaagccagacccagcaccagcacagcaagaacagaacaaaaacgcaaaacagaaacagagacagaagcaaacaagctagaaagaagcagaggaaagcgagaggacaggaccagaaacgcagcagagagcgacgcagaagagagcaagaacacaagaaggacgagcaaggaggagagaggaacagacgagcagcagaaagacgagcaaaggagccacgacagagcgaacgagcgccacggacgaaaagacacgacgagcgcagagcaaggacacgacagagcgagaaagacgagagaagaaagaagggcacgaaagacgaagcagaggactgggcagcgaaggtggaagacacagacagcaggacaggggaaaagaagaaacaggcaagggagagggagaacacaggaagangcacggcgacgacgacgaagagagagacaagagagcgcacatacaacgcatgacagcaaggagaaggacaggccgagccagcagaacactagacgaagacgacaacgagaaccacgatgaagn

SEQ ID NO: 589571 - DNA, 661 bp, Homo sapiens
ggaaattaagaccaggtgtttgttaatcttaactttagccaagacaaacaccaattcagttacttacgtagggatgggtctcaggctgaggactgttctctaccaacctagaagcaggaaaaagtaaactgatcttccgtgttggatgcgcgctcaaattccataaaggagttatttgtcttacatcggcatggaggcaggaaaaacttgccttccttgtgttggaagcaagttaaactccaaaaaaaaaagatcagggactttctggagggcgtgctctcagacctcagcaaattgtcctattggtttgagacataaagttagctcatgctggtaccaggcaccgattggagatttgtcaaaggcaggggcatctttaattaaaatccgtttggggtaccaaaaggtgaacactgaaatttgggacaggtctcaattaaattaaaccatttattttgccaaggtaaaggatgcatgcctgtgacacaagctaaggaagtcctgacaccatgtccccaaggtgggtccaggcccagctctgattttttacatttaagggggaactggaacctcatttatatttgggagagggccaagggtcccttcaaaaagctaggctcttgagctaggtgggggttttcgcgctcagttgtagcatatc

SEQ ID NO: 589572 - DNA, 118 bp, Homo sapiens
gtcacatgaccatcgcccgtcaaggtccctattgaaatggttataatacaaacaaggaagcacatggtacaaaatacttatgtattatgaatccagaccaaattaaatatgaaacctt

SEQ ID NO: 589573 - DNA, 377 bp, Homo sapiens
gcctccaattgcagctgactaaactaaaagtgaatataattagcagatagcacagagtagtagcagaacacacggatcacatccaaatacagagccccctagtctcgtgcgtagagtaagactcgctcacacgaggtcacaggctagccaggggtccaaggcttaggttgtgagcaatccaccatcctaccacgagtacaggtaggcggggtgttcgtgcatcatgtacgtgcaccagaggttggcacccagcaccttcagctggccctgggtcccagcctggttgtccaccaatttgttttctgcattcaaaagacacacttccaactcgaactggttactgcacttgacggagatctggtaattcaccagccctg

SEQ ID NO: 589574 - DNA, 795 bp, Homo sapiens
ccaactcagctcagctgatcggttgccgccgccgcggcgcagattctggaggcgaagaacgcaaagctgagaacatggacgtttatctgctcgccactccgcgccatgggacggatttcttcccgggttccagatccgctttgcccggccggacttcagtggacatttccaaatggaaacgaagcctgctgtagtgatgcaacctgctctattacctagacaagcttagctggtggtggcgtgccaatgatgattgtccatatgtggggtttcgtgagtcccttcaacatgatcctggcaggactcgtggtggtgctggtgttcacatgggttttgtgtgggcatgcccacgaataatgacgtccttcgccggatgaagaatgtgcgtaccccaccgactgttcgttccatggtggtcatgttggcgagctatttccttatctccatgttttggaggcagtcatggtctttgtgtcttggcaatacttttgctttggctgtgaatgtagatccgatgcatcgttgaagactttcggaaccttcaaggaacaagactgcgagactaatattggcccggagtagtgttgtgaacgagagaccccgatgggcattgttcctcggattgccctaagaaacagctgatgacagaaggcatcgaaatgaattcaagttgagtaatatcagccaaggtttaggggattaacacttaaatttacttgatgtatggttggcaaaaaattgtgttgcagttgcctttggcaaagcctatgttcggtgccgtttgaaccaggggtc

SEQ ID NO: 589575 - DNA, 505 bp, Homo sapiens
gacgcacggagggtgaggtcggtacgcggtggtggctgtcacggcgccagctcctcccgacgccgagaccattgtgggctcagctaagcggcggcctgcggcgcccctgtgagcctgcgcaaacccaggccctagccccatgccccagccgtgctggctgccggaggggccctggaacaggccccggcgatcctgcccgcagacccagtcgcccaagtacccaatggctcagcaagtcaccaggacgccggaggcccccagcaccagtggcgaggtgccactgctgtgaccgaccggttgctgcttctccgtcagttcgcccttggcatcgtttcccgttggtaccttcgacggccgttccctcgcgccagggacttgctccgcccgggtccttgctcccggccgttcccgctgttcgggcttcttgcccttgcccttcgtctctccctccttcgcccagcgttccccatgctggtcgtcttagcacgcacgcagtccgcatccc

SEQ ID NO: 589576 - DNA, 175 bp, Homo sapiens
tgacccccagcgttttggaaaaatgggtgtttgtttaaaacaataatttggagggaagtggactaaacagggtttttaaattaaggtttgtgtttatgtatttgtatttgcaaaaactcacccataaatgattttccctgtaagttgggtataaaacaagctccccttggtttca

SEQ ID NO: 589577 - DNA, 1270 bp, Homo sapiens
  misc_feature (1029)..(1029): n is a, c, g, or t
  misc_feature (1164)..(1164): n is a, c, g, or t
  misc_feature (1245)..(1245): n is a, c, g, or t
  misc_feature (1265)..(1265): n is a, c, g, or t
gtagtgcgtcgatatgtcttaacgtcgagatgaagatttgactgcctgtgtagtacaccgctcaggccaacaaggccatgtcacttcgtcccgtgatacttgtttgttatttacgtatttttgttgttgtagttaacatcaacacacccatacagttactccatgtcgtcgtctatcgcaataccatatgcgagttcggcggctaagcacataggttgatatacgtggtgatgatagtaggtctggaggtttacaccagacgctgacgaatgtgtatctagaatcgatagttcatagagtctagtttctgggttgtatgatagcacaacacacaccaccagtcgcggacgtgttatgggtagtcaatacaggcgcggcgactatatactctatcaaaaccaatctcgatagagtcagacatccacaattgtgtacgattacaacatactatattccccgctcccagctgagtgcatgtgttcctatcactttattcgacccgattgtgcggatgcgtatgggcctaggtttgtgccgctatcctatttaaatcggatgcgtaaagggagttggactgtctatattcacgtgtgggtcacattagatattctttatgatgtgtgtggggagaggccatcaccggcggggtgtgaaatagatactagtgtggggtgaattgtggacacacaataggtgggggacacaccacatccgatccccccacagtcaaaatcattttcacgggtggcaaaatcggtcgggaggtggtgtggaatatatagagtgggatcaatctagggtggggtgtaacatccgacgtgaactcaatcggggcggttgatgattgttgcgttggtgcgacactaaaaacactacaccggtggagacaccggcggtggtgtgaacggacacacgctgcggggtcgtgcggtctatctccacgggaaacagaggtgaacatcacacgcgtgcatacatcacgaaccgtgtcggggtttgcggtggtcaccgtatgatattcgcatcatngatatgtcgttgcgagtgaccagacgtagtacgcgtattattttcgcggtataggtttcttattatgttataatattgcgcactggctatgtgcctagccgtagtaatatgcataatcctcacagcgtgatgttngcggacacacaaatgagtgagagtcacaccacaccgcgcgtatctccagatgagtgtgtggctgcgcactgcgtcggcctnacacgggaggatcagcacangcgcg

SEQ ID NO: 589578 - DNA, 126 bp, Homo sapiens
atacagtatgccgcgacttcaaatggtcagcgcgcggatgtacgctgtccagaccggttctcccacaaacagcgcatggcttcgtgtagttcttctcgtacaccgtgaagcggtgatagatccccg

SEQ ID NO: 589579 - DNA, 845 bp, Homo sapiens
gaggggagcccaaaaacccaggtggcaacgcacaaggtacgtggtgatatcaatcgtgctcttgtgcggagaccctggcacttagtgaattcgcatatttctcaagtatattgagaaacgtgtccagtccgagccatcttcaccactggtcaggcggcgtcggctgtgggcctcaccgggtatgtcctagcgtgaccctgtcagcatgcgagtgcgcaccttggtaggctggggccctggttctggctgaccgagtgcagtgtgtctcattgatgaacatttgacaagatgaatgatcaggacataaccagcagtccatgaggccatggagcaatagagcatctcaacatctcgaaggttggcatcgtcagcatccctgcgggctctgctgtactggttcattgctggccgccaaatccccatagtgagggcgctacgagtccctcgtcatgactttctctgagaagcgtggtagctcacagagacgccatcatctcacgctttgacatcctgtgatgtggatgacgggacaccgtggacccagtccaggtacgagatgcatggccctgcttcgtggtgagcagccacgtgagacaccaccctgagtaagcaaggagtgaggagggcgctgggcaatgtgcagcgctgctgagcgcgcatgcctacatgtatggcgtgagccctgcctcaggaggtctgaagaagtagatcatctacgccaaagggagaggggccacccgaaggtcgacagattgaccaggacaaggtggcccagatgtaccgtgactgggtgaagaatctatgggaacgggacttcccattaagtggcgggcatcgaggcagat

SEQ ID NO: 589580 - DNA, 736 bp, Homo sapiens
  misc_feature (186)..(186): n is a, c, g, or t
aaggagtggcccgggctgggtggggagttccggccaagctcttctgagaaatgaggagatgaaaaacaaacaagggcaggatggagaaactggggccaagaaagggatcagaagaaacagaacggggattggagaattcaccccaggctcctgaggggccctgggctcccgagggagaacaacccntcaattcggtaaacgaaaaagctgggttccctgggagggtactttctgagaacttcatcctcgaagggctggtgggtaacgggctcttttcatcttcacggggcaaccaacagaaatgaagcagagtgggctaaggtcacagtggcacaggggctggtcagcaacacagtggctggggtgggtcctccagatggcccgaatcttcaggaataagcccggagccatgggagcttacaactggcagtctggaagcacgagatgaattgcgtggaatccacaaattacaaactatgggcattgaagctgaacttggaggtggcaggttgggttatcttggttattttcatcctggagatacttcttaagtgggtattcaacttttctggtttttggaagaatggctggaaaggctttgaatttggtggtaacaaggtgggtaagatagagaatctgaagggtcggtcacagggattcagaaagttgcctagtgaatcgaagaacagtttactgatattaggagaccttacattactccttcttggatttttcc

SEQ ID NO: 589581 - DNA, 426 bp, Homo sapiens
ctctcagctttaccttctaacttctgcaccaccagaaattaaattgatggcttaaaaataaattgtttaccaatgatatcctcattttttcagtgctatttaatccaatatatggctttatatttttctatcttctatacttctccaatacttgtcttatcttgtattccattttctatctaaaactcttaacaatattttcatttactatctatgttactatcttccagttttcttctaagtatgttcattttgcccttagcttatttgtttcctagcttgtcttatatcttctgcttcctacttttcaggtttaaatatatcttttgtcttctaaaagtatttttttatcttctaatttccctatcttctctattcttttcttcgccttcccgtacttctgtcttccagttttccacttcaaac

SEQ ID NO: 589582 - DNA, 710 bp, Homo sapiens
atggcacatgcagcgcaagtaggtctacaagacgctacttcccctatcataggaagagcttatcacctgttcatgatcacgcccgtcataatcatttgccttatctgcttcctaagtcctggtatgcccttatcctaacactacagaatcaaaaactatagctaatactaatcattcgtcagacgctcaggaatattgggaaacccgtcgtgaatctagtcctgtcccgcgcatcactcgcgtagtcctcagtcgtccctccgatccctacggattccttgacgagtaacagacaagggtcaacgatctcgctccacattacctatcgataattgcgatatccggtcgacgcaagggtacttgaatcctacgtagtacgtcagattacagtggacataatcttctagttcctactgtagcttgctcgctccattagttccttagatagcagagcgaacgtgcagaactccattgaacagttcgagcaatgctgatgtagatacctcgctcgatgtgaagcgcgcccatctcgtatacactcaattacattcacgagagacgtctatggcactcatgtagtctgtgccccacatttagtgcttaataacagtatgcaattcccgggacgtctaaaccagatcactttcaccgtctacacgaccgtgggtgtatactacgggcaattgctgctgaaatctgtggagcaaaac

SEQ ID NO: 589583 - DNA, 214 bp, Homo sapiens
acatctttaaagacagcgtgtttcagaggctgtgacggtgccttgtgaacatgccaattctcgcagtcccgggagctctgaggagcaggcccagctccttgccaggctgatggtactgaaactctgctctccaagacataacctgatggccgtgcaagatttcttaatcgactgtggaccgtgagagtctgcatctcattttaattaagatggg

SEQ ID NO: 589584 - DNA, 593 bp, Homo sapiens
aggatcttactccttcagatgattttataatttgtttactaaaatcttcttttatcttattaaagcttaggctctggatgggtgtgaacaaacggaggtcttcaagggtatttaatatggactgggataacactcatttcaattttaaatatggtatgacaatggctcatattttccaatcataacaatcataggaaataatatattggatatttgcatattttcatgatagtatatctattactaataactgatacaaaaaatagatattcgtgctttaataaagtaatatgagacgtaataatgacattctataaatgtcccatattctaatagttatgcataagctttacagactgtgtatacttggctttcttacatagtttaagtatcttcagaagtatcaataatctatagtttatcattcattgacatatagttaactcctcttcaaatattcatcattatgagttaacatgtggccttattcagaaacatcatatgctcttgcaccttactagggtaagtccacttggaaccgaatttaatgtggatatgcattcggctaaaaactatgattcaggatcaaaacg

SEQ ID NO: 589585 - DNA, 1110 bp, Homo sapiens
  misc_feature (6)..(6): n is a, c, g, or t
  misc_feature (9)..(9): n is a, c, g, or t
  misc_feature (936)..(936): n is a, c, g, or t
  misc_feature (1001)..(1001): n is a, c, g, or t
  misc_feature (1009)..(1009): n is a, c, g, or t
  misc_feature (1019)..(1019): n is a, c, g, or t
  misc_feature (1021)..(1022): n is a, c, g, or t
agcggngtnttgaattgcgcttccgccatctttccagcctcagtcggacgggcgcggagacgcttctggaaggaacgccgcgatggctgcgcagggagagccccaggtccagttcaaacttgtattggttggtgatggtggtactggaaaaacgaccttcgtgaaacgtcatttgactggtgaatttgagaagaagtatgtagccaccttgggtgttgaggttcatcccctagtgttccacaccaacagaggacctattaagttcaatgtatgggacacagccggccaggagaaattcggtggactgagagatggctattatatccaagcccagtgtgccatcataatgtttgatgtaacatcgagagttacttacaagaatgtgcctaactggcatagagatctggtacgagtgtgtgaaaacatccccattgtgttgtgtggcaacaaagtggatattaaggacaggaaagtgaaggcgaaatccattgtcttccaccgaaagaagaatcttcagtactacgacatttctgccaaaagtaactacaactttgaaaagcccttcctctggcttgctaggaagctcattggagaccctaacttggaatttgttgccatgcctgctctcgccccaccagaagttgtcatggacccagctttggcagcacagtatgagcacgacttagaggttgctcagacaactgctctcccggatgaggatgatgacctgtgagaatgaagctggagcccagcgtcagaagtctagttttataggcagctgtcctgtgatgtcagcggtgcagcgtgtgtgccacctcattattatctagctaagcggaacatgtgcttcatctgtgggatgctgaaggagatgagtgggcttcggagtgaatgtggcagtttaagaaataacttcattgtttggacctgcatatntagctgtgttggaacgcagttgattccttgagtttcatatataagactgctgcagtcacatcacnatattcantggtgaaatncnncttgttactgtcattccccttccttttcgtttagaatcagaataaagttgtatttcaataatctaaagaaaagaaaaaaaaaactcgg

SEQ ID NO: 589586 - DNA, 623 bp, Homo sapiens
  misc_feature (6)..(6): n is a, c, g, or t
  misc_feature (9)..(9): n is a, c, g, or t
  misc_feature (562)..(562): n is a, c, g, or t
  misc_feature (614)..(614): n is a, c, g, or t
agcggngtnttgaattgcgcttccgccatctttccagcctcagtcggacgggcgcggagacgcttctggaaggaacgccgcgatggctgcgcagggagagccccaggtccagttcaaacttgtattggttggtgatggtggtactggaaaaacgaccttcgtgaaacgtcatttgactggtgaatttgagaagaagtatgtagccaccttgggtgttgaggttcatcccctagtgttccacaccaacagaggacctattaagttcaatgtatgggacacagccggccaggagaaattcggtggactgagagatggctattatatccaagcccagtgtgccatcataatgtttgatgtaacatcgagagttacttacaagaatgtgcctaactggcatagagatctggtacgagtgtgtgaaaacatccccattgtgttgtgtggcaacaaagtggatattaaggacaggaaagtgaaggcgaaatccattgtcttccaccgaaagaagaatcttcagtactacgacatttctgccaaaagtaactacacttgagcctcctcngctgcaggagccatgagacctactggattgtgccagctgttcgccactgcangccacttgc

SEQ ID NO: 589587 - DNA, 543 bp, Homo sapiens
gatatgtctggcgctcagcctcccaaagtctggagatagcaggttgagccaccgtaccgggcctttttttttatttaaagacaaggtatggctctggtggcccaggcgggagtgcaggggacccgatcagggctcacggcagcctcaatttcctaggctcaagcagtcctcccacctcagcttccgtgagtagcttcagggccataggggcatggctacaaagccctccaataaaagcaaaaaagtaccatttggcccaaggctagatgatataaaacatagaaggggacttcaggtttacatctcaacccccaaatttagctaggcctttaataatattgcaagggtcaggcttcttaaggtcttataattagaagcggttggtaaaagtggatggttacctacctacggtatgagtaaggcggcataagtggaccacaattatgtgaatatgtcatattggctggacttgtggctcaggagagagggccattcagaagaaaatctgctgtggcccatacatcttctaaagttctgtatcaa

SEQ ID NO: 589588 - DNA, 942 bp, Homo sapiens
atctctgaagtgtgtatttcctattgaattagagacttggctttgtttcaaagatagtgtagctagaagaatttttggctgtctaagatgcattctatagagtgccagaaattctcttcttatataattttaaattatagcatcatcttctctgagaaagaaatacaatacttactgatatagaatgagtctaaagcttacgtatttaacaaggtgattggactgggggaaaggagtaacaatgaatcttcaatatttacaaataaactaaaggaaatgatttacgaatatttctttttttggtctgtgaccaggtagttatctccttgtacctcctatgtaccaggggctggtgtaacctttctggctggacaactgacttaactcttcggagagcttctataatactctctaagccccataagaacacgctgaaaacactttatcgggacttcatattggcaatactgaacacgtaccacacggtaacccttgaaagttcaaaatagcaacaagcttaaacaaaagtaccaagagtatacaaattctctctaggatccaggttcacatacagctcccgtgtagtaccagaattgcgaacgtcattactactaggcaacggccagcataatatatagcttaaaataacctcccatattagcgcactagggtggtacagggactaatataaccacggtcgctacgccagcacggcacctgaagcctccggcaaattatcccccccatatgaattccccccttcacaaccattcccggcggtacggcgacctccaacactgggtccattttcaagcagagctccacggcaccccacctccctgtcggttctccacaccttaaatccttcctttgcgaggctaacacctcctaaccattccggacttgccccccgggactcacagcgacttccatcttaaccag

SEQ ID NO: 589589 - DNA, 202 bp, Homo sapiens
aaaaaaaaagggccccttttttttcccccaaaatttgttaaatgggtttttttcccaaaggaaccccgggttttttaaggggttaaaaaggcccccccaaacgggtttttgggggggttttttttttttcccgggggccctttttttttgaaaacaaagggggggtgggggccccaattttttcattaattttttcccccca

SEQ ID NO: 589590 - DNA, 105 bp, Homo sapiens
gctcgtcgacgtgtaatcaccactgcggtgttggctccctgtacaagttccgtcgacacagtgagcacctgtgctgacctccaagatatcgttaagctggagcct

SEQ ID NO: 589591 - DNA, 405 bp, Homo sapiens
gttctagaggatcctaaagggagtcggttagcgctggaggggctctgaggtttggatgtcagtgtgggctggaataggccttggttagttgagcttggctgcagaatgggacttggagttctgtggctgggcaagggctcggcttggtggtggagctcacattgccctccccacaggtccagcccaactctgtgcacatctgtgcggtggttgtggagtacgagaccaaggccgggcggatcaccacgggcgtgggcaccacctggctgcgggccaaggagcctgtcggggagaacgtgcggccgtgcgctggtgcccatgtccgtgcgcaagtcccagttccgcctgcccttcaaggccagcacgcctgtcctcatggtggggcccggcaccggggtgggaccc

SEQ ID NO: 589592 - DNA, 719 bp, Homo sapiens
ggcagaaccgggatccggaggcagtttggaggcggtgaataatagctcttcaagtctgcaagtaaaaaagtggcctcctaacaagaattacattgctaagaaatggtgacaaatagagagaagtggaaagagtagagaagaagttgaagaggcaagagcctggagagaataggtcgtggacacaaagtactagatcgaggtgtagtgaatgggaaagtggaatatttccatgcaagtgagaagggattgacaggtgctgagcgatacttgggcaacctgtaatgaagaatttagattgtcgagaatggattgaagcgtgtcttaactctcagaatgctggggaacgagaaggatggtacctatgagagaatacatcgtttatctgaactagtgagatctgatgacatgaaaatcaagaagtagagataaacgagagtggtgcgtggatgaggccagggaggattttgccagaggtcttgatgctgagagaataattggtgccacagatgggggtggagaattgatgttttctcgatgagactggaagagattcagatgaggcatgactgtgggtgtggggaagagaggcaagtatgaagtgtcctgcaaatagtgagtgggttgatgaagagagactaatgtgggattcttggtccagaaggatgaagggtctagtaattggtcagattgttcttggatatatatttatatatgtatat

SEQ ID NO: 589593 - DNA, 118 bp, Homo sapiens
ctgcgacaagtatgattccgcaaacagcatacattcatcctcctactagtaatcctccttcaacaatattctctccgcgagaatgaagcatcaccacctactacgagggtgcctgcgg

SEQ ID NO: 589594 - DNA, 145 bp, Homo sapiens
tagtatacttggatcagggccatggtttctctcaccatactcagctttgggtactcactccctagcttgagcctactggtcatcaagctgtacagtgccaaggtgtgggatggctgtggagcatgagctatggcccaagtaactc

SEQ ID NO: 589595 - DNA, 653 bp, Homo sapiens
aggacccgaggaaaggacttcacgtggggcaggtggccccgtgaaggggccattataagcgtttaggcatgtttaacttcagcgctgtagaagctgtccagctgggggctggtgatgaaatacctgggcatggccaccccattttttttcctgcctgatggggggaagatcaaggactggagaaatggactcaccccgataatcatccccaaggtcctggaaaatgaagacagaaggtctgccagcttcattttaccccaactgtccatttctggaacctatgatttgaaaagcgtcctgggtcaactgggcatcactaaggttttcaacaatggggctgacctttccggggttacagaggaggcacccctgaagcttttcaaggccgtgcataaggctgtgctgaccatcgacgaaaaagggactggagctgctggggccatgtttttaaaggccatacccatgtttatcccccccgaggtcaagttcaacaaaccctttgtttttttaatgattgaacaaaaaaccaagtttccccttttcatgggaaaagtggtggatcccccccaaaaataaatgccttttggtcctcaacccctcccctccatccctgggcccctccctggatggcattaaaaaaggggtgagctgga

SEQ ID NO: 589596 - DNA, 352 bp, Homo sapiens
ggagagagagagagaactagtctacgagtttgttttttattatttatttggtaaccatgggatattataggtcttgtgggtgtttcttaaaactcagcagcgtgtctgtgggccataaattctgtagacatttagtttgagtgccgttgggcgccaggtacatttagtgggtggcacgcctttggtggtgcactcgtggtggtaaaagagacctgtgcatgtgtccgaacgatgggcgagagtgcgaaatcttaaacatctgtgtttgttccacatgtaaactatatttcagatttgttaaaatgggctccgtggttgttaataacaaaaatacaagagataaaaaatatcc

SEQ ID NO: 589597 - DNA, 863 bp, Homo sapiens
  misc_feature (11)..(12): n is a, c, g, or t
  misc_feature (14)..(14): n is a, c, g, or t
  misc_feature (16)..(16): n is a, c, g, or t
  misc_feature (18)..(18): n is a, c, g, or t
  misc_feature (20)..(20): n is a, c, g, or t
  misc_feature (22)..(22): n is a, c, g, or t
  misc_feature (24)..(24): n is a, c, g, or t
  misc_feature (31)..(32): n is a, c, g, or t
  misc_feature (43)..(43): n is a, c, g, or t
  misc_feature (48)..(48): n is a, c, g, or t
  misc_feature (365)..(365): n is a, c, g, or t
  misc_feature (370)..(370): n is a, c, g, or t
  misc_feature (372)..(372): n is a, c, g, or t
  misc_feature (374)..(374): n is a, c, g, or t
  misc_feature (393)..(393): n is a, c, g, or t
  misc_feature (416)..(416): n is a, c, g, or t
  misc_feature (426)..(426): n is a, c, g, or t
  misc_feature (441)..(441): n is a, c, g, or t
  misc_feature (486)..(486): n is a, c, g, or t
  misc_feature (492)..(492): n is a, c, g, or t
  misc_feature (505)..(505): n is a, c, g, or t
  misc_feature (529)..(529): n is a, c, g, or t
  misc_feature (545)..(545): n is a, c, g, or t
  misc_feature (552)..(552): n is a, c, g, or t
  misc_feature (561)..(561): n is a, c, g, or t
  misc_feature (593)..(593): n is a, c, g, or t
  misc_feature (596)..(596): n is a, c, g, or t
  misc_feature (703)..(703): n is a, c, g, or t
  misc_feature (705)..(705): n is a, c, g, or t
  misc_feature (712)..(712): n is a, c, g, or t
  misc_feature (743)..(743): n is a, c, g, or t
  misc_feature (746)..(746): n is a, c, g, or t
  misc_feature (775)..(775): n is a, c, g, or t
  misc_feature (841)..(841): n is a, c, g, or t
ttgattactgnngngntntngnanacccccnnttgacaggaangactnagatttgaggcccacctcccatggtgatggggagctcagaatggggtccaggagaatttggttagggagaggtgctaagggaggcctgagcagagggcaccctccgagtggggtcccgagggctgcagagtcttcagtactgtccctcacagcagctgtctcaaggctgggtccctcaaaggggcgtcccagcgcggggcctccctgcgcaaacacttggtacccctggctgcgcagcggaagccagcaggacagcagtggcgccgatcagcacaacagacgccctaggcggtagggacagcaggcccagccctgtnggttntntnggcagcaggtctggttatnatggcagaagtgttcttccccanactccaagtnctttaaacccacgtnagggctacgggccaggaaggtggcaggctgggcagagaccaattncttctngcaggatagagcntttacgttgcaggtgtagccagcngggcagcagtactggngatcctngcagcacanagcatggggcaactggcagcaggcccagctcncancacaggctcgggcagcaggtctgccccaccgggcagctggtgtgctggtcacagccgatgtctctggggtgggataaggaagcccggcgggcaggcatcttctccantncagccangatctcgcttcctcgctgacactgcccctcngcnacacacgtgtagccctgggggcagcagtnctggtggtccgagcagcagacagcctctggggattggacagcagccccactccccagacgtgagtnggcagcaggtataagaagaagg

SEQ ID NO: 589598 - DNA, 298 bp, Homo sapiens
gacatctactggaatcgccagtgatctccacaagggcaggactatgtctgggtgccagcacgtgagaacagggtctggctcctggcagaagctccgaggagctcctctaccttggaatgaatgcctgcttcaggttggaccacggctggccccttgcagtggctaccaccaaaatgcagttctgaccaagccaccacctaagacaactcctttcccgggatactcactgctctgcgcccaagtcttgtggaatacgcacctctcttcagaatatacgacaattaacaaaattgcttta

SEQ ID NO: 589599 - DNA, 809 bp, Homo sapiens
  misc_feature (14)..(14): n is a, c, g, or t
  misc_feature (152)..(152): n is a, c, g, or t
  misc_feature (716)..(716): n is a, c, g, or t
  misc_feature (751)..(751): n is a, c, g, or t
cctacttatcaacnaatgtaatagagccccccaataaatcacacctaaccattactcccccttcaccctttttaccacatcatttactccaccccattatcacctttacacacaacttcaccccaaataaatctaaccactaactcctcttnaactttaatcaaaatttttttttaatggctcaccaatacccacaaccacccatattacacaccacaccttttacacgatttaatctctttactatttctcacactctatccattaatccccttaaaaaccacataatgattacttcattatcaattccccaactttccaaatttttttaaaacccactcccttcaattttaccatttcgtcccattcttcccaactcaaaggcattcctccatacaccacccttttacctaatatccctttttcccaaattcccttctccgctaacttaaatactggccgctcaccccactctttctttttcttgaaaaaattctccaaacccctcaatcttaataaaacccccgctttccccgttctttccacttacagaaaccctctctccaatactctttaataacctaaaaaaacctcaaacctctaataatttataacctctctaaaaattcaatattataaaaacaactcttttacaaaccttacaatcccctcctttttttttgtaaaacccatcacacctgaacctgcttcccctngtccattccacccaaatttcccctctttaaatagnaatattcctaataaattacaacccgccccatctaaatataaaaacctcacaatcattt

SEQ ID NO: 589600 - DNA, 269 bp, Homo sapiens
gacacccctgcctaggggaacttgtatcgtctacttggttcgttgtcctagttgcattttacctgcagtccaaaggttattttcgatgctagaactgcaagaaccccaaagccaaagaaagcctcgtggacagtggtcgggacgcggacggtcctttctgacgactacatttccacggagacacactacccacgtttgcgacgacggacgctggtacgttactgtgtgcaacgtgtttttcttggactggcacgcgtcgcgcctgggta

SEQ ID NO: 589601 - DNA, 344 bp, Homo sapiens
tcggggcagacacacctgtaggcgggagcctatccttagctcctttgagcgccggctgttcttagccctgggcgctgcgttcattcttgtgcgggaggcagcggggtgtgtttatcctttatgcaatgtcagggggaagctaccccattttgacactattgttgccacagacggggtacaggatgggctgatatctcagcatcatatctgagtaactaggccagcgtagagattgtcgattcatattaagaggttagattccaccatacctcattctcagagctttacagatagaatcgcaaaactgttcgagctggaaaataccctagaataatggttcttct

SEQ ID NO: 589602 - DNA, 195 bp, Homo sapiens
ggtatgggtggtgcgcgaagtacaatgaagaaggtttattatttatttagacagagtcacccaggctggagtgcagtggtgtgatctcagctcactgcaacctccacctcctgggttcaagcgattctctgtctcagcctcccgagtagctgggattacaggtgtgcaccaccacaccctgtcaattttggtatt

SEQ ID NO: 589603 - DNA, 320 bp, Homo sapiens
  misc_feature (21)..(22): n is a, c, g, or t
  misc_feature (166)..(166): n is a, c, g, or t
  misc_feature (301)..(301): n is a, c, g, or t
  misc_feature (311)..(311): n is a, c, g, or t
agccaggaactggtgtcattnnttaaaagatacgtgccggggccaggtgtggtggctcacgcctgtaatcccagcactttgggaggccgaggcgggcggatcacaaagtcaggacgagaccatcctggctaacacggtgaaaccctgtctctactaaaaatacaanaaaaaattagctaggcgtagtggttggcacctatagtcccagctactcggaaggctgaagcaggagaatggtatgaatccaggaggtggagcttgcagtgagccgagaccgtgccactgcacttccagcctgggnaacacagcgngacttccgt

SEQ ID NO: 589604 - DNA, 1224 bp, Homo sapiens
gaaatgacctggaggaagaggagtgtgtgtatagcattattaatgtctttattattttgtaatgaaaaagcatcactaagctgcccctggcaagtcgggtgctagctgaataggcacccaatagagtccagtgactaaatttacgtttagtctattttggatagcaaattatgttaaggagacagttgatggctagtggctcaacgaattgtgtattcaccatgtttgtgtgagacagagtcatgtgctctcccttgaagcttggttagaattgtgctactgtgaacgctgatccatgcatatggaagtcccacttcggtgacatttcctggccattcttgtattccattgtgtggatggtgggttgtgcccacttcctggagtgagacagctcctgagtgatgtagaattcccggagcgtccgtggttcaggagtacacttgaagcagcatctgtgcatgctttacctctggaacaattggctcgatttctcttaacagtcctacttatgataggatcctgtttcctatgtgtgcaaaaataccaagataacatcgggccagacaacaacagacaaacacacagaaaacaaaaaacacaacaaacaaccagaaccaccacgcgcagcaccagaaacacacagggacaacagaccaaacaaaaacaacgacaggaagaagaaaaagcgagcctgacaaacacaacacgaatgaaaaaacaaagagagggacgagaacagacaagatacccacaaacatgagagacactatcgggaacccaagcacggagggatagaacggcataaacagacgaacaaaagaacagcggacgtgagagcagcaaccgcgagacggagcacggagagaggagcagggaggtcacgcacgagtgaagagcagagcacacggatggccagcccacacgaacagagacagtccaaccaacgagatgaaagaaccaaaccacaaagacaccacacaccgaaaaataaccactgaagcgacgacaccatgacaggcacgatcgacgcacgcgccgacacaacaatgaaatacggaacacacagaccgcgcaacgacgacaacaaaaagacgcaaatcaggaacgaacagaacgcgaaagaagcaacgaccagagcaccaacacgaaatgacaccaccaccaagagaaccagtcaccacgaaccgtcacaacccgaggagaccagaacacaacagagaaaga

SEQ ID NO: 589605 - DNA, 596 bp, Homo sapiens
cgtatatgtaccacattttctttgtctaatccaccattgatgggcacttggattgatgccatgtctttgctgttgtgaatagtacccgataaatatacaaatgcaggtgtcatttggtagaatgatttattttcctttgggtatacacccagtaatgggattgtcgggttgaacggtaattctatgttgagttctttgagaaatctccgaaccactttctacaggggctgaactaatttggattccacaaccagcgtataaaacttcccttttctccttaaacttggccatggtctggtatttcctggaactccttattaaagagaacaggtggtaaacactggtaccaatctaatttctgggcttctcacgaatccaatctggctttcggttaacctttggattatttggggctcttaattcacaattggtgacctttgcgggtgggcttggtggtgttttgaccctttattttatatgtgggctctaccatttctgtgctgtgtatttccctggtgtgagggttttgagagacatttttccatgtgaaattccgggacctttaatctcggatgtgccccccattccttctctcg

SEQ ID NO: 589606 - DNA, 686 bp, Homo sapiens
  misc_feature (159)..(159): n is a, c, g, or t
  misc_feature (163)..(163): n is a, c, g, or t
  misc_feature (202)..(202): n is a, c, g, or t
  misc_feature (205)..(205): n is a, c, g, or t
  misc_feature (213)..(213): n is a, c, g, or t
  misc_feature (215)..(215): n is a, c, g, or t
  misc_feature (217)..(217): n is a, c, g, or t
  misc_feature (220)..(220): n is a, c, g, or t
  misc_feature (224)..(224): n is a, c, g, or t
  misc_feature (227)..(227): n is a, c, g, or t
  misc_feature (233)..(233): n is a, c, g, or t
  misc_feature (238)..(238): n is a, c, g, or t
  misc_feature (240)..(240): n is a, c, g, or t
  misc_feature (269)..(269): n is a, c, g, or t
  misc_feature (285)..(285): n is a, c, g, or t
  misc_feature (288)..(288): n is a, c, g, or t
  misc_feature (298)..(298): n is a, c, g, or t
  misc_feature (303)..(303): n is a, c, g, or t
  misc_feature (307)..(307): n is a, c, g, or t
  misc_feature (311)..(311): n is a, c, g, or t
  misc_feature (318)..(318): n is a, c, g, or t
  misc_feature (320)..(320): n is a, c, g, or t
  misc_feature (325)..(325): n is a, c, g, or t
  misc_feature (327)..(327): n is a, c, g, or t
  misc_feature (334)..(334): n is a, c, g, or t
  misc_feature (336)..(336): n is a, c, g, or t
  misc_feature (338)..(338): n is a, c, g, or t
  misc_feature (430)..(430): n is a, c, g, or t
  misc_feature (505)..(505): n is a, c, g, or t
  misc_feature (507)..(507): n is a, c, g, or t
  misc_feature (513)..(513): n is a, c, g, or t
  misc_feature (522)..(522): n is a, c, g, or t
  misc_feature (571)..(571): n is a, c, g, or t
  misc_feature (684)..(684): n is a, c, g, or t
accacaaataaatttaataattttctttaaataaatttcttatgctaaaaaaaaaacctctagtcattttctagagacttctttttgccttagggattctttatagttcctctccatgtaacatattgggtaatacttgtggttctgaaataaaatgcnagcnggggggtgtacacaaaaaccttaccactgaatcaagggnccngctgtgcngncnttntgtnccngtcctnttctntngttctgcccctggcccttgtgcctccctncttttcgcctcttttngcncggccctttnccccnctcncctnggccccncngttcncntttcgcncncngtcgcctcttttctcccctcttctccgcccctcccgcctccccccccccccccgcctgcccttttcctgctgcctgttccgcctctttgccncccccttctctctggcccccctccccagagctgttccggtgttccggccctcccctccttggttctcccctctgncntgttcnccggccggnggtcgcccttgggcccgtttcccgcctgtcgctctgttgcctcccttcncccccccccgccccccgctgctgccccctttttcccctgccccccgctgcccctgtccctgcccctcccccgcttgcgctgttcttggccgaggtgtcttcccctcccctccncc

SEQ ID NO: 589607 - DNA, 877 bp, Homo sapiens
gatacctggaaggaatggagacagccggcagaaaacacggcagagagggtggaaacatcacgttaaatatgattaaaatcccattacgtgctaccgaagcaataataagtggactgcatagaaatcagtatcctggattacgctgagcatgtgataacagtccatctcacacacacacaaatagaatttcagatacaagtgaacccacatgttgaagctttcctagtagtacactacacaaatcttcaactgttcatgcttgaatcatcatgccaatgactatggaggctacagaatagatgtcatcttaggagtgcttgctcatgagtgaggctcagtctgtcaaatgctgaagtgaccacaaggagatttgattatacatgtgaacacctcagaaggcacagcccacccagaaggcagacaggtcaggctgctttttcttcattgcttggattcaatcctccgggcggctcaggctcaaacataacttaagcatgattaaactttagaagaagctgccaggaagactgtgaaatcttcatgcccaaggatccctaaaattaggagcaacaaccacttggctcagacggtttatggaggcaaaggtttggatgggattagagatttctaaatgtgagttcgtgtcctctgccagaccaccttacttccaccattcctcagcaaatcaagaaaaacaggagaaaagacatgcctttccataagttaaatctattctgttttaattctatattatatctgctgtacaacttcttttgtttgtaacaccatattgttgctagtaactggaaattaattttcacatgcctcagcttagaaaaataaaaagcagccctgcatcaatcccaaaaaaaaaaaa

SEQ ID NO: 589608 - DNA, 904 bp, Homo sapiens
gataatcacaatgtccttggaatccgagttcctttaggctttgtgaccaggtggggtcacaagatgtctgacatgacgaaggaccgttggtgcgagtcatcatgtgggtcgaaattctcgagactatattcctatgagagtcttcgcggttaggacgcaagtaggttccaagtaaagtagctgaacaattagcaagtagccgaagagaaccttgtattagtcactctccgtgaagagggtgactcaaacgaggacctggactgataccagatcattgccgcgtggcttgatgtgggtgacactggtggatggccacagttcaacgaacagggcaaaccagaagctcagaaaaacacaggtaccactccagcacgtggctcattcgacaacgaaaagtcataccgtagaacacagatggcgtgttctccttctcactccttgacagataatgccaggagtcatagtgaaacaaataaacggcgaagcatgcaacaggttctgccattcacaggcacccagtagcaacaggagctgtgcagaaccttgctggcccccggattggcatccaaatgcctgggcaggcgattggccatggacttcttccaaggtactatctctgctaacccgacactacacacacaaaaagacctaaaaggcccagaataacaacaacaagaccaaccacctaagacacaaagcaagacaacacaacagctcagtcgcgaccaccgccgccaggcgaccccgcgaaaaacgagctcgtcccaacaccaacccgcgctggaggcgagacgcggcccccccgaggaggcacagaggagacacagcgggccacaaagcgcgccctcagagagagatcccgggcccgaaggcaaaaggcccggagagcaacacaccaaaacgc

SEQ ID NO: 589609 - DNA, 1065 bp, Homo sapiens
cgtctttatttcctttccctttattccctctcaattacatgtttagaatctctcgcctccaagctattccttcaaccttatggcttcaatctccgctcctgtgccggtgaccctttggtaccctcacagtctgaattctgctatcccaggttttattcacccagaccctttaagttgcttctctctgtctacgcctgtttgctctatagtgactgtcttacataacatctatgggacctgtgaaaccgcacagagagccacagtagagaggctgcttaactgcagtaccatcggagagttgacagaataatctagtagaaaacaattagtctggttgcatgttaattccttccagccagaaagaaagacaaaaacaaggagtaagggggactttagtagtcttatgtctcagctacacattacattggtgtatactgcacgctcaaattcagaactggcaattgatacatgatatccaatggcctagaatccttgaggcacgggacctggctcttcctatgtattaaaaagatattttttacctgaagagctaaagcactggccagtgtcgtgggttagcagatctgctataactctgaaattaagaccgttgcagtattcctagcactcaatcgtgatcaccctatttgtgacagagaaagggaaggaacatataataagatcatctacctataatgtgaataatgtggttgagctatcaaaatgtctttggaattttcacaagccgctgtccattgttggaggatgttacctactaaacttgaaaacattcattccatatctacttacacatacaccagcaacagtataaatgtaagcctaactttgcaaaattcgtaataatttactgatggaattttttaataacatgcagtatataaagtgtgcagatttatgcgtgttgacaaaatcatttttcagcttcgcaaaatgggacatgccaatattacatttctcacttaagcagttttttacatctaaccgttgcttgctttcataaaatgaattgtgaatgccatcttatcactgactgcaaacttgcct

SEQ ID NO: 589610 - DNA, 421 bp, Homo sapiens
tagacagaattctagctttacccgtgcatcgttgattcagcttttctgttagggatcagcagctgcaggatacttccatatgcgtaatagacagccatgcccctgggagtcactttcaatggtatctgtgacatttcggtgtgcctcattccttcttcttacctgaactcactgctctcggggtgtttctgcactttgctatatgtgtcgtgtctgatatccctctcgcgtagctttgcctctatcaggactggagtggtgcagcccctggcatctcagacatggttcctgcctcacttgtgggagctggaccagcctgggtttcatctcccacagtaaagctaagtaagccccacagaccttactgctactgctgctgccattaatgctgtgctcactatcttgtccaggattttaagga

SEQ ID NO: 589611 - DNA, 307 bp, Homo sapiens
gagattccagacacctcctctttctcctgacgctttggaggaaatcatctagtaccagctccaggctcctggtctgctagaccaggttctcggctcctcccggctctgaaatgtggctcagctctgccacagtctttctctttgttagatcctgggcagaaatgtcaaggcctttcatcatcttgggcccccagttcagagagaactccatctattattactagaaccatctactgtatagaacatatattggtatactatacaggaaaactattttcaactcagccacttctgaccggagtcgagg

SEQ ID NO: 589612 - DNA, 580 bp, Homo sapiens
ctggtgatctagaggatccctttgtggttgttgggagcaggccgggttggtgatctggggcgactcacacgttggaaatcagccccctaggtgatggaagagctcctcgggtgtcttgtcagttgggctggctcccccttgccggaagcgggaagcgatctcatcggaggtccggcctttagtctcaggacctttgcaagtcggtgaagatgaagaacagcccaggagcacagtgaagatgatgaagaggtagggaccacacagttgctccacatacgggaagcacatgcccacaatgaaattggaggtccagtgggagcaagcctgcaagggcaatggcagctggacgtggaccctgggctgaagagttcagccaggataaaccaggggatggggccaggacccatttcaaagaaggccacaaagccaaagatggccacgatgctcagataggacatccagggtagctgctccagcagtgctagcgcgatggtcatgagtatggcacaacccggcatgccagcgaggcctatgaggtgcagggtccgcgggcctgctcgctccaccacaaccagtgacc

SEQ ID NO: 589613 - DNA, 158 bp, Homo sapiens
ccgctatcagcgcctggcatatgcgccagctggagctccaaagcgcgcctccgttcctgccagtgtgtcttccaatggcagctctcatgctcagctgtgactgcagctcaggctcaacaccctgaaaggtgcgccgcaggtcagtaacctcggacctg

SEQ ID NO: 589614 - DNA, 1420 bp, Homo sapiens
gctccgggcccgcggcaagcctcgggcgctgttcgtagcaggccgcgaacgagcatgtacgagcaagctcgatagggcgagtggagaccgtgaaagagcgcccgaatctttactcgaagtgcggtggacaggagctggggtcgactcgaagctcagttcttactgggagactcaagttcttgtccataccacagagggaccaagcctgacaaaatcagcaaggctaatgtaactggcgccctgtcgaccatcacatgggacgatctggaggcccagatgtgaagcatccgttactgcgacaggacaatccccgtaccgttcagaagcagctcacgagtggtccgctaagctctaatatgcgtgagctacttattgatttacaagggaagccagacttcccctcgaagtgcagggctaattattgccacccatgggtccttggcgaccttcaactcgttcgctactatacccattgctggttgcccaaggaatccagaggtaggactgggaagttgcccaacgactgggtaaggttcatgcgcatgccgggctttgtgccttgcgcaaaaggatatcagttacaatgaagcccaaacatgcttgtaaaccatcgaaaggaacacccaaggggggtccccatagggaggccaaactacccactgaacttgcgagggcgtcgagcttgaccaaagcaaaaaagctggttgtcctaggggggccatagggcggttaaacaatttcctcctgaacgaaagaaatgcctaagaccactatcttttccagttggaggcatttccttgattaccgatagactctcattccacgggcaattgcggacttcggctcgggagtcgcaattccgagggaaacggcgcgtacgagcaaacatggcctgcttccttctcggaggggcacccccggggatctctccttttgtgcaaaacaccacccaaaaatagcgcttgagcatgaactatctgctcaatgaaaaggaatgtgagttggctttccatggggccccggataagtaaggtaacaaaggttttggcacagtccgctagaatgagagtcggaaacgatacgacacacattcccttgcaggaggaatttggccacagatgggtcactccagttttgcccgggagcttggacgaagtggacctctggaccccccgcggcacacgagatggaggaacatggaacacagtacaacaacaagcaacacaggaagagctgtgcccaacaaggtgaccgcacaagaacaacagacaagaaaaaaaggacgggcctcaaacagcaccccgcgcacatcaaacgaccggtcgtacaaagcacacaagggctacaacgcagcaccgactacacaccgaataactgcagtaaccaacaggccaaacacgaccgcgcgtaccgatacgac

SEQ ID NO: 589615 - DNA, 446 bp, Homo sapiens
acgcacgtactgttcctacaagtgactcagtgtgagccacgcattgctaactgtcttaaccaatgccttcctgctacggcacaccctcatccaacccttcatgttccgcctgcacaatcggtaccagcccatggaacccaacccccgtgtccccctcagcagggtcttttttgcctcctggagggtcgtgctggaatgtggcattgcgcccatcctccggtgcctcatggccacccctgccaagctgaatctgtcgaaccacattgcagtggatgagatccggtagcgattgtttgatgcaggtcatgaggcttgggctggacctgcttgctctgaacatgccgcgccccagggaccacgggctcccaggatacaatgcctggaggcgcttctgtgggctcctgaagcctgaaactgtgggccagctgggcacggtgctgaggaac

SEQ ID NO: 589616 - DNA, 656 bp, Homo sapiens
  misc_feature (68)..(68): n is a, c, g, or t
  misc_feature (241)..(241): n is a, c, g, or t
  misc_feature (401)..(401): n is a, c, g, or t
  misc_feature (420)..(420): n is a, c, g, or t
  misc_feature (423)..(423): n is a, c, g, or t
  misc_feature (504)..(504): n is a, c, g, or t
  misc_feature (622)..(622): n is a, c, g, or t
  misc_feature (643)..(643): n is a, c, g, or t
acgagccacgcataagccaaggtgaacaggcagccgcaggaagggcgtccagatgggtgagtcgctgngaccctgtgcagactcccgaggggcggtggagcccacaggctcaagacccaccaggcgcttcctccccgctggtctacagtgcctgaaacgtgggcctccccgacgcgggcagtgggtctgttggagtggccagaagggtcctgttagggaacctgtggatggctcaggattntagaatactccgagcctggggtgcccagagagcggaccttcggaacccacatgagtgtctctgcttgtgactcccggcagctccttaatcctaaagaagccagatccgaatcttgccaaatggagccaggagttctcgagccagcagagagcgatggatntcacccgcagagggatcangtntaggagcagaatacacctgcagctgccctagcaagtgtggctctggaggccaggcgagagccactcctctcgtcatgctanggtcgtgcagagctgctggtaagcactcagagcccagccgccagttgcaacagtgaggcagatctgccttgcagtacacagatgtcacccatcgtgatagccaatgctgaacagaccngaccctcagttctttatgagntattagacagacg

SEQ ID NO: 589617 - DNA, 131 bp, Homo sapiens
tccagcatccccttgcattttgtcgcccacggctcttagagtgaaatcaccacattttcagtagattgatcgaatttgtgaaatgtgaatccctagggaaggagtgaagtgcaattcccagtatgagaaga

SEQ ID NO: 589618 - DNA, 330 bp, Homo sapiens
ttaatcatttaaagaacaaatgccaatcatactaaaaattcacccaaaaaatagaggagtaggagaaaattccactcattttatgagggccagcattatcctgatgcagactgtatcaccaaggccaatatgccaaatatagaaaactacaggccaatgtgccaaacaaatacagatgcaaaatcctcaacaaaatactagcaaaccaaattcagcagcacattaaaagtaaaatacaacatgacctagtagaatttatccttgggtataaattgggatggctcaatatacaaaaatcaattaaggctcaatgggggatggagcacccat

SEQ ID NO: 589619 - DNA, 272 bp, Homo sapiens
caattttgcccctgggggatgaatgaaattttgggctttttcaaaaagtaaaattaaattttttccactgggggggagaccctttttgaaagaagtatggccaaaagcactttaatgctgctgacatttttgtttttatttttatttggtggggcgcaagaagtgctgacacaatgggttttttttgatgtatttaaggtgatgtatttgcttgagttactcctgtttcattggtcttgatattgggaactaaaattaaaccttgttgggga

SEQ ID NO: 589620 - DNA, 137 bp, Homo sapiens
tagaggatcccattggaagagtgctgtcctttaacataggtttttaaagactaggatattgagtgtgaaacatccgttttcattgttcacttcttaaaccaaaaattatgtgttgccaaacaccaaacccaggttca

SEQ ID NO: 589621 - DNA, 345 bp, Homo sapiens
ctagattctaactaattgaattatcatgtaatctgcaaataataacatcttatctattatcatctattttttttgtttctttttcttgccaaactatcactaactaagaatcacaataaaacccacaaagaaagtattatatgttgaccggaggtgaaatagacgtatattgttcaaggtttcattcactgtgtgggaaatgatttgtcatctgttggctcatgtgttatgttagttacctattgctgaataacaaaataccccaaacttagcagcttaaaacagcaataaacatttatgatctcccacagtttctgtgcatctggatgggtttagctgggtggt

SEQ ID NO: 589622 - DNA, 1180 bp, Homo sapiens
  misc_feature (70)..(70): n is a, c, g, or t
  misc_feature (1093)..(1093): n is a, c, g, or t
  misc_feature (1180)..(1180): n is a, c, g, or t
catctccacggcaaaaaaacagcacaagacccaccacttttggaaaaaaagaaaaacccaacgctcttgncggggggggggagaaaacccccggagaggtaaacgatcggtacgataatgcgggaaatttcacgtcagcactacaaggactcttgggcgcggcctcgcgcataggtggcccgaaaatcatccgacaatgcccctgagacacgacatgacgttcaaaacatacacacgccacatccccgctcgacgccatcgagacgagaagcaatccaccaccttccacggcaccggtacacacaccttctggtgacgtcactctcccagacggaggtgtactttcgagtcgtgtgaattttcatattagtataagccatacaacgaattgtagcacacgaactttacacgctgcaagtaatacaccgcgccccgggaacgcgctctacaaagacactgtccccccccacgccagacctagcaacccccataccaacgaactccgtacccgtcagccggcattccaactgttcgttacagccgcgaggcgggagatgcagaaacaccgcccattcacgtatcgattagacacacgcaccacatatgacgacccccctcccatccacacccctacctcccttccctccctcttaccgctcgccctcaacccatgcccggcgacgcgcccggcccccatccccccaccgcccccccccctagtgccagacagcacactttcacccccccccccacttcaccccgaacacccacaacacccccaccatcctgatatcgcccccccccccccgtcactgagtcccgcaacaccccttgcccccccccactttccccaatctcctccccccatactgcgattgcaacactcaaccgcactccgcctcataaccgctcatcccaatcctagcatgtacataccgccatcacataccgccatcttaccgatccccacccctagtcccgtgtcaccgtcaactatacaaccgccccttctccacccgatcctcatgtgacgcgattggtccgacccccttaaattcgcacgccgcccgcttccaccgtgccgcctctctantatacctcatcatcacataccgcatgtcatctcgatgttaccgtacgctgtcgacatataatgcagctccactctagtactagcagn

SEQ ID NO: 589623 - DNA, 240 bp, Homo sapiens
agtgagtgtgtgtctaaacagtgattccaactctatgtgtcagagaaaacactattgaccctgtactgtgtttacagtaccctgctgacagtgtactgtcgtatcctcagaccttgatcctatttctttattttacactttacagtagattaggtctcaagattatgagaatctccatgagctttcagagggctaaacttttctcgccattcttattgctacttactcgatacacaggga

SEQ ID NO: 589624 - DNA, 944 bp, Homo sapiens
gtcccggacgtgggtagttggtgggccgggttctgaggccttgcttctcttgagttttccactctaggccaccgatgccgagtagcagacctgggaggagtgcagcgcgctgcgagaagctttacctcgctgaccctatgaaggcacgtgtggttctcgagaatataggcatgctgatgggaacttgtgtgttagagtaacagatgatttagttggtgttggtgtataaaacagatcaagctcaagatgtaaagaagattgacgaaagttccacagggcgaataatgcgagttatggtagccaaggaagccgcaatgttaccatggaaactgagtgaatggttgaaagtgaagactgggtcgtgtacttaggaagtacatatctgtttgaaattagagaaagtgtctgggacagaaaagtactgttatgtaacctaagtgggctgttcgagaagcttagaggtcattttgtgtaatttttcttttgaagttactgtagagagctagggatgcaagatgttttcaggttagaaagcctttatgtactttgggaagttgaacgaggaaatgcatctgtcttagaaactggagattagttgatgttaagggaaaacattgttggtgttactctgggatagtcgtatccagctcgtgtggacactgagaactttcgggaaaccccacttctgcttaagtttaggtccatcgttccttgacagaccttcaactgtagcatttggccgatccagctctcgggcataaaggttctggggccactacatcgaattgggctggcttaccacccccagtgggggttacacggggcgcagagttaccggcggcaattgggtcgtacaattgtgtccagagcgtaaaggaggacggaacagatactcgaccaaggtagggaagccaaaacactcccgggatcacgtccataattaa

SEQ ID NO: 589625 - DNA, 837 bp, Homo sapiens
ggaagagggtgatcctgacccggggaaggtcgctgggcaggcgagttgggaaagcggcagcccccggcgccccgcagccccttctcctcctttctcccacgtcctatctgcctctcgctggaggccaggccgtgcagcagtctgaatgacaggaggaactggagcctcattggcctggccctggggcgcctggcctcgggcttaatataggagctcctgggctctggcttgggacccgacctgctgcctggccgcgcttcccgctgctcctgcccgggtggatggaagaacccctagccctggcctgctgcctggggcaatggccctctgcagctctcctcctggcccactctcgtgcgcctgcacggcacagccatcttggaggggagagtccatcttgttccagccagaagccccggaccaaaatacagccatcaccttcacgggcaagtggagccaagacggccttccccaagcagtaccccctgttccgcaccccctgcgcaagtggtcttcgctgactgggggccgcgcatagctccgaatacaagcatgtggaggaagaaccagtacgtcagtaacgggctgagcgacttttgcggagcggcggcgaggcctgggcgctgatgaaggagatcgaggcggacggggaggcgctgagagcgtgcacgaaggtgacaacgggcggcccggcggtacccaagcggcaccgggcagaccgtcagagcggaactggagggtgaagcgcaaggcactcgctggactcgaaagagggtgcgcaatcgtgccaagccccagaagggtcgagagcagtgacagctggaactgtgcaagggg

SEQ ID NO: 589626 - DNA, 891 bp, Homo sapiens
  misc_feature (873)..(873): n is a, c, g, or t
ccatgcggcagacagctttgaggacaatatttggagggatccttcagaagaggtctcggacacgacctgtctcaggactctgcacagcggtcaacccaattctcggccaatgcccaaacctattaaacaaatggacaaattcgggcctggtttaaaggggattgcctcttcccagaaacgggagccttgcgaacagtgattattttcgctcccaggttactttctaatgggggggctttgtgcgccctgtggactcggcctcgagggttacacaacgctttcctcttaatttgcttcttagatagagagggaatagggatatctgaggttcgacaaacatgcttgtcctcgtagacctctcatccgagttgatctgaattctccgtgacaggcgattcgttcgccccactcggctaaaatggtcaaactgtagacacagtttctgttccccaataatataaaggctcttgggagttaactacacgtgagggtagtctgagcaatgactagaggatttactgaacagagacgtcgagcgaggaactgaagactcgtactgttgcctcgttatgcacacacagaccactggtagtgcttgcactcttacaagtccacagccgtagcattaatacaagaatcgggttgggtcgaactttacacaacggctactgttcttgggaatactttgttagatatacttgttcaagaattcctcaccatagctatttcccatcaaattctgagcggagcgtgtatgtaacacacatcgactcatagatgtagagtgtggattatgaactgttaaagttatacgttgttttatactgttgcttataataaagaagtgttctgcattcgtcacgcttgacccgnggctgccactatcctttg

SEQ ID NO: 589627 - DNA, 210 bp, Homo sapiens
tgcgctattcgaacaggctacatgatgctgacgacactgctgggctgcaggcatggctgcagccagtaggaggtgtactccacgtcggccatgtaaatgcgcaggctgccatcctcactcagcaaaatcatagacgtccgctgctgcacatagcaggccgtgtgcctaatagcaaccatgtcttttttttccgctaaaacaggacgagtc

SEQ ID NO: 589628 - DNA, 110 bp, Homo sapiens
  misc_feature (77)..(77): n is a, c, g, or t
  misc_feature (83)..(83): n is a, c, g, or t
  misc_feature (94)..(96): n is a, c, g, or t
aatgtggacatgagaatttacacttaaaaattggttataccaatgtggatgagtgtaaggtgcacaaagaaggttanaaaaanttaaccagagnnnacaaccaaaaaaaa

SEQ ID NO: 589629 - DNA, 486 bp, Homo sapiens
  misc_feature (67)..(67): n is a, c, g, or t
ggtacgacggcagcatctatctagttttaaaggacttgaaggaggctgtgatggaagggcgcttgtnggagtgaaaagagctctgggctaagaatgaaggttcccaggctgtatttttggcaatgttcttagtaagtgtcagtgagtgatttatcttttcagagtttctctctctccatctgcaaaggcagacaaattgtctcttgcaagggtctgaagcatccaaatatgggaacacttacgaatgcttttcaaaatgagatgaagcccctctccatgtggtgttggagaaggcacttgatgtgggggcatttggtggtaggaagtgcttcagactggagcactccccatggatagaatgtccctgaataacacagcagaagccacatgaagggcctgtgcagtctcatgacgcatagaggacttgtgtggaccagtttgtcctctcctatgaaaatgaatgaggtttgaaatgcgacctgtgac

SEQ ID NO: 589630 - DNA, 1423 bp, Homo sapiens
cgtccgtgtgtgttcccgcgtctggtgggtagcatcgccgtgtgctgccgctgtttgcccgtttggggcgtgtgcctttgtcccctcgttatgcgcatggttgtcctcccttcttccatttgggggggctggggtaataagggtgtatgggcccgtgccttttcgccaggcggccctccacacccgaggcctcctcggggggtctcttcctccctttgtgggggacaccctccggtggggtccggggccgcagaggtatcgcttggcgcttttgaccccgccggagaagggtggaatctcccgacgggagggaatggttttatcccccctgaccctactcccgtccttgtgtgagcccgacgagaaatgtgggcgtcggtgtacccaaggtttttttcagacctttttaaaaggagaacatccctcttggcgacataaaaatgggttaagtgtggccaatagtggtgttaaggatgtctgtgttccactcttaggagaggtttacgccccgcgcagctcttatagagagttgtgttagaaggacgcccctcccttggagacccccgcccaaatttgtgtggtgcccccactgcttgtctagaccccccgctgtcacacaagactgggcttgtacacacgaaacttgggagatgcacatgggtggcccccccctcgtatatggtttgtagaggggtgagcacccacactctaaattgtgggctcttttcctcggcctctccctctgtagaagagagaaatgcataaagagatatagacaagagctcgtggtttgtgtgtgccccacgctcgagattttatagccgcacatcgtggagaacactccacttctccgactctagccccgctctcttttctcggggtgttttgagaaggctcgcctcgtgtctctctatagagagcagtgcggccactctctccacacattgtggctcttgttatatccacgctccacgctgcctcgcgaggagaaattctctgagaatatggcttatatggacacaacaacacttcttttataaattttagataattatattttttgagaaactcttgctcttggggtttgttggcacccctcggccaccccccattctggcttgtgacgcacgccctctctgcacgttccgctcggggctggccacgctttgcttgagttcttttatagtttcctcttccctatcccacgttccccactcttttctggtataggttttctaggaggtctcgttaaggtgtaacactcctcgcacgcttatttggcttataaaatgtactctcctctttaatgtggttctctcttggggccgacttgggaggaaaagagaaaatccactagtgcacacctgttttgatactgaatattgaccagtgtctttttgaaataaagaacccgtccctccca

SEQ ID NO: 589631 - DNA, 330 bp, Homo sapiens
gttatcatacaaccttcctgactggaacaagctcgtgcgtgccttgtatatgtaacataattgaaccatactttcacacatgctactccatggggtgtattttcatggctacgccttgtgatcttgtgtatatatgttgccatagtgactttccatgatcaccacatggtttggtcaccatagtattatgacccaggtgaaaatctagtgtttgtacaatatatgtagaatgatcactggagccatcttcccagattttctgagcttcagtccaaaaagcaatatttggttcttctaaatgaaaaagggcccaagattttgaacgaaaat

SEQ ID NO: 589632 - DNA, 186 bp, Homo sapiens
atcagctcggacccatgattaatgtgttgatcgttgtgacgcactttcctgtgttctgtgtatgttggggtagccttatggatgtgcagagcacagcagaagataaacaatcgtctgtgaagagggtcatcgcagcagtcaaatgatttcgtattggccattagttcatgataggtttgtttgttg

SEQ ID NO: 589633 - DNA, 1058 bp, Homo sapiens
ggtcttccagccttcatctttctcccgtgctgcatgcttcctgcccacgaacatcagactccaagttcttcagcttatgggctcattggactttacaccaggagtttgccaggggcttctcaggccttcagccacagactgaaagctgcactgtcggcttccctgctttcgaggattctgggactcagacatggattccttgttccttacctgtgtagatggcatatatgagagttcaccttgtgatcgtggttcttgtaaggaatggctggtccccctaaatcttaacaatggacatttctggtacctatctacatgatcgcctgcagtattttaccttctgattggttggcacaaagaattatgcaggattaaaaacttcaatgaacaatatctcccttctggttggcttcagaaatcaggttgtatcggtggaactgtaagcctcccagaccccaatcacatggtgactgtctaaaccgcagtacctcacaatgtgaccttatgggacgataggcatcttagaggtaatccagtaaaccatgaggtcataaggaaggctacccaaagatgaccgtgtcctctcatgacgcacgggaggacactcggcacatagcacccacacacaggcggacaccatccaggtggacggatgaagcagagaccaggcgcggctcaagaggccaagacacacaggactccgaaaaaccaggaatccgggaaggatgaacagtgctcccaagcccccaaaggaaccactccggcaccgtagagagttagaaccagatcaaaacgtggacgaaaatggggcacaagcccccagcgggcctgtgaagcggcacaaaacaagaccgggtacagtggggggaccccaactatgttgggagacatgtgcagagaaagacagagtggaacacacagagagagggataacacgggcgcagcgcaggtgcgggagccactataaacctattcatggttagcgcttcgcccttcttctgtatagaaagaggctgacagcaacaggaggaggagggaaacacaggaagaagcccaac

SEQ ID NO: 589634 - DNA, 89 bp, Homo sapiens
ttgtggtcgcggccgaggtacaccgtctcgatgatgtccaccatctcctgcttgtcctccatggcccagttaatcttgttgttgttgcc

SEQ ID NO: 589635 - DNA, 102 bp, Homo sapiens
aatgttcagtagaatgcccgatatgcgggcacagaacattgcgccacaatgatcagcgtcgatgcgtatgcgaccgcaacagagaacacgccacaggcgccc

SEQ ID NO: 589636 - DNA, 111 bp, Homo sapiens
aacattggttcacgcattactgtgggcttcagtggaggaagtaatgctgagctgcgagcttgacatcacttaccaggagcctcatggaacccagccagcacatgagcaggt

SEQ ID NO: 589637 - DNA, 291 bp, Homo sapiens
tgcccgctgggagctgacctcgatacgtccacccgctggcagctagacatcctgctactcagtcacggcggactggcggacagagggcagcaagcaggcaagggctgcacagcggcacaggcgcctctcttgcctagctactctccactatctagcacgactggcttctctagatgactaacccacaggctctacaagcagcgcttctctagctaaacgtgccctgctgcttcactctgctggcacaacagcttacttacttcttgccaaccactcataacgcctctctac

SEQ ID NO: 589638 - DNA, 441 bp, Homo sapiens
caagcagttaatacagactcatcttgagtatttttggatatggtaagaagtagaagtctagtttcattcttcttcatgtggttagccagttattccaacaccattaattgattagggagttctcaccccattgtttatttttgtcaacttcatcaaagatcagttgagtttaggtatacagctttatttctgggttctttattctgttccatattctatgtgtctatttttatactactattatgctgttttgttactgcagcctttagtatagttgggtaatacaatgcctccagcttgttctatttgattaggattgctttggctatttgggctttatttgggattccatattaattttagaatagtgtgtttctaattctgtgtagaatgatgttggtaatttgacaggaattgcattgagtctgtattaactgcttg

SEQ ID NO: 589639 - DNA, 82 bp, Homo sapiens
cgattgggaatctagcttctgcttgcctttccagcgcgacgcacagtaggagcctaataaatgtttgttgaatgaaaaaaaa

SEQ ID NO: 589640 - DNA, 434 bp, Homo sapiens
tatgacttagaggatcccttcttgcccgtaatccatattgtctggctgagggggtgggggcgatgccatggactagtatggtcagaggaggctgcgtgtcctcttggtgtccctgtgggaagtagcctcatgcatggcactgtctagcagtattagcgacccaggtgtccctgtcacctgctctgtttcagctgttgcagtgcctcagggtcccttacaggccaaaagccatgaggtcagaggcagaacagtccccgtgtgagaatttggcgatcgtgggtgcacgactgcttcccaatctcacagcttacagtcggctgcgccaatcaagtcgtggggttgattttaacaggtcaagctgcatagggacctatcctaccccaggtctgagtccgcaccggttctccaatgtctcttatcccaccatggatagg

SEQ ID NO: 589641 - DNA, 687 bp, Homo sapiens
cctagaggatccccgacgctctctctgtgggggggggatttaggggtgaccctggcaccaggttttctaacagatgacccggtgaatcataatttaaaccggcatatattttatagccagtcacattggccccctcacccgggaaaggtctgcataaacggccccttcattggcatataattaaaagtggatacaaataccactgcagaactggcctctgagcggctacggggggcgcacagccggtagggcagcccggcttggcaaggagcagcgcctctgcggctgctgtgcacagccgggcgcttcaataaaagtggctaacaccacgggctggccctggagttccttccggggcaaagctaagaaccctccggggctaggcttcaatcttagggctcgccggtccggcatcacggggatcatctcccagtaaactagccacacttacatccaggggtcagggacatttctgggagaaagcaggccaggacactgtggaataaaacacacaatagtctctgtggtcttctccaccccaacccaaaccaggcaccctcagcttgattctcctttttaatgggctgtaagcagggaagcacaatgtttcacattctgtgtaagggcgttggtctactaaaatctaacctcagagcccaatctaaactagatgaaagagtggtgcgc

SEQ ID NO: 589642 - DNA, 199 bp, Homo sapiens
taattctactacaaaccacaaagacattggaacactatacctataatacggcgcatgagctggagtactaggcaccgctctaagctatccttattcgagccgagctgggcccagccaggcaacacttctaggtacacgaccacatctaacacacgtaatctgtcacagccacatgcatatagtaactaatctatcttca

SEQ ID NO: 589643 - DNA, 963 bp, Homo sapiens
gccgaggatggccgtcatggcgcccgaacctcctcctgctactctcgggggccctggccctgacccagacctggatgagtgcactcggcaatgaggtattcttcaatccggtccggcccgccgggagccgtctcggggctagtggagaagcatgtgcggttcgacagcgaacgccgcgagaccagaggatggagacgagggcgccggggatagaagcagggcggggccggagtatgggacacagggaagcaccaacggcaatgtgaaggcccacaacagataactgaacgaaatgagcctgagcagacctttgcgcggttacttacagaccagagcgaggcccggtctcaaaacagtccaagaatcaatgtatggctgagacgctgaggatcgagacggtgcggacttacttccgcgggggaaaccgggaagggaacgcataacagaccgcgcaaagcgattacattcgaccgctgcacacgaggacactttacgactcataggggaccgagagaggacaatagagtcgagtcagaactccacccaaaggcgacacaggtgggaagggagagcccattgatagaggaggcagtcgacgcgcctagccatggaattgagcacgtggagtggacgaggagtccggaaatacctggagaacagggaagaggcaacgctggcggagaaacggaccccgcagagaaacttataaaccaacaggaccagtctaggaacacaagcgccccctgaaggtgagagaaaggagcgctcaacctgagaaaaacgagaacaggaaaggatgaggacacaaacaagaaaggagccttgagacacgcagaagatgccccacaacagggaaaagagaagcacagacggaacataaatgacgtagcaagatagaaacaccgaggacgacaacaaacccagaaaaggcagatggagaagctgcccagaacacacaaacgg

SEQ ID NO: 589644 - DNA, 402 bp, Homo sapiens
aagagtacagaaagagtagcctgcatctctctattcatacaggtatttacttgctatcactatattcttccaagccagtgagtatgtctcaagagtgtgatagtgtgacttacacataagtctactaagtctcagaatccaatagggtcgattagttaccacactagaggctaaactgtgtgaggaccacagttaccattcacaagggacagtgaagatactttgggacaggtcacagtgtcacatcaggtcagaggctccgagcaagtataaccacatcctttggaaatccttccatttttgcaatgtccaaacatcctaacttgctgttagatgccagagttcttttatcatctggtctcacttcacagaccgctccccgggagccattagcctacagtg

SEQ ID NO: 589645 - DNA, 103 bp, Homo sapiens
gctcttgcaaggctctgtcttatagttccccagcacaagcagtctcttgccaccgaggctcctcgctgagtgatcttttctatcatggcatggctcgcagccc

SEQ ID NO: 589646 - DNA, 401 bp, Homo sapiens
gagatcaagatcagcggctcacgcagctcgagcagccagccaattgctcgatgcacgccaagatcttcagtcaggcctctggagacgaggagaaacagacaacaccatgttcacacgtaccgcacaaaacgagatctacagccaatttaaacgcctacccaatcccgacctggtgatgtacgtctttcctcatttagcgggttcagacccggcaccgatcccaggctacaccacggtgtttccgctgtatcagcgggtgcaatacgccatgcctggcgaacgcacggaggcatattgatgggtttttttgaacgattcaaaacgcaacgggcgacagagcgtgtggaacctggcgtaacaccaggttcgccgttatctgacgatgtgcagggacccactcg

SEQ ID NO: 589647 - DNA, 251 bp, Homo sapiens
  misc_feature (12)..(12): n is a, c, g, or t
  misc_feature (134)..(134): n is a, c, g, or t
  misc_feature (136)..(136): n is a, c, g, or t
ctgctctagttnatgtaaggatgagggggcggcctagaccccctgctgcccaggccgttaaggcaacactgggttcctggcttgaaagctgtgggctggctgcccttgccagctcaaacggctggcgagttttnancttccctaagggactggcatagggttttttggggtcaatgccaggaacctgggggaaactggatgcttttaatcctaagaagttcatccctcctgctcttactgtttccggccct

SEQ ID NO: 589648 - DNA, 334 bp, Homo sapiens
  misc_feature (53)..(53): n is a, c, g, or t
  misc_feature (92)..(92): n is a, c, g, or t
  misc_feature (110)..(110): n is a, c, g, or t
  misc_feature (130)..(130): n is a, c, g, or t
  misc_feature (148)..(149): n is a, c, g, or t
  misc_feature (167)..(167): n is a, c, g, or t
  misc_feature (238)..(238): n is a, c, g, or t
  misc_feature (316)..(316): n is a, c, g, or t
  misc_feature (331)..(331): n is a, c, g, or t
caaatatcgtcatacccaagatggatgccacagccaatgatgtgccttctccncatgaagtcagaggttttcctaccatatacttctctccngccaacaagaagctaaanccaaagaaatatgaaggtgnccgtgaattaagtgattnnattagctatctacaaagngaagctacaaacccccctgtaattcaagaagaaaaacccaagaagaagaagaaggcacaggaggatctctnaaagcagtagccaaacaccactttgtaaaaggactcttccattagagatggggaaaaccattggggaggactaggganccatttgggtaattntta

SEQ ID NO: 589649 - DNA, 325 bp, Homo sapiens
cagctcacccaacagaggtgagcagcacgcagcattaactgtactcttgcgacaataagaaaacatgagaggaaatacatgaaataagctaaatatgcattaaacatctgtgaataacagttagactgcactacatgaaccaatacacatttagctaggtccatttaagtgtacaaagcactgccatttattttcaaagcgctgagtcaatcagtcaacacacgcctctgacttatgacgaggacgtctgatgctgccacagcgcaattcctatgtgcttctgactctgctcatcagtcacacggagctgatggcttgtacagaa

SEQ ID NO: 589650 - DNA, 1133 bp, Homo sapiens
gtcactacactcttcgctacctgtacttcatcgctatccccaccggcgtgcgaagtatttggcttgaccttcgacgccacaggtcactaagacaagcataagtatgaaaatggtatctagactcacacttgactcttgaatacctgctattcatctgtccttttcgtcggctatcgactggctggaatcgtgtccttccatatcttgatatagatctgattactctatgttgtaacgtagcagaatggtgcctcaacgatcgcactaatgttcttatatagttaacttaatttgtttttggcccgggcattgatcgtaagcacttcggtgcctgatagatactctccgcataatgacgtctcctcgtaattccctccatgaaccaaggctcattacacctcactccctcgcctattggacgtgatccagtctatcatcagttgtgtgagaattctataatattaatatgtcatatattactttgccttctggctaatttccgtgtgagtgcccctgaaagataagttcagcgcaataaactcactcaggcatgtactaaacaatccggtggtgtaaagaatatccacttatacgatccctgttatggacttctacttactcatttcatcctaagactaagtgggcaaaagtactgtagttcatgtttgctactgggaccgaccaagagacgcgccgacgtaacatacggtgactgactcctgatagaagatgggtagcccatccatgccctttggttgtggctgttatgggcgggcctccgccaagttaccatgaatttcccctgaaaacccgttatatatccccagccatgactaacaaacgatgatcggagcacgccgaagtgcgtttgcacttggatgccccggggcaccacgagtacccagagatacacagagaaacctcagttgggccaaagagactggggtcccacaaccatggttccgggaccaaaccccaggttcttgaacaaacaccgggcgaaccagaaaaaaacacactgggcgacgaaagtcgcggaggccaaagaaccacgtgccgcgcacacacacatgtgcgcacccccgggctcacaacaaactctccaaaacacacaccagcagcacccgacacca

SEQ ID NO: 589651 - DNA, 526 bp, Homo sapiens
gggtatctagaggacccctcggctctacctgtattcaaactatagctttgtagtatagttgaagtcaggtagcgtgatgcctccagctttgttcttttgcttaggatgtcttggctattggggctcttttggggttccatatgaatttttagttttttctaatttggtgaagaatgtcaatagtagtttgatggggatagcattgattctatttgggcagtatggccattttcatattgcttctttctatccataagcatggaatgcttttccatttgtttatgtcctctgatttctttgagcagtggtgtagttctccttgaagaggtccttcatgtcccttgtagctgcattcctaggtattttattattttggtggcaattctgaatgggagttcatgatttggctgttggcttggctgttggtgtataggaatgctagcaatttttgcacattgattttatatactgagactttgttgaagttgctcaagaagcttttggggtaagacaaggtagagccgag

SEQ ID NO: 589652 - DNA, 391 bp, Homo sapiens
gctaggcttctggagcatgggagacggaggttgcatgagccacagatatgtggcactgcactccaacctgggtgacagagcgagactctgtctcacaaaaaaaaaagaatcctctctgtaactattggcaaatggtaataagtaacctttggaaaaataagaccagcctgctgggttaagcttagttgtagtaatggggttcgggagatactggagaagggaaatcctagtggtaggaggaaagtctgtagtgatattgccgcaggactctgaccctggacagtacctagaaactatagtactagtggggaaaagctggtacaaggactgtaatgtaatcccgaaggtccccaattgtccggagggtctggatcccattggtctccctacc

SEQ ID NO: 589653 - DNA, 148 bp, Homo sapiens
gctactccacaaacagggcacacaagtagggtcattcacgtgactggactgtcacaatgtggctgtcacgtgaagtgctggtgttgatttccatttaatgccagtggaatgtaggaggtaacactctgttatgtggaggtagcactga

SEQ ID NO: 589654 - DNA, 146 bp, Homo sapiens
attgattctacattagttaaatgtatcatagtggatgtgtgtgtgataaagtggtatcacaataatagcaatgattaaattcgggccaaaagtggattagagggagaatggggaataactgccaatgggtacagggtttctttttt

SEQ ID NO: 589655 - DNA, 837 bp, Homo sapiens
ccatactttgatactgctccatctctttttccagtctggctccagtatttaagactaatatctgctgtgttcttaagcgtacacaggtgtgactgcctattgtcaaatgctgccaacaagactcctttttacgtgttaatatattgagtcgtcacccttttgggttggttgacagagtcatatcacctgtagaaatggatctctcatattttttcctttcccttcttttgcatcaggaagattagttttaatctgcatcatccaaggacaggtctggataagaaggaattaatgatttaaggtgtgaattgttatgatgatgcgaaaacgtaccaccataagggatttttctgagcatttagacatatttccgtggtgataaagaacttccagatttagcgtcagagtcactgtaggtcatctatgagaaattatgcagaatacgttatcagaaatggtgagaaaggcaaagtctgtaattttttggcattttggtataaaagtggcgggttctggaaacatactacccagtaagcttgacattgatgtactagcgaactctaggtacagtttattgaaaatggtttaaggaaatgttaatgacgattaatgagtctgaattttaaaagttcacaatgaatagtgtcatttttgtttttgtttgcttgtgtttgttctttggttttctcgagggcaggatctcgctctgtcacccggtctggagtgcatgtggcgcatgtctcggctcactgcaacctccacctcccgggttcacgcccgagtctcgtgttcacctgatactggcatacaggccaacctctgccccccaaaaaaaca

SEQ ID NO: 589656 - DNA, 110 bp, Homo sapiens
cgcattccacttgaagaggaaccagagtcttctgcccaacgtgtcaaccttgaacaaattgtggactttggtcatgtgaacagacacgggtaactgcgtccgtcgaatgt

SEQ ID NO: 589657 - DNA, 152 bp, Homo sapiens
aaggatggttagagctacggagacggtagcctgtagactgaccgagccgttagctaggttagtccggcaccccttagtggtttttacagtactagaaaagaccttaataattacccacaccgttccttacgcacctttttatttcccgtgca

SEQ ID NO: 589658 - DNA, 134 bp, Homo sapiens
tcccagagtcccctttcatccggcgtcatgagaggcggcttcagcgttatctgcctctccaagcacgttcccaagcaaacaggtttcgatgcactgcattaggtggcagctgcctactagactgcgttaatata

SEQ ID NO: 589659 - DNA, 308 bp, Homo sapiens
aggagtctcgttttcatgagcgagtccatatttagatgagagtgggagaagacatctatagccagcattttcatagtcttcaccgagactaagtgtgaacaaaaaatttaatatggcagtctagtattgtaagctcacgctttaggggagtacattctcaggtcttctttaatgtgggaacggcaaaatataactgccattacatggtaatgggagttaaagaatagagtcctcatgtaaaggttagaacatactttactattagtccttcaaggacagactttccaaatgttcgattctaataatcc

SEQ ID NO: 589660 - DNA, 506 bp, Homo sapiens
  misc_feature (205)..(205): n is a, c, g, or t
tcttggcgggatcttgaaaaggcccgaggtcaaaaagcgcctttgagcccccgccagaagaatccctcgccgaggtcctaaaaaaggaccccctggaaaactttagaatcatggtggagcttaacccctatgccaaggccctggggcgggacccccttttttgcccgggccgggattcccagccccgggggggtaaggcaggtgntgcagcaacggcccttccaacccaatcaaattagaagggggcgggtgccggccaaaagcctgtgggtgggtaaaaaagaaaaaaggctgctgttgggggttaaaaaccaaaaaagcctttgggggggaaaaaggccgccgcctcccagaaacccgccccttaaaaaaagcctgccgagaagaaaccctcttccaagggggagaagcccgggggcttaactttttaattttgtttttccctaaagggccaatccttttgggccggttttttttaataaaggcccggttttaccggccgggga

SEQ ID NO: 589661 - DNA, 710 bp, Homo sapiens
attcggcatgagagagatgctgacagtaggtttgtgctttttacctaatacagggtaaaaacttttatttctacatttttcttcccccattatctctgccaccatcccttagacttcaggagcataatgacccaggtagctagggtggaaactgagcatgtggaccctacatcttttggggagggtggtgaaaaactgtgtcatgtcaggttagatctgaatctctaggagaatagcttttttgatctgtttgctcctttgagtctcccttttactttatcctttgaaaaccaattgcatacttcacttccattgcttccagatatggcatatttttcttaggctactgttgaaatttagcataatatttctcccttacctttctgtccttttaaaaaaataggactatagtaagtcctccgtgtcggtggtatgtttttggaaactgactttaaagaaaacatacaggaagtcctcaaatagtgtcatttcattataatgatgcaaacaaaacaactacctttgttatacgttattttgcttagagtcgcagtttctaagaacctatcgatgttaagtgaggacttaatggtatagacattttgaaatatttgacggagttgcattttggaaaaattgtatagagtcttcatgtctttttttatttctttaaaaaaaattagaatggaattctaatccgataaaatgat

SEQ ID NO: 589662 - DNA, 659 bp, Homo sapiens
gcatgccgcaggctttggacacagaaaggcacgttcagtgcgcgcgcagagattgggtgggcctaaggtgagaaagcgtccgagttcaagtccgggatacgagagactgttctgtagttggacattaacttgaatcactagggtcaacttaactagctgtatagcacagtaggtaacgaaactgatgttcgctggcggtcgatgaagatcaagtagcactgtttccgttacagatacggagtccatgcagaatatccatgtccggtacgttcgctaattgtaggaactgcgtatgtagctgtatgttagatactgcgatcagaggagaagtctgacatagtcataccgatatagccctaccttacattcgctcatgcgatccgagacacgtactatgtcaggagagcacgatgtgcatgactgaggacttggacagcctggctatagagcctataggagacatccaggaagactagatgggacatctatcatacagtgcatcacgtctgcgtgcagacgcacaatgtggcacacacgggtgaaacgtttttgatggctatgagacagtcacgggttacgatgaaagtgtgaattgccgcctttcacacgctgacatgcacggtgcactagggtttatcttcggactttcaacttagggc

SEQ ID NO: 589663 - DNA, 236 bp, Homo sapiens
gtgatgattcagagagtccccatattcatgaaccgacgcgcagtaccctctctatggctaaataatcggcatattgtcgtcatcgcaagtgtgctcggagggtacgtcctcttccacgtgtaaatcgccgcactagatcagcctttcgaagtgctgattatcggcggtgcgcgttcggcgcatttttgaggccaaaccaggctatatgaccatgcacgtggtcaaggaaagtcctt

SEQ ID NO: 589664 - DNA, 1077 bp, Homo sapiens
cccacgcgtcctgctactggggaggttgatggcaacaggagctgagactctgtcttaaaaaaaaaaaaaagttcaccaccatgcttggtttgtggccccatttggactgggaggtggagagcagtgaagcagccggcacgtgatgtgtggcctcccggggcagcagagctgtgcatgtgcatgtgcgggccaggccggagggctctgactggatcctcttggagcatctaataggaagctgacacacccattcactctcttagaatagctgtgcacctgacagataaccagtttcttgttgttggtgagtggtagttaaactaaataaataaagcaggcaacacgaacaggtcttgtccttactgtgacagtcatttgcttgctgtgaccactactatggtctaacacctcccactcactttcctcaatcagtgctgcctgcaatggcaggaactctggtgccaacagagcacctgaccatagcatcagagctcggtgcctgggacaaccataataacccacacgccccatgtggacccaccctgcactttgaaccttatgagaacccacatttggcattgacctagaagcgcaaacgatgatcatacctcacccatgaacgctacggaagcagctacatgggagacatacatgagacaatagtcaataacaatatagaataaaacacacaaagtaacagctggacaccagaccaacacaccggacaacgctgacagacaccctgcaaccacaacgcacacggacagcaccagcagagaggaacaaccgagacacggggaagacacaagacaacacccgagaccagggaacaacgacaaaaccacaacacacaaaacaccagagagcgacaaacgacaacaaaaaacagaacagaaaggcgcaaagcacaaagacgccacacgaccaaagagccaacaacacacaaacagagagcgaagcaaaaccgaacaacaaaggacagaaaacacgaacacaccagatcatcggacaacagacaacgagaagaacaaccacaaaacaggacaacacgacaacacacaaaaccaaacgaacaaa

SEQ ID NO: 589665 - DNA, 444 bp, Homo sapiens
acctaaagcatacccgactcagcctcctggggagctgggactacaggcatgcacccctgtggctggctcatttcttcttatagctgtatagtattccattgtgtatgtgccacaatttgcctatctgttcatccactgatggacattttggctgtttcccccttttggctatgtaaatactgctgctacgaacatgtgtgtacatgtattcgcttgagtacatgtttttcgttctttttgggtatatatccaggagtggagttgctgggtcatatggtaattctatgtttaactttttgaggaaccaccaaactgttttttcctcagtagctgaaccattttacattcccatcggcaaggtacaggtgttctaatttctccacattctaaacaacattcgttttattttattttttttgagacagagtcttgctctgtctccca

SEQ ID NO: 589666 - DNA, 152 bp, Homo sapiens
ggggtaaatttggggttttcttttttcctttttggggggaattcaaagtggggtgggcccctgggcgaaacacagctacctttgttggcatttttttaaaaccaggaacccaggggctttagcccctgaggggctaaatgaaataaagtgga

SEQ ID NO: 589667 - DNA, 267 bp, Homo sapiens
cgacctagaggatcccgtgcgacactgtactatgattggactgactgatcgtatgggcctgtgagtatagattgaatatacacacagaaatgctaagaaaaaaagacttagctcacatattgtttattatcaaaagtcgccagacaatccatttttaaagaaactgatggaaaaatgcttcccctaacatgaactatggttagatagcattgtcttgtcaggagagttcaccaatttcacgtagcctgatcctttattgtggaaaca

SEQ ID NO: 589668 - DNA, 397 bp, Homo sapiens
tgcggtctatctagaggatccctataggcgctagtgtgtccctgcgatactgccaaacctcagagaaggaagcccccctttttttttttggagacagaatctcgctctgtcgcacaggctgggggtgtagtgggtgtgatctcggctcaccgcaacctccgcctccctggcccaggcgattctcctgcctcagcctcccaagtagctgggactacaggcgcgggccaccacacccggctaattttttatttttagtagagatggggttcaccatgtgggccaggcgggtcttgaactcctgacctcgggtgatccgcccgcctcggcctcccaaagtgcgggggtcacaggcgtgagccattgcgcccggttcaaatttacctcttatctccctttg

SEQ ID NO: 589669 - DNA, 345 bp, Homo sapiens
aaaagggaaaagttaggtgttttaaagtccctcaaaatgggggggtcaggggtaaaggcatttcccccctttagggttttcaaacaaactttttacccctttcaagtttaaagcttttatgtggaaaaacaaaaggtgtggggaaaaagggggattttgtgtgtttgcaaaagtgggcgcttcaggccttgggagttggcaaaagggagggaaggaaggaaaccaaaatttttggaaggtgttttttgtacctaagggatcctgccctgaatttccaaagtttcccctgtgaaataaaaaagggaggggtgtgttggggaataaattttgtatgaggcccatcca

SEQ ID NO: 589670 - DNA, 393 bp, Homo sapiens
tgcagtcgtgtttccatcgccacataacctattcccattgccgacaggaaaacctgtaggggtacctcatcccgccgaatggggccctgccctgaggacatagaagcgagatcactccctgtgagcttacctcatgcgtgccataatggatccttagtttggctcatagtgacatgcgccccatcgatgtcagcaggtattcatacttgggctgatacccagggtattggagtcatgttaattccgcattctgagaatgtgtgagtcacattccatacattaaatggcatcctggtatcccaatctgaatttgctcctacatgcctaggcaaatgaggaggatctagactagtgtggttgtggatgctaggagtatggtggctttaatgtctc

SEQ ID NO: 589671 - DNA, 508 bp, Homo sapiens
agttatggaaaatcaaacacacgccacagagcaattttaaccgatagaactagctgcaatctacaggcacacggtaccacggcaggctaattcttagattcttagcaaagccccaaatattttacaattatataatcttggcaaaacattataatcatacacatttgacaattaagactcttacaaaagcaatctcaaatactcttagtcaaaacctcaaccactcaatacttagagagcttcaaccttataaccattagcccctaactatttttcaacattgactcaaacagactgcactctatatcactttacgaaacccgaacacagtacaggtgcattttcacatgccttagagaaaaaaaaccaatgtccattaacatgaaaaaaacatgaacaatggtcacaacaatgtcttacaccaatctatttactaccttttatcaaaaagattctccaacatgcaaagtacctctatatgaactttactcaattatacaattgtaca

SEQ ID NO: 589672 - DNA, 1368 bp, Homo sapiens
  misc_feature (935)..(935): n is a, c, g, or t
tggatactggcctaacatgcttgtgctgtaaaaatagttaacagggaaaataacttgaaatgatggcctagctttgggttataagtgctcttatgaaatttctcagtgaacaactccaagcattaattgtggttaagaaaccacggtgtttttaaatctcagtgttaaggtggcacataaagagttttaagtgaaagtggcactttctcaactatactttctcctcttacgaggctttttctcatgtggtaaattatagtctcgtgggggtctcgtgaaaacttctctctcttaagaggggaaattgtggtcacattttttgtgtgaaatttttattccctatatttcccttcttggggcgaggcttaaagtgggccctcttataccgaaggtgttttaaaacccaacaaaagatttataatatccagtaacacaagaaatataccatacctaaatatattaacctatacgcgtggttctcccagtgtgtcccgagggatattccccttctttcttttcccctttccccacacccgctgtgtaacacacacaaagtgtgagggttcccccaatattttttctctctgtgggggaaagacgcgggggggggggatttgtgagctctaaggaaagaaacacacgtgtctcgctgggtgtttctcccacttttctcacaaacctttgtgtggggcaaatatagtgggccacatttttctctttaaacccttattacggggaaaaggcccccaacaagagggcgtcccgtttgggggcccccaacttcctatgtgcaacccagttgggggggtataaggccaatttttacgccgtgggtaacagcctctccgggggggccctatcccccaaaaagctccaccttttttgtggggggcttcttacacacgcagaacaacctttcccgtgtggaaataacnctccttttaaataaggccctgtgtgccttttcaaaatttttgtggagctctcctataaagtaccctttgcccaaatttcgggccagcgggtggccccaaagaagttaccgctttcccggggttaataggccctttccttgctctgtgttctgcccaacagccaattttgttaacctgtgggcggggggcccagtgtcacttgtggtaacaaaagggcgcggcagtagtacacctttcaggggggcccccacacgcaggggattaaaggggcgccgcgggttcaccacttgggcacatgagacccccgaagaaaaatattcgcccaccaccaaattaacggcgcggcaaactcccttggaggcgacacaacagggcgtgatcacacccactataaacgcgcacaaatccagcagcggtgcgagggggcgcaacc

SEQ ID NO: 589673 - DNA, 166 bp, Homo sapiens
tgaagttaatgtatatttttcccatgtattttattaggacataaatattaactgtaaatagtatagtctatcataatagtatggcctatttaaaatgtttctttagcagatttggacatcactcagcttatttaaactcttttattggttatttttagtattttaa

SEQ ID NO: 589674 - DNA, 421 bp, Homo sapiens
cccagaacccatgccggactgcaagcaccggcagccccagctcatgtcgcgcctctccctccacacctccctggagcagagggagtccgctccagcctccgccagccccagaaaggggaccccacagcgcagtggtgggctgaagggctcttcaagcacggccagagcggacgccgagtccgaggaggccccgagagctagcaagggctgctagcacattgtcacctctcagaagtccaattctcttaccatctgcttagagtttttcacttctttgtggccctgggaactctttttcatatatgagttctggaatatttctggtgataatcttgacattgtacatttggttttggtttattgtggagggagtgaagtcagcatgcttctatgctgccattttagaactggaagtcctcct

SEQ ID NO: 589675 - DNA, 615 bp, Homo sapiens
gactttgttttttaattaatttttgattgaaaagtaaaaattatatatgtttatcatgtataacatgttgttttgaaatatgtatatattgtagaatggctacattgagctaattagcatatgcatcacctcacatttatcattttagtggtaagaacacttaaaatctcttttgcagttatgatttcacattttgcactttatttgcaattttcaaaaatgagcgtgtattacttttaatgttggaaaaatataaaactattacaaaaattgtttatgaatcagatatgggattcacacatgaagaaagcagaaagatgtgctaaatagcgtgttatttatttcatttgatttttatattatataagatcagaaatgtataaaaatatatgttcacttgataatttttcgtaaatatcttaaattaccctttatctatttaaaaaaattgtttagcatgtcagtgtcagctatgctcaattttccccctgcttttattcatccatattatgtgttctctggatttgcccttgcatacactccctttaaagctttcatttaagaaacttttaatcaattcgagggcagttatttgttgactttcacgttagtata

SEQ ID NO: 589676 - DNA, 420 bp, Homo sapiens
tcagtaattataagcggctatcgtaccacggtacgggatagcgtgtctaggtaccggggataacagcaaggaacaaggcagacaagttctctgtgtgcgtgggctacagttacctggaaaatgcttaatgtgtggagaaccctcgttttctgactgatgccagataaatgagtcattactgtatttgggaagtgcaaatagaattttaacgtgttctaatttgtttctcctttaagtggaaataggacaatcatctgaagacataattattttgacgtgaaataatttccagtgggtgcaaaagtgaaatgagaagtctgaatttaggcatgccgttaaatttaatagtatttgaaatagtatctaaactgctgtgttgaggaagtttggctgaaaagtggattttgtcacgttagctgt

SEQ ID NO: 589677 - DNA, 286 bp, Homo sapiens
  misc_feature (34)..(34): n is a, c, g, or t
  misc_feature (40)..(40): n is a, c, g, or t
  misc_feature (42)..(42): n is a, c, g, or t
  misc_feature (64)..(64): n is a, c, g, or t
ttggacctgactgcagtatgggcctgtgactatngattgnanaatacaaacagaaatgctaaanaaaaaaacttagctacataatgtttaatatcaaaactcaccagacaatccaattttaaagaaactgatggaaaaatgcttcccctaacgtgaactatggttagatagcattgtctgtcaggaaatatcaccaattcagtagctgatctttatgtggaaacaaaaatagggcttagtccttattcataagtacagtgatcgaccaaggggtaccgagctcgaa

SEQ ID NO: 589678 - DNA, 387 bp, Homo sapiens
cacccaggcgcacttctgaggctgactttggatgcaatataatacacaagctttaactagatgctagtgatgcaaccgttttcctttacaatatatcatacagtggtaatgcttttaccaagatggcctcagctccggtcagctatagcagaactaccactaaaccaatgtgtcttttatcacgagtcatgaatacaggatcacagtttgtgatggaaggagtgaagaacctggttttgtaacagcacaatctacctggttatctcgtatttctgtacaatcttatggcgatgaagtcatacccctacaatgatatactatcgattttttgattccccatatgacttgcggggcaataacagctcagttcccagacattaaaatcca

SEQ ID NO: 589679 - DNA, 712 bp, Homo sapiens
gggggaggcgaccgccgcggtggaaagtgcaggagtgggcgaggaggaggaggaagaggatggtgagtggcgacggaccaggtgagggggagatgctccgtctagctcagacgccacgcaggctgacgtcacccttccgggtgacataccggctcgtggggccacttgattgagttccggaggcgcaggttaatcaaggcataatggcatggtacttgtaacacagtaagcaaaagacatacagaagataatcagatccaggaaaccaacagaaaagtaactctgtagagcattgaagtgcagcaaaataacaatggatctcaagttcaacaattccaggaaatatattgctatcagtgttgccatccaaaatccaaacaatgtcaccgacagcatcaagtcagtgtgaggacgttgtggtactgggcatgaaatctcagcaagttgtaagaaacttactcaggttttttcatatgtgtagctggaggttttgtatttgacctaatttatgggtatttacaggaattaatattttcagtggagggttttaagtcctgtggtggtaccttaccttagtgcagtttggcttttactccatatttggctaagtagaacttcagcttatttccctggcactatgtgcagatgccgtcattggaaatgttcaagagaaagtatgaaattcataatgcttctaattctgaaatggtat

SEQ ID NO: 589680 - DNA, 543 bp, Homo sapiens
acaccacaggttttttataggagaccacccaaccacaagtgggggacacatgggtctgtgccccgcagcacccgcccgctctctggtcttgccaaagttatgttcatgtggcctccgcccttcatggtcaaaatatagctgtgggggtgcccccctctgcataggatattttttcctggcacgcggaccgacaatcgccaacctcccctgcgtggtattatgtgaaaatgttctgttttatatgtttaataggaagcctctagaacaataatgagcggccaccttattgttgtagtgtgtgcaataatataactacctccctcgaaatgtaggctctcttatctccaatggtgctttgaatagctccctatagccccgcctgtgcaagaacacaaagtttctacaggtggtgccctccacctgtgcagggaaaccacacccccctgatttgtttaacattgattactcctttcgaggcacccgtagtttcactctcaactcccccgcccctggcctcccacaagatccccctcccacaaaaca

SEQ ID NO: 589681 - DNA, 449 bp, Homo sapiens
aggagggacccaggctccggttgataagcgagagtggatcaaatcggcaggtccggttcatctgatggcacaggaatctcactgtgccccttgtctctgcaagcctgattccccattcccagccaaagagaggtcttcgatccctggtcatgctgatttgataccctgtggcattgtgggccctaggctgagagcttaaagcccagtctctcaataatcctaagaatcaagttgagccagacgagggcacaggaccagagagtctctccaggtacgccacacagtctttgagctgtgtcagagctggattgtttacctggggctggctgtatggaggccccaggcattgtcccccacaccaggaaagttggcctgtgggtaactcgtacttgaatgcagacacctgcctatgccatcagggtgacccaggagggtgagaaagcaggaca

SEQ ID NO: 589682 - DNA, 82 bp, Homo sapiens
gacagcagcttctacatctgcagtgctgggacagggctccctctaggctacaccttcggttcggggaccaggttaaccgttg

SEQ ID NO: 589683 - DNA, 351 bp, Homo sapiens
  misc_feature (351)..(351): n is a, c, g, or t
gggttttgctatattagccaggctggtcttgaactcctgacctcaagtgatcctccacctcagcctcccaaagtgttgggattacaggtgtgagccacagcccctggccttaatcctttttttagagacagagtctcactgtgttgccaaggctggtctcaaactactggcctgaagtgattctcctgtctcagcctccggagttgttgggattacagacataagccacaacacccagcctcctcttacttttaaatacattctttcccttattatcctagaagatgaacccagtattttccatgggcttgtagatgttgttggactacttctgtagctgctttatttttn

SEQ ID NO: 589684 - DNA, 255 bp, Homo sapiens
aaaaaaaaaaaaaaaaaaaaattcaaggtcccaaggcttgtttggggggaattggaccagggtttataaaattatcttcggaaatactaaacagaattgggtggcagactatgaaataatttccaggtcttaatttcaacaagggcaatttttatgggtcttttgagggattcccaattcccaggtggggtcccttctcttcgggcctaaacgggtgtctcattccctaataagggggctctcggattaacggga

SEQ ID NO: 589685 - DNA, 956 bp, Homo sapiens
aggagctaccgagtgccgacgtaccttggccgttgatcgtaaggcgtcctccgtgagcacggagcgacaagggacgaagtcagtaccacagaactgcgagcacgtgtcacgctgcgggtatgcgctggaggcctaggcccttagcatgagcggacaattagttgatggtgagctatgaagtcttggccgggaagctaaatactgcatctgctgggcatgtagtagctagtccggtacaccccggacgggaattgtctcagatagcggatgcccaggccgaccggtggctcgacacgaatctaatgctcgagagtcagagttagccaacgcccgggaagtccatgagggtgttggacgagtcagcccacctctcccagagtaaatgtctgggcacgtcccccttagaagtttgtaaataagcaaggtccgaggggtcgacgacgaaagcgttagactacggaaagagtggcgctgtataaacagtagtcttggaaaggactaccaactaagcgtgaaggatactccagaacatggcgatccaaggaggaccccccagggtattgcttgagcgcgcttaaaaagcctcacacaggttaaggatcgaaacaaaatttgtttgctctggcgaaggaccttacttactggaggcacaccatgacgtctaaagacacttgatgagggaggctgagcgtgttgcttttcagtacttctcgctacctaggagggtgagcccctgtttgtctcggtacaatcgaattgaaaacccccgaagtcaaaggctacaatccacgcatacgattgtttgcagggcctattatacgcgtgccattcttcgtgcgaaccaggttgttagtgagcatggggtccctaaaacccacaggatggaacgcacccgggtgtgggaatggtcccccgggggcttggaattgggcgcccataaacaagaggcgcgcggg

SEQ ID NO: 589686 - DNA, 145 bp, Homo sapiens
tgagctcggtacttcaggtctatcttttcacactcactttgctgtgttttcctaagggcctcttgggcagcgactcctccgtggaatgtgctgatgtgtgcagggcattctccaaactattactgacactgctgacaggggcctc

SEQ ID NO: 589687 - DNA, 128 bp, Homo sapiens
  misc_feature (62)..(62): n is a, c, g, or t
  misc_feature (124)..(124): n is a, c, g, or t
gcttccttttgcgggtggcggcgaacgcggagagcacgccatgaaagcctcgggcacgctangagagtacaagtagtgggtcgctgcctgcccaccccctgccacacgaccgcccctctccgcntgcg

SEQ ID NO: 589688 - DNA, 464 bp, Homo sapiens
tgtttctagactgtacagtgggtccctgggtaaagtgggtgacgagacaaaccggcggtcagaaaacagagagagaagtcgttaccactccgcctatgggaaaggagccccttctctttaggtaccaaacaacgggaacggttattgtttttacaacctttcagctcaccgtttcgacaacggtaaccgtagaaagtgcacttggtgcagttttctaggtcccacggagagagacaaccactagtgtggttaagaaggatccaatcgtggaggtcagtggtatgtgtccaatggtcacagcttgaactactttagtcattagaacggtcagagatttagttagacttaccatagtaagtggaactactcccctagccccatcgcctaccacgcccgtagtactcagtggtctactccctaaggaaaacacgggtgtttctagaaagagtgaaacgtgttgaaca

SEQ ID NO: 589689 - DNA, 171 bp, Homo sapiens
ggaaatcaggacacgcgcttcgacatacatacgtacagacagtggacccaccaccagtattagagtactgccgcctgccccggtaggtacctctgcacagcagatggaagctagaccagcccgtacagcctcaccaatatagcctagacgacaggcgtcaatgggtacaca

SEQ ID NO: 589690 - DNA, 193 bp, Homo sapiens
cgcaggtcataatctggccattatctccgctgacggtcccacttctctccaatcttgtagttcacaccattgtacatggcaccatctaggatgaatcacatctgaagatgacgcacttccgagcaggctaagcactggcacttagcagtgtaagagcctgattcagagcattcagttcccagctcatctccaa

SEQ ID NO: 589691 - DNA, 316 bp, Homo sapiens
caccagaaaagggaaagataaacaattattacctatgcatagtattgcaaggactaacccctataccttctgctatatgaatttacttgaaataactttgcaaggagagccaaagctaagacccccgaaaccagacgagctaccttagaacagctaaaagagcacacccgtctatttagcagaatattgataagatttatcggtagaggcgacgaacctaccgagcctggtgatagctggttgtcctcgatagaatcttagttcatctttcaatttgccctctgaaccctcttaatccccttgccctttctggtgt

SEQ ID NO: 589692 - DNA, 1447 bp, Homo sapiens
  misc_feature (72)..(72): n is a, c, g, or t
  misc_feature (74)..(74): n is a, c, g, or t
  misc_feature (1418)..(1418): n is a, c, g, or t
cttttttttgatggtagtgggttggtgtacagtggtgtatgttttttttttaattagatccaataccagctntnacatttcatttatttctctatataatgcaataaagtagatggattaaccgtgacgtttacagatggagcaggggagaatgaagaggcgtcagtttgggcatcaggctggatcttcacactctgacctcactctgctctatcctgcccagtgttgcttcacctgatatcaggggtgcaaggcaaccagatctgacaccagtttcagtttagatcctgcctttacctgggtgtgacccgggtccatctcttcagctcggcctctgctttctcttcataaacttttggggttagtcctcggatgatctctaaaacatggcccaggtgctccttgccagtagagtgtagccggatttggagggactggacactcagtgtgaacaagacgaaggcctcaggaggcagtaaaagctgacaagaggagagaaaatgaagcgcctacgggtgcatactggactagcgggcgaaaggccatgactccttagtttggagaaagaactggggccgagattggggaagtttcccagtgcaattaaaaaaaaaaaaaaaaaagaactagaagaattacccaggtctggcttctttcgtgtagcctggggctgagtcgcaggctgagaaatccagtctggccagtagggggctccaccaagcgcagtctcagaatgcccaagagctccaccgtcgcccggggtctccaccaagcgcagtctcagaatgcccaagagccccaccgtcgcccggggtctccaagaggagtgggtcgtggtgggcgttgaagggccgtaaaagacgagcagcccgcgtccgcgtccgtcctcccgggtctccagtccgcaggcggccgccgcctcggccccgccctcccacctccattcccggccccgcggacccgaacggtccctctcgcaaccgatctgctggctggggcgctggggatgcgaattcctagaagccttaagaggctgcccagcgttggaagttcgtatccccaagaatgctggaggttccggctcacacaccccctccgggcacagagtcagctggggggtgctgggagggagaacgccccgctcctcaccccccatccccgtgcaccctggagcccagctccatacgttcggccaccccaggcggactcggggtggccgggtagcgggtggtggcaggaggggaccgggtaacggcaggcccgagaggaggtcgctgggccgggccggaggcgcacaggggctgcgtggctacctcggcggcacccgccccacctccgccggctaagcccggagggggacggtgagtcagatctcgggcacccgcgggtcgggcggggagggggaggcaggtcagganatgacatcagaggcctgtgctcagggagt

SEQ ID NO: 589693 - DNA, 1379 bp, Homo sapiens
  misc_feature (72)..(72): n is a, c, g, or t
  misc_feature (74)..(74): n is a, c, g, or t
  misc_feature (1350)..(1350): n is a, c, g, or t
cttttttttgatggtagtgggttggtgtacagtggtgtatgttttttttttaattagatccaataccagctntnacatttcatttatttctctatataatgcaataaagtagatggattaaccgtgacgtttacagatggagcaggggagaatgaagaggcgtcagtttgggcatcaggctggatcttcacactctgacctcactctgctctatcctgcccagtgttgcttcacctgatatcaggggtgcaaggcaaccagatctgacaccagtttcagtttagatcctgcctttacctgggtgtgacccgggtccatctcttcagctcggcctctgctttctcttcataaacttttggggttagtcctcggatgatctctaaaacatggcccaggtgctccttgccagtagagtgtagccggatttggagggactggacactcagtgtgaacaagacgaaggcctcaggaggcagtaaaagctgacaagaggagagaaaatgaagcgcctacgggtgcatactggactagcgggcgaaaggccatgactccttagtttggagaaagaactggggccgagattggggaagtttcccagtgcaattaaaaaaaaaaaaaaaaaagaactagaagaattacccaggtctggcttctttcgtgtagcctggggctgagtcgcaggctgagaaatccagtctggccagtagggggctccaccaagcgcagtctcagaatgcccaagagctccaccgtcgcccggggtctccaccaagcgcagtctcagaatgcccaagagccccaccgtcgcccggggtctccaagaggagtgggtcgtggtgggcgttgaagggccgtaaaagacgagcagcccgcgtccgcgtccgtcctcccgggtctccagtccgcaggcggccgccgcctcggccccgccctcccacctccattcccggccccgcggacccgaacggtccctctcgcaaccgatctgctggctggggcgctggaggttccggctcacacaccccctccgggcacagagtcagctggggggtgctgggagggagaacgccccgctcctcaccccccatccccgtgcaccctggagcccagctccatacgttcggccaccccaggcggactcggggtggccgggtagcgggtggtggcaggaggggaccgggtaacggcaggcccgagaggaggtcgctgggccgggccggaggcgcacaggggctgcgtggctacctcggcggcacccgccccacctccgccggctaagcccggagggggacggtgagtcagatctcgggcacccgcgggtcgggcggggagggggaggcaggtcagganatgacatcagaggcctgtgctcagggagt

SEQ ID NO: 589694 - DNA, 150 bp, Homo sapiens
cagtggcatacatatatcaggtgtcacatccgttgctgacatgcctctggctttgcagatgcagtgatcatacactgtcgctgtggatctgagatagtgctgcatatactgtgggcagagggactgatagagaggttgggagagcttctg

SEQ ID NO: 589695 - DNA, 1290 bp, Homo sapiens
  misc_feature (72)..(72): n is a, c, g, or t
  misc_feature (74)..(74): n is a, c, g, or t
  misc_feature (1261)..(1261): n is a, c, g, or t
cttttttttgatggtagtgggttggtgtacagtggtgtatgttttttttttaattagatccaataccagctntnacatttcatttatttctctatataatgcaataaagtagatggattaaccgtgacgtttacagatggagcaggggagaatgaagaggcgtcagtttgggcatcaggctggatcttcacactctgacctcactctgctctatcctgcccagtgttgcttcacctgatatcaggggtgcaaggcaaccagatctgacaccagtttcagtttagatcctgcctttacctgggtgtgacccgggtccatctcttcagctcggcctctgctttctcttcataaacttttggggttagtcctcggatgatctctaaaacatggcccaggtgctccttgccagtagagtgtagccggatttggagggactggacactcagtgtgaacaagacgaaggcctcaggaggcagtaaaagccaggtctggcttctttcgtgtagcctggggctgagtcgcaggctgagaaatccagtctggccagtagggggctccaccaagcgcagtctcagaatgcccaagagctccaccgtcgcccggggtctccaccaagcgcagtctcagaatgcccaagagccccaccgtcgcccggggtctccaagaggagtgggtcgtggtgggcgttgaagggccgtaaaagacgagcagcccgcgtccgcgtccgtcctcccgggtctccagtccgcaggcggccgccgcctcggccccgccctcccacctccattcccggccccgcggacccgaacggtccctctcgcaaccgatctgctggctggggcgctggggatgcgaattcctagaagccttaagaggctgcccagcgttggaagttcgtatccccaagaatgctggaggttccggctcacacaccccctccgggcacagagtcagctggggggtgctgggagggagaacgccccgctcctcaccccccatccccgtgcaccctggagcccagctccatacgttcggccaccccaggcggactcggggtggccgggtagcgggtggtggcaggaggggaccgggtaacggcaggcccgagaggaggtcgctgggccgggccggaggcgcacaggggctgcgtggctacctcggcggcacccgccccacctccgccggctaagcccggagggggacggtgagtcagatctcgggcacccgcgggtcgggcggggagggggaggcaggtcagganatgacatcagaggcctgtgctcagggagt

SEQ ID NO: 589696 - DNA, 337 bp, Homo sapiens
actggctaaataagactataagtagagacaggataatgcatgtatgaccagatcagatctcgaactcacatgggatcaagcgatagggatgtaacatatgatcagggcaaaaggggctgtgctccttggacactttgcacagccccagagggcatcttacacctctgttagtgtggttaatgtacatctgcctgactcacctgagtcaaccaagtgtaacctcagccataacacgtactgcagacggaacggtgtccgcagatcagagtccctctcccatgcactattctgaactttggtcttactaaccaggtttcacagccgcgtagtcagatcg

SEQ ID NO: 589697 - DNA, 634 bp, Homo sapiens
  misc_feature (512)..(512): n is a, c, g, or t
  misc_feature (552)..(552): n is a, c, g, or t
  misc_feature (575)..(575): n is a, c, g, or t
atttgaagttttaattcaggtgaatcaaaatatctgataggatacaatttacaacagttgcatgcaactgatgcaaaagtcattctcaggaaatattaatttttctctcattcctggcagtttgttgatataaaattgaaagaatctcctactgctgaatctaatttaaaaatatatataaccatatttctccattgaaaattagaaaacattaaatctacttatttattttatattactttctatttgccaattatctctgcaaacattgaagtgctaaatacttcgattgtatatgcaagcgtactgaaataaggctgcataagtaaagttttacaccacgtctgcaaactaaaatttcctggggtgttacatttttcctaataaaatcagaggttaagaaatatgattcagtggccatttctacagccgaagtacatgagactgcagccctaggtgtcttgcccacgctcatctagcagacggcagagcctagactcaaactctggttntctgctacacatcaagtattccttctacagtgctcttccnttcactcagcattatctacatanttagaaacactcgaatttctttcccattctgctagttttccccttattacctttgcatt

SEQ ID NO: 589698 - DNA, 372 bp, Homo sapiens
  misc_feature (6)..(6): n is a, c, g, or t
gtcctngtcattgtattgtttcttttctctggtagcttttcagattttcttttgattcttgatgttctatcttacaaaagcatgtgtcaaggtatgaatttactacttttcgttctgttttgttttttgagatggagtctcactctgtggcccaggctggagtgcagtgctgcaatttcagctcactgcaacctccgcctcctaggttcaagcaattctcctgcctcagcctcccaagtagcagggattacagatgtgcaccaccatgctcggctagttttttgtatttttagtagagatggggtttcatcatgttgaccaggctggtctcaaactcctgacctcaagtgatccacccgcctcagcctccca

SEQ ID NO: 589699 - DNA, 634 bp, Homo sapiens
gtaggagctgtgggtgccgcctcgcctccacctgcgcaaggctgcgtaagcggctcctccgcgatgcctgatgacctgcagaagcgcctggcatgtgtaccatggccggggccctgcgagggcgccgagctgcggctcttgtgccatccgctgagctgcctggggcccctggtggaacagtgcctgtgtgcgggccgccattgtgggctcccgtggcctggccatgccgctacacgtgagcttggcccaggccttgaggtgcgagctggctgcggctgcgcggatggcgtgagatgggcaggccgggaccctgctgacgcctggaccgaggtgacgcggaccgcacggtgtcggaggtgcgctgccaagcctggatggaggcagggacaccagacaagattacgccttgcatggcgagaggccttacaagggccgactcaaagagggctggatacggacagccccatggtggaaagaacattgcaggcgccaggttgcgtcacgggccttggtggagaaggtgcaggtgctgacagttgggcaaccaagcgccagcaccatgtgacccaggagaaaaatcatgaacgcacgaaagactggaagacatgaaccccaagacaacccagtgactcag

SEQ ID NO: 589700 - DNA, 242 bp, Homo sapiens
gttgctccagtatgtgtttttatacgtgacgtgctaatctttgcattaagcatttttcccccagtttgaatatggccggcctacattatttccaggcacttggctggattctttttatttcatccagtcttcataatatcaagtagatagcatggtgtccatttcatccttgggggagctcattttgatgggaagagtggttcccccatgatgtctaaactgaaaacaggcctccccacaga

SEQ ID NO: 589701 - DNA, 152 bp, Homo sapiens
gtggaaagggaccgacctacggaggcggtgtccgagaagcctgccttggcttctgccaaggtcatatcgtcccggcgtgaccacgagctggccactccctggacctgctgctacctgcagcctgcgtgggcccactgccaatgtaactttga

SEQ ID NO: 589702 - DNA, 129 bp, Homo sapiens
gaatcatcggcttatagcgtcccgtcactgaggtcatacgcccggcaaaatatgcccccatcggcaagcccatcgccagcggcagcaagtgcaaagcggcgctgtcggcaccggaaccggtcacggtct

SEQ ID NO: 589703 - DNA, 175 bp, Homo sapiens
ctagaggatctcggcgaggcaggctgatcacttgaggtcaggagtttgagaccaacctggccaacatggtgaaaccccatctctactaagaatacaagaattagccgggtgtgcctataatcccactctacgtcgggaggcttgaggcaggacaaccactttgaaccgcagaagg

SEQ ID NO: 589704 - DNA, 487 bp, Homo sapiens
  misc_feature (71)..(71): n is a, c, g, or t
  misc_feature (115)..(115): n is a, c, g, or t
  misc_feature (212)..(212): n is a, c, g, or t
  misc_feature (235)..(235): n is a, c, g, or t
  misc_feature (260)..(260): n is a, c, g, or t
  misc_feature (262)..(262): n is a, c, g, or t
  misc_feature (266)..(266): n is a, c, g, or t
  misc_feature (273)..(273): n is a, c, g, or t
  misc_feature (284)..(284): n is a, c, g, or t
  misc_feature (286)..(286): n is a, c, g, or t
  misc_feature (288)..(288): n is a, c, g, or t
  misc_feature (316)..(316): n is a, c, g, or t
  misc_feature (321)..(321): n is a, c, g, or t
  misc_feature (356)..(356): n is a, c, g, or t
ttctcccgtagttcgtctttagttactaagaaagggtgtaggacacattagccttctggaaacaagtagangccatcacctggcccatgtccctacaaacccatgattgtcaggnaggtgccagttacagcaggtgattcagctacttgaggtcggtaacagaccttccattctcactgaaggtgggtgtgttgttgccctgtactccactngtagtcatctggtgtgtactatnacaacagcagaatctcattatcttnantacncttgccncctttagtcgngntntaaatatttgaggggagagaaatatctnccggnatatttggaaccaaataatgtggtctgctttatangatggccagatctacattaggaaaagtataagccccctccctaatggccgctggggggtgagggcggtgtgttgtatgtctttgggtgtttgtttttttataaagcatataataaaataatcgtgctccta

SEQ ID NO: 589705 - DNA, 126 bp, Homo sapiens
ataacagcgtcgttgactgtgaactaaccccaccatgcacaacccaacagggaacctagactaaccccatcatgcacaacccaacaatggaactaagctaaccccaccatgcataacacaccaggt

SEQ ID NO: 589706 - DNA, 940 bp, Homo sapiens
tggctggatcaggctggtgtggcggagagcggaccagagagcctagcaggccaccgcgcgcggctagttaccatcacaccccgggaggagcgcagctccgcagccggcccagtcaccatcaccgcaaccatagcagcgaggcgagacccagcagccgcccgccgccccccgcgcccgcctaggccgcgaaccaagcccggactaggcagcgggcaggagcggtgcccgggcggcctcacatcggcggcgcctgccggcgggcacacgaaggtcatcgcaacggaaggtttggggaacagtcacactggttcactgtaacgggaaccgggatatggttcattcacagggattgaaccccaaggaagatgtcttttgtccacccaagacttgcccatacaagaagattacccccagcgagagttacctttcgccacgctgttacggcagcattggccgcagccacctggtggccggctttggcatgctcgctcgcacggggccgccacatgcggcttggccggcagggccgccaaacttgtttaccggcgctcctggggtggcctgttccccacggtttccacggcccacgcttacattttgcagccagtaccggtaacccatttattagcacgcgcttatcccacgttcgtagggggttcctcccacgcaattacccagcaaaattacccagacataggtcgagcaggtgggggcacagaggacagcgagcggactcggacagaggtgctccccgaaaggggcagggggcccaaacaaacggccgggccctaccggcaggccgaaagggttccccagcctttcgtaccatttgcgggaggaccccttatggggcggtcagacccaacagattttcaacccttcctgttccaggcggcacagttgattgcccgggtgctgacaacccagtgttgcggagacc

SEQ ID NO: 589707 - DNA, 161 bp, Homo sapiens
cccccttgattgccaacaaggaaaacttttaagtagagcagaacctgaatagacaagacatttctttctttcttttggtagaaaatgatttaccatcactgtgtagttaattgtagactaggtaattttaactttgtgatttattgcccgagacattctct

SEQ ID NO: 589708 - DNA, 1044 bp, Homo sapiens
gccttctgcgtcctgctgagctctgttctctccagcacctcccaaccagtagtgcctggttctcttgctccaccaggaacaagccaccatgtctcgatcagtcaagtgtgtccttccggtagcgggggcagtcgtagcttcagcgacgcctctgccatcgaccccgtctgtttcccagcacccagcttctcctccgtgtcccggtccggtgggtggcggtcggtggtgtgcttccggcgagggtcagccttgcgggtgcattgtggcgtgggtggctcatgttgaagccgagaggccatctacaagccttggggggctctaccgatcatgcgatatccatcaggcacctaggtagagtgcgcaagcgttcacggaatccgggttctgtgtggcttggtgttaggacggctggctagttgtgcattctggagggtggtgccggtacgtgccagttagcgcctactgcgcgggtcgtcacttgtgcgtgggcttgggtcaaggcacgtgcaggaggctggcagctggcgctcttggaccgatgcggtctccggatggagcgtgggctcacacctgggttctggagcgcctccaccagaacgggtcatgcaacccaagaacagatgccattgcctcggtgaattggtgcctgacgctcgacacgcccattgcgcgatggtcaccactccgatgaaccctgaggggatcccaaggcaaagacagactgccgggcactctacactggcagcgagcactacggcaggaattcactcggttagggccagtcgaagccgtggtaacactaacatggctccccttgctgagtgcaagacacaacagactgtccgaggcttgcccctgcacaagccaggctccacgatggacacggaggctatatagcccaccgcacgaatgaggccacaaggagatcccacgacagaaccacaacgggacacccacagaagactggactgagaacaaaaatagcaggcttaagtccgcccgtttccggaatcccaaacatacgtaaagtgcaatccgctacag

SEQ ID NO: 589709 - DNA, 257 bp, Homo sapiens
  misc_feature (98)..(98): n is a, c, g, or t
  misc_feature (137)..(137): n is a, c, g, or t
gggaggggcgagggggggggggggaaaggtcagctgccttccctatccttcgcccataaaaggaccacgcgtgacagagcaatgatgaagtggctaanctgttcccggatacaagaagagggtgcagataactactnccaacttcagatggtgcgacttcagggaaagatcaccttcttccccaccatcccctttcctattccccattccactgtgagccacatccattgcccaataaaatcctccacatatactac

SEQ ID NO: 589710 - DNA, 132 bp, Homo sapiens
tgcttgttgtcgtctctacacggatcccggcgcgcagcttctcactctccagcacagtattgctcgtgtggttggctgccctttgtccgcgaatgcacgccgcggcagaactgtctggatttgtgacgcgcg

SEQ ID NO: 589711 - DNA, 247 bp, Homo sapiens
agatggagtcttactctgtcacccaaggctggaatgcaatggcgtgatcttggctcactgcaatcaccacctccctgattcaagcgattttcctgcctcggcctcccaacacttggggggccaaggagggaccccagatcattgttagcaaaaagcacatatagttggccaagcatatgtatatcatacaagcgataagaacgcataaagcatgtttggggagagcttatttaaaacttgtaaaaat

SEQ ID NO: 589712 - DNA, 1048 bp, Homo sapiens
  misc_feature (77)..(77): n is a, c, g, or t
tgcggtgcacgcggtgttgtggctcttcgcccctgtggggttcccaccctgctgggggtccgcgccctgtgacgcanccgcgctcccggcggagtggcgccagctggccacaacggggtttcaccaacattagtggtgtaccggtttcgtgtttcaaaaaaccgggacgctgggccgggcggcgaaccagccccggacccgggcctccgggcgcggccctgggacccacccgcgagaagccccgagatcccggcccggaaggggaagtgccacgcccggtccccccgcgcggatcagaggatcatgcagacggtcgaagagattgggaaggtggcggcggcggtgcctgtcatcatgctcccgggcgctcgagctcttcctagagttccctgttgaagaaggcctcgccacggtgacccacgttcgcggaaaccgcgaagaccacctgaccaccactcccaccctgagaccacgtgcactcgaagctggaccacgcccgcttgtgaactttctgtgaaggaccctcggtggcaattctgtttcccgaccactgccacgggggaccgcgggaacagaccacacccaccactggaatggggacccaagggccgccccccaagggcgcccggaacgcccaggccacgccggccgcgcccggaagacaccgcgttgggattgggacaccgaaaacgcccaggcacccagaacgcttgtcccgggaccagactccggacgcccgcgaggatgaatctgaggacaccacgagttctgactggggaaagaggagacactcccacacccccacccccacggccacgccaccccctctgcccacctttcacgagccccccgacaccccttcctgcccttcgcctctactctgcccttgcccccagcgcccccgggcccctcagcacctgatgaagaggacgaagaagattacgactcctagccccttttgccccccagaccatagccccttttagattggttttagattgctctggggggaggagagaaggtagaccccttcttaaaatttattata

SEQ ID NO: 589713 - DNA, 1605 bp, Homo sapiens
tggcgtggggcagtttaaagttattagttttaaaaatcagtacttttataatgggaaacaacttgaccaaaaattggctcacagaattttgtgagacccatttaaaaaagtttaaatgtgagaaaaaaaaaaaaaaaaaaaaaaaaaaaaaaaaaaaaaaaaaaaaaaacacaatacacaaaaaaaaaaaaaacaacaaacaaacaacaacacaaaaacacaaatacaacaaaacacaaataacatgaaaaccgtatatatcaccataataatcttaacattatagaactacatccgaatatactacgcatatcacgacatgcagcgaacgcctgacacgcaaacaccactagtatagctctatacgagttcctcctgcctacattatcatctcatatacataatatataaattccgaatacagactagtacaaataaattataggtataacagaaattaaattgattggaatcattgagaagctaaaaaatatactagaatattcaatattagatactaatatataaacataatatttgtaggtatttcaccaatagaccgagtatttaaatcaaaataacctaccacaagctgattctttatctaacagcaacgtgaaccatgagaaaaaaacgatacataattcatagaattatctcttgagtcaactcctcgtaaaccaaaatctactcataataaaacaaatgaacaaatgaagtagatagatttctattgagaatattagaatactacacgacatcaagaaacaatattgtatctctctgtttcattaataaattagaattactaatatcgagagtagtactactaagtagagaagatagaaaatctaaagaataatcaacctatagtaccgatctataataactagtattatatgaattcactaaatatatatatatataagtgtacaatataggaataaatctacgttacgaatatttcaataatagtcaacgacacatactcagactaagtaaaattctaactcacttctaaagattaaacaatagtaaaaatactatcacaacagaccaaagaggtgaaacaggtggtgaaacaggattggaagggaacaaaggcgagacacagagagtgaagagaagaagagcgcgggcaacagagagagatagagagacgagaagacgagtctagtggagcaaaaggtagaggaggtacgtcggtgaagcgagaagagaacagagctaggagggtaagaggactaagtacgaaggaggaagaagaggagcaagtgacgagaacagcggaggagaaggtcacacgcgaggaacgcggcaagcgaagaggcggaagtcgagaggcacggatcgaaagagaggagtgaggagaagcgcgcacgctagtgaatgaggtatacgactgagagagcaaactgagacgcggagacgacataactcaagtcgagacgcggcgagcgaggacggagagagagcaaagagagcgagggctgaggtaggacagaagagtacacacgatacgtaaggaacgtggaacggaaatagtgaaggcgagggagagtacgggcgacagctagaggctggagggcagtaagtgagagggaa

SEQ ID NO: 589714 - DNA, 487 bp, Homo sapiens
ggctcggtaccgattatgctcctagacgggatggcggcgggcagagacgctctcagtttccagactgggcagccaggcagaggggctcctcacgtccagacgatgggcggccaggcagagacgctcctcacttcccagacggggtggcggccaggcagaggctgcaatctcggctctttggggggccaaggcaggcggctgggaggtggaggttgtagcgagccgagatcacgccactgcactccagccttggcaccattgagcactgagtgaacgagactcagtctgcaatcccggcacctcgggaggccgaggctggtcggatcactcgcggttaggagctggagaccagcccggccaatacagcaaaaccccgtctccaccaaaaaaatacgaaaaccagtcaggcgtggcggcgcgcgcaggcactcggcaggctgaggcaggagaatcaggcagggaggctgcagtgagcggagatcgcagc

SEQ ID NO: 589715 - DNA, 103 bp, Homo sapiens
tgctcccaatcagactgctgtttataaccaacaagcaggtccatgtatagaaatccctgatgggacgcccagtcttgctcccatcagatcttgcaacaagagg

SEQ ID NO: 589716 - DNA, 945 bp, Homo sapiens
  misc_feature (484)..(484): n is a, c, g, or t
gggcagtccagcgagctgatcctcaaacgatgccttcccattccatccagcaaggacaacatatgcctgtccccgtctccctacgtggagagtgaggatgcacccccagagaacgaagataaagagcgaggcgtcccacgtgcagctcaagaagtgtctagtcccgcgccaacaggctagagagcttgagccccccgaagacatctgactcggaggagagtgagcgtcgcataaatcatgaacagtcctggagctgccagtcgccgcaatgatgcgttcggatccgagctttctcaggctcagggaccacgtgccggagttggtacagaatgagaaggccgccaaggtggtcactatgagagatagaacggccactgagtgatgtccactcctctccaggccgatggtagcatgcagctttggctggtaacacggcagagaacttgcaggccaagacagatagcacgcgcgtgaacacgataanattgaatcgacgtctcggcatcttagctagacgtcgttctcaagaactggagcagtcactgccacttctgcacatcatgattcagtatctaaacaaagcagttgggttggccttgccaatgctggtttacttgcaaatacgcgtcgccctgtcgagattcgagctctgtggtagcgacaggttaggaacgaacaaatgtgggggttctagctgggaccttggaaagcctgtagttccaggatgctggctgggccctgcatgctccttccagtcagctccgatgaggagtgactaaaaagttggctaacaggttggcgaagccctctggtggccctgttgaaggtcacccttggtgtgtttccaaggtttccaaacaatccgaaaagccattacccttctttagaggaacgtggtggctaagtaccaccggaatgcccgataaggggttgccattgaaaccc

SEQ ID NO: 589717 - DNA, 750 bp, Homo sapiens
gtgggccgcagagacgttggaggccggtggtggctgggtgactggcctcgtgggctgacttgaggtgtccctggccagtgtccttccacctgtccacaatgcatggtggaacatcttcgccaacctcttcaatggtgccttctttgtgcaaaaaagaaatgctgcatcctcatggtgtgtgcctggatgctgcagggaagaccactgatcctctacaatgcttaatgctgggtgagatctgtgaccaccattcccaccataggcttcaacgtggaaacctgtggagtacaatgaacatcatgcttcacttgttgtgtgtgactgtgggttgtgccatgtgacaatgatcctggcccctgtgtgcgccactacttccatgaacacacaatggcctgatcttcgttggttgtgacatgcaattgacatgatgatgctgtgtgaactgatggcccgtgatggatgctcatgagtgatgctggcctgaggacgagctcctgtggatgctgtcctccttggatgttctgccaacaatgcaggacctccccaacgccaatgaatgcggactgatatcacaagacaatgctgtgtgtgcttgcatctcactactgctcaacaggaacagggtacatatcagtgcctatctgtgaccaacagttgtgggacgtgctctatgaatgggctggactttctttcaaattcaactcggaaacaaattgacgctatccctacccttatcctattcctctgtta

SEQ ID NO: 589718 - DNA, 458 bp, Homo sapiens
attagatttataatacgtgcaatatatattttgtagataccccttgcctcttctaaattgtaactcctgggctcaagagatcctcttgcatcagcttcccaagtagctaggattacaggcgtgagcaaccacgctggccgataattttgatttggtatatctgccctcctcctccattgggtgaacgttttttgagagtaatatatgatgttgacatatgaagcctgtttcccaaagtgcctaggacaagtatttattcttgactgcttgtctattatttccttttacccagtacctggtggagctcttgattcataacaagtgctatgtaaatgctaattgtatcaattaatattactgcctacttggagcttcaagtctaatttgaggaacataaagagcaacagaacagagaacacttggtccaacacataataaatttagggttgagggtaccg

SEQ ID NO: 589719 - DNA, 950 bp, Homo sapiens
  misc_feature (206)..(206): n is a, c, g, or t
  misc_feature (947)..(947): n is a, c, g, or t
gcctgcgtagcgctaggggccccggaaaagtaaaagctgcggagctgaacattaccgggcactagcacttcagtatctgctcggaagacctggtgcactatatacccatgttgattgattgagtcgaatgtgtcaccgtaacattatctactagggattctgaccccagttcaaccgagtgcctcctctatgtgtgtggcacgacnttcctactacaaggaaacgaatcagagggttgttaaccatctagctagtgaagtatttgccacctaaacacacatgaattgtgatactaccgtcgacggagaacaaaatggccactgacctataccataagacatcgtttgtcacccttcggtcgaagcctactgtttacacttgtctaggttggccatgatacctgtcgtggacaaggcacgtactgatagttgtctaggagcaatgtgctaccttatggcttggggacctgtccttaattgcgatggacgctattgaaaaggctgtaaattggccctccagtattgtcgacggaatacgaattcattccacctatttgtacttagcaggcagtatgggttaccaagcttgtctgcatagatccagcaaaaagcctgtcctcgtgactccctgaatgagaggccctggcgtaccacaattgggtgtgaccttgcggcctggttggagctggaagctggacgaatatacataatcccggcgcgccaggcccagacttgctgggtgcacatccgggtttagtggggcacggtggtccctcttaaaatgggggcccttcttacacgccctgacacgcgtgtgttgggtcctcagtgtgtgtcccgaaatttaatgcccggggacgcactagatatcgagaatacccccgggcgccagtgacgagagtctctctccacacagcgtgcctcacttccgtacgaacttttcctctnttg

SEQ ID NO: 589720 - DNA, 177 bp, Homo sapiens
atttattttatcaactgcctgaaaggacccaatgggggagggggtttgggccccagcaggagccccggctgccccccttagggcagggagagcctgacccccttgggccaggccctgggtttgtaaccattaacctttttcccccactaaccccaatgaaaacccccttccccgtga

SEQ ID NO: 589721 - DNA, 749 bp, Homo sapiens
  misc_feature (45)..(47): n is a, c, g, or t
aagagtggtatcaacgcagagtgcccattacggccggggacagcnnncctttccgtctggcggcagccatcaggtaagccaagatgggtgcatacaagtacatccaggagctatggagaaagaagcagtctgatgtcatgcgctttcttctgagggtccgctgctggcagtaccgccagctctctgctctccacagggctccccgccccacccggcctgataaagcgcgccgactgggctacaaggccaagcaaggttacgttatatataggattcgtgttcgccgtggtggccgaaaacgcccagttcctaagggtgcaacttacggcaagcctgtccatcatggtgttaaccagctaaagtttgctcgaagccttcagtccgttgcagaggagcgagctggacgccactgtggggctctgagagtcctgaattcttactgggttggtgaagattccacatacaaattttttgaggttatcctcattgatccattccataaagctatcagaagaaatcctgacacccagtggatcaccaaaccagtccacaagcacagggagatgcgtgggctgacatctgcaggccgaaagagccgtggccttggaaagggccacaagttccaccacactattggtggctctcgccgggcagcttggagaaggcgcaatactctccagctccaccgttaccgctaatataagtaaagtttgtaaaattcatacttaataaacaatttaggacagtca

SEQ ID NO: 589722 - DNA, 1421 bp, Homo sapiens
  misc_feature (145)..(145): n is a, c, g, or t
  misc_feature (147)..(147): n is a, c, g, or t
  misc_feature (303)..(303): n is a, c, g, or t
  misc_feature (334)..(334): n is a, c, g, or t
  misc_feature (339)..(339): n is a, c, g, or t
  misc_feature (349)..(349): n is a, c, g, or t
  misc_feature (360)..(360): n is a, c, g, or t
  misc_feature (600)..(600): n is a, c, g, or t
  misc_feature (984)..(984): n is a, c, g, or t
  misc_feature (1078)..(1078): n is a, c, g, or t
ttaagatcctatcgacttctgctctgaaggctgaagacggaagagggagtgtcagaggcgcctgccagctgtgtcatctcccccagctcagtttcacctgatgaccaccaacataatggggagctgagccgtcattctccccaananggagtccagattgggcctgaggaagccatggagaggctgcaggagacagagaagattatagctgagctgaacgagacatgggaggagaagctacgcaaggacagaagccctgaggatggagagagaagcattgctggctgagatgggggtggccgntaccgggaggatgggggaactgtgggcgtcnttctnctccaaaganagactccccancctggtgaaactctgatactgaaggaaccctcttggatgatcatgagtttgtcgtgtcgtctaaccaccgatcaaaatgagttgggccgctactaccaggagtccgggccagagttatcatatggactattccacatgcctagagccgtgactagggttcatatcgggggtagcagatagactgatctggttcgctggacgcattcgcgcccaagccacgaattggagcgaaggtcggtnggtacactctctggaagcccttgatcgaaagggaagctgtagcagcgatattgtgtaactggggacagccattggtgcaaccggaggtccgactgagctgactgcacacggtgcagggggaactacgcgaagttgctgcaatgaggggcaaggaaatccatcaggttgtttacccgggcgtaatcacattaccaaagctcggggaggccagggtgacaaaggggcatgggtaaacccggtgcgaaacctggacgggcgagttcgccgcgcacaaatctcgcccaagggacccagtgccctcctagaagacaccaagggtacggaatctagggtacaaacctatgtgggcgccccaagcacaggcttgacaatcgtgggctgggngagggcccatcccgaaaggggccagttcaggaagccagtacaaagatggccttgtggggaccacatcggggatgaacaccacaggggcgtaagncagggggacattccttgggaaaggaagaacctccaaagcgtacacacgggggacacagggtacaacaacgggggtaaaacgaacaagtgcactgacacctcgtttaccctgtagctgggggtgaggcccaacgacgcgtgcgacgaaaaacccggggtgactttgcccgggaacactttcgtgggaaccaaggccgggggggagtgtgcaacacgcgcctgtgccaccaaagccggcacagcccattgtagtaacacacgacacgcatagcgagccggcgaagaggggggatccccagcaggtggccatcacccctgatgtagtgcgcgggaccacgcacttg

SEQ ID NO: 589723 - DNA, 310 bp, Homo sapiens
taccatataaggtaagagctctaagactcctgagccactttatagtactggcaacctaggctagggctgactatgtaaagcagccaaggagacagatctagatagcagagaagtcagtctcattctaaaacattgcaactactgttagtgtccaccccatgaagctgtttcagatatgtgtatcttcgactgaattctataaagtatatattgtacagactaaaacaaatgttgctaagctaggttggctgtgcggtctcagtcgtacattgacagactccagctatcaccctctggcgaccttggacct

SEQ ID NO: 589724 - DNA, 757 bp, Homo sapiens
ggcgaatgcgagctgggcccggatcctggaggaggcgtggggctgagggaatggggcgcccgggtacaaggcacggctaaagtaagccaagatgggtgcatacaagtacatccaggagctatggagaaagaagcagtctgatgtcatgcgctttcttctgagggtccgctgctggcagtaccgccagctctctgctctccacagggctccccgccccacccggcctgataaagcgcgccgactgggctacaaggccaagcaaggttacgttatatataggattcgtgttcgccgtggtggccgaaaacgcccagttcctaagggtgcaacttacggcaagcctgtccatcatggtgttaaccagctaaagtttgctcgaagccttcagtccgttgcagaggagcgagctggacgccactgtggggctctgagagtcctgaattcttactgggttggtgaagattccacatacaaattttttgaggttatcctcattgatccattccataaagctatcagaagaaatcctgacacccagtggatcaccaaaccagtccacaagcacagggagatgcgtgggctgacatctgcaggccgaaagagccgtggccttggaaagggccacaagttccaccacactattggtggctctcgccgggcagcttggagaaggcgcaatactctccagctccaccgttaccgctaatataagtaaagtttgtaaaattcatacttaataaacaatttaggacagtca

SEQ ID NO: 589725 - DNA, 584 bp, Homo sapiens
  misc_feature (159)..(159): n is a, c, g, or t
ccggaggaatgtgtgcccccaaataagatttttttaagggatggtaagcaatggaaaaatgtaaacaaaggggcaaataatttgggatctatccccggtattcaaaaatggttttggcttgtcatccacacaaacccaggacttaagacaaatgggacngatgtcatcttgagctcttcatttatttggactgtgatttatttggaggggaggcattgtttttaaaaaaaacatgtcatgtaggttgtctaaaaaaaaaaggcatttaaactcatttgaaaaaaacccttttagtttaaggcaaatttaaactaaattgatcctgtagggttcctggaaaagcaaaagcctgattgtaggctactactcatcaattaacttttccagtggagactacttttgggcctggaatataaaaaagaatcaaaggttttgattttgagttgcaataaagggaaagcccatgttcataacagggccaacatttgaagtggggacccttacccatttcatcccccacaacggaagtagttaactggaaaagattcccaaaaaaataaaaaaagactcattcagtggaagca

SEQ ID NO: 589726 - DNA, 369 bp, Homo sapiens
  misc_feature (26)..(26): n is a, c, g, or t
cggacgcgtgggtcgcccacgcgtcngcactgtggggctctgagagtcctgaattcttactgggttggtgaagattccacatacaaattttttgaggttatcctcattgatccattccataaagctatcagaagaaatcctgacacccagtggatcaccaaaccagtccacaagcacagggagatgcgtgggctgacatctgcaggccgaaagagccgtggccttggaaagggccacaagttccaccacactattggtggctctcgccgggcagcttggagaaggcgcaatactctccagctccaccgttaccgctaatataagtaaagtttgtaaaattcatacttaataaacaatttaggacagtca

SEQ ID NO: 589727 - DNA, 1004 bp, Homo sapiens
agcggacgggagatcatcttgcgattgctggagaaaatcgccccttccagcgcagacatgacgagcacggtgagggacaagcgcgtaggacacgaccacggcagcgcccgtgttatgtcgctgcggcacgagccggacggacgaggaaagcatacaccagtgaacgcagcgatcgaacagctcggggcgaccacatggccggtcggctggctgcgcgcatcggagcccatggagccgggaacgtgacctcgaggaggagagaagcagaggtgtgacacagtaaagagactaggagacgaatggtagggatgcaagagatagagcgatggatgtcacgttgtgagatacacgtgtacagaaggacaggaataacgagtgcgactaagaacgatggagagtagtccctatatagagatgacttgggaaaggtatgcgagtgaacattaagtggattaaaagcaagtaaagcaagaggaggtaaacgtggattgaaactgcggagaattattgggggagaactcgagcctctgcggttcacccgagggtcgtgacaagaatagtcgtcgcttgcggtgcatggacgccaccaacatggagacctgaacagtatcaatggagtgcgccatgcaaacgcgatgcgggacaccagatgggccgtggtacacacaacggcaagagggcctagtcaatgggtacccggggcacattggtgggccgtcagcacgaccatggggatcgacttcattgtaagtgaccaacacaagatcgtcatgggagcttaggcacggagaaggtcaggcagtcacgtcgagagccgtataggagtctctacactccgaggcattggaaacgtggagaccacgggcacacggcggtccattggtccacctttgaggaacggagagacacgttgcgtcagcagcaactagggaacgatttcacgcaccaaggatgcgcactgttctgtcccttcacccattgggacagaagatgggccgagttgg

SEQ ID NO: 589728 - DNA, 472 bp, Homo sapiens
  misc_feature (34)..(34): n is a, c, g, or t
  misc_feature (82)..(82): n is a, c, g, or t
  misc_feature (95)..(95): n is a, c, g, or t
  misc_feature (98)..(98): n is a, c, g, or t
  misc_feature (104)..(104): n is a, c, g, or t
  misc_feature (109)..(109): n is a, c, g, or t
  misc_feature (114)..(115): n is a, c, g, or t
  misc_feature (119)..(119): n is a, c, g, or t
  misc_feature (192)..(192): n is a, c, g, or t
  misc_feature (234)..(234): n is a, c, g, or t
  misc_feature (248)..(248): n is a, c, g, or t
  misc_feature (306)..(306): n is a, c, g, or t
  misc_feature (318)..(318): n is a, c, g, or t
  misc_feature (346)..(346): n is a, c, g, or t
  misc_feature (365)..(365): n is a, c, g, or t
  misc_feature (367)..(367): n is a, c, g, or t
  misc_feature (370)..(370): n is a, c, g, or t
  misc_feature (384)..(384): n is a, c, g, or t
  misc_feature (459)..(459): n is a, c, g, or t
  misc_feature (469)..(469): n is a, c, g, or t
gcaagaagcatggccaccgaggctccagcttaanggtatttggaggtgagcacggtgctcacagaagccaggaaattgtccngggaggcgtgcancgnaggggntgaanttggnngggnggtgggcggccagggttaccagcaggcagtggcttaggagcttgaagttgaccgggtccacccgaagcttgtncgcgtgcaggtcgctcagggcggacagcgcgttgggcatgtngtccacgtgcgccncggcgttggtcagcgcgtcggccaccttcttgccgtggcccttaacctgggcagagcngtggctcaggtngaagtgcgggaagtaggtcttggtggtngggaaggacaggaacattntnttnggagaagcagagtnaggggtggggtttgggtccggggccaggacggttgagggtggcctgtgggtccgggcgggcgaggagaccgggtnggagcatggntgg

SEQ ID NO: 589729 - DNA, 889 bp, Homo sapiens
  misc_feature (45)..(47): n is a, c, g, or t
aagagtggtatcaacgcagagtgcccattacggccggggacagcnnncctttccgtctggcggcagccatcaggtaagccaagatgggtgcatacaagtacatccaggagctatggagaaagaagcagtctgatgtcatgcgctttcttctgagggtccgctgctggcagtaccgccagctctctgctctccacagggctccccgccccacccggcctgataaagcgcgccgactgggctacaaggccaagcaaggttacgttatatataggattcgtgttcgccgtggtggccgaaaacgcccagttcctaagggtgcaacttacggcaagcctgtccatcatggtgttaaccagctaaagtttgctcgaagccttcagtccgttgcagaggagcgagctggacgccactgtggggctctgagagtcctgaattcttactgggttggtgaagattccacatacaaattttttgaggttatcctcattgatccattccataaagctatcagaagaaatcctgacacccagtggatcaccaaaccagtccacaagcacagggagatgcgtgggctgacatctgcaggccgaaagagccgtggccttggaaagggccacaagttccaccacactattggtggctctcgccgggcagcttggagaaggcgcaatactctccagctccaccgttaccgctaatataagtaaagtttgtaaaattcatacttaataaacaatttaggacagtcatgtctgcttacaggtgctatatgtctgtgtaaaagctagtctgcagatgttgcttgaatgctttgtcacacattagaaacgtcccagtgcacctatgcttgaagacataagtggtggtgtacccggactaatacgatacc

SEQ ID NO: 589730 - DNA, 1330 bp, Homo sapiens
  misc_feature (894)..(894): n is a, c, g, or t
  misc_feature (1091)..(1091): n is a, c, g, or t
cggggttactcgcatggtggcaggggtggccgtcaagacaccccggtaaatccaccgcaagggggtggttaatggcccccccacaaggaaaataggggggggggtggccgtcaataataaacaccacagcagtggtggtaactactcaattactctccccatgggggggtaggctcttttcaatatggggggtggaaggtgaatataatggtagtcactgccccatgacgttccctgcttcgtgggaatatggactttcatacataaaggcgcggccgatttgtattcctgcttgttctgttgtggtaagaagggtgcttctccacacgccttctgtccttaggcgctccacgaaggtgtatccacccccgcgccaaccggactattctttgcttgtggccgctccttttgctaccacaccaactagaggggcgattctcctcatcgtcgccgtctcacaacacgactctcggggccccgcttgtgatgttattatataggcgcgcgcgcttcccgacgatcttctggggggcgataatacaaaaaaggggggcccacaggcaaccacaggggttttataaccgcgtgaaaataataatatatagggaaatatttcgcgtgttttttcggcccccgcttgggtgtgtgggtcccctgcgaaataagaccgcgccccccacgcgtgttgtctctataaagaggtgtggggcaacagacctctttatcccggggcacaaagcgccttctgtggtcgcaactcatcactctgggtgtgtgtaagaccccacaggcttataacagtgtttgtggctcttcgagatagcccctctctcacagtgcgcctgttgtgcacagagagaggagagccagcagagactctgagccgcccacacncgtttgggggggctcctgagagagagtctccctgaaaaatttctcttatccctgtggggttgtgggtgagaagagattctcacacacataccacacatatgtttttttgagagggtaatatctctctcacacttgagatccacattctcactataaggctatatcacgagagagaaatccctgaacacacccacagntggagatcacccacaaaccacgtccaccacaggctacacgggagagaatggcgctggggctgaacaattctgcaggccgaaagagccgtggccttggaaagggccacaagttccaccacactattggtggctctcgccgggcagcttggagaaggcgcaatactctccagctccaccgttaccgctaatataagtaaagtttgtaaaattcatacttaataaacaatttaggacagtca

SEQ ID NO: 589731 - DNA, 198 bp, Homo sapiens
cttccattgctatatgcagctccagtgtctcgatgcgggtagggggctcagacggacaagcggttcgaactggcgcgcgtgacctgcgccttgttgaatcttgaaccagggatcgggctcgccctcgagtgagaactgcaaccgtgaccagagcgccttgcgtttgtcgtcatcgtcatacctcttctccgtgacatg

SEQ ID NO: 589732 - DNA, 1125 bp, Homo sapiens
  misc_feature (26)..(26): n is a, c, g, or t
cggacgcgtgggtcgcccacgcgtcngtaaccagctaaagtttgctcgaagccttcagtccgttgcagaggagcgagctggacgccactgtggacaggcgtagcagagcaagagatgtaacatggagctccggcagaaagactcacacaaaacaaaagcaaaaaagagagaataccaacaatagagaccaaaccaataacggcatatacagacaaaaaaaacgtgaaaacccaaagaggagagacaaacaaagacaagacccagacaaaagacacaagagagaagaaggcagaggagcgagaacagtcatgacaaggaccgaaaacaaaaacacagatgaaaaaaggacaaagaagagaacacaaaaataaaaaacaaacacaataaagagcgacggacgacaaacaaacacagcagagagagcataagaaaaagaacaggcacacaaggaagacacaacccatacacacaccatccacgtaaacaacagaacaaacagaataaaggctacacaaaagaaaagaacacaaaaaacaaaaacaagaaaaaaaaaacaagggattggaggaaacaggtgcgaggaggggcatagacgacgaggaggcggggctgagggaggacacggagagaaaggaaggagcgagacagagaggtagaagaaggatagtgggaggaggagagggaatgaaagagaggagacgaggcgagcggcaggaggagtgcgaggaagagagtagaagaagagagagaagagaggagggagggagggagcgcgggaggcgaagagaggggagaaggaggagaggaggtagaggcaggaaggaggggggagaacagaaagaaaaggagaagaagaggagggagagaggggacagggaagggcggagaagagaggaacagacagggagagggagaatgaggaagagaagggagaagaaagagcagaagagttagaggggagggagagagggggagaacggagttagaggagagcgcgtggagaagagggggagggaagaagaggcgcggggagtgaggaggatagagagtgggcggggagggaggtagagagaagagagatgggaggagggagagagcgcggagctgagagggggggacgagaag

SEQ ID NO: 589733 - DNA, 800 bp, Homo sapiens
agcgatctattgcagtctaccatccgccttatgatcgtctatcctcattcagaccatccaggtaccggggaccctgacgtccatcggagataggtctcccatcctgtgcaggccagtagttttggtaagccaagatgggtgcatacaagtacatccaggagctatggagaaagaagcagtctgatgtcatgcgctttcttctgagggtccgctgctggcagtaccgccagctctctgctctccacagggctccccgccccacccggcctgataaagcgcgccgactgggctacaaggccaagcaaggttacgttatatataggattcgtgttcgccgtggtggccgaaaacgcccagttcctaagggtgcaacttacggcaagcctgtccatcatggtgttaaccagctaaagtttgctcgaagccttcagtccgttgcagaggagcgagctggacgccactgtggggctctgagagtcctgaattcttactgggttggtgaagattccacatacaaattttttgaggttatcctcattgatccattccataaagctatcagaagaaatcctgacacccagtggatcaccaaaccagtccacaagcacagggagatgcgtgggctgacatctgcaggccgaaagagccgtggccttggaaagggccacaagttccaccacactattggtggctctcgccgggcagcttggagaaggcgcaatactctccagctccaccgttaccgctaatataagtaaagtttgtaaaattcatacttaataaacaatttaggacagtca

SEQ ID NO: 589734 - DNA, 949 bp, Homo sapiens
gatcatgtctatttttacatttatgggagccaatgtcatgcgcctagatgatacttacagttttcaagttattaacaagacagtgaaaatggttattcccgcagcttattcagtctgatagtggagattctatagaagtttcaagaaacgttgaagagattgtggtaaaacatcattagtgtatttgtcggatgcgctgccacacgtcccggagcacaggcgcctgcccatccttgatcaactatgtggatacactgggtgcagagaacattcctctggacttctcctcatcttgctatttcagaacagtagtgtcacagaaaacatgtgctggcggcgtgccatatggcgaacaatggatgctagtttaaggaagcacgacactgaatttgggctctcagtctgttgtgagtcggagcgtccagcatcagatacacagcttgatgaatatcctccagtacttaactaaaagctggcagaggaacaaagaagaagacattgcccaaagacagtgatcagtttaatacacgagtgaactcacaagaacgaagactgctaccaggtcccaaatcgtagagacatcgacactagcgagcaactgcggcatcttcaaattcggtcagtgctgcttcaatgttctccagactccttgtcttaccaaatcaattcttcctgaacacaaacggtaagtcacgacgcaatgggtgggtacctgcaaaattcaacagacaggcactctgcaacatgcagggccagcctcgccagaaacgcgcgagcgtcacgcagccatactgattccaagcagacccacgaaggcacaccagacacccaactgcaaaccgggcaaccggccacacaaacaaagaccagcccgtgaacagcccctgcgcgcacaccccgccaccctacagagaaaagccaatcacgacaacgtagtacaaataaaggg

SEQ ID NO: 589735 - DNA, 331 bp, Homo sapiens
tacctaaatggctgttagagaaatgaatgagctacagatgataggatgtttcatgtggtgtatgcacgtgggtagtccgagtacgtcggggcattccggatagggcgagaaagtgttgtgggacgaaagttagatttacgccgatgaatattatagtgaaatggattttggggtaggttcggtctaaggtggaggctgggaataggggaaatcagtgaagtgaagactccttatttattgtggaatacagctcctatttgatagggacattagtggaaagtggagcttacaacgtatgtacgtgttcgtgtaagtaacggaaggtctagtg

SEQ ID NO: 589736 - DNA, 695 bp, Homo sapiens
  misc_feature (45)..(47): n is a, c, g, or t
aagagtggtatcaacgcagagtgcccattacggccggggacagcnnncctttccgtctggcggcagccatcaggtaagccaagatgggtgcatacaagtacatccaggagctatggagaaagaagcagtctgatgtcatgcgctttcttctgagggtccgctgctggcagtaccgccagctctctgctctccacagggctccccgccccacccggcctgataaagcgcgccgactgggctacaaggccaagcaaggttacgttatatataggattcgtgttcgccgtggtggccgtaaccagctaaagtttgctcgaagccttcagtccgttgcagaggagcgagctggacgccactgtggggctctgagagtcctgaattcttactgggttggtgaagattccacatacaaattttttgaggttatcctcattgatccattccataaagctatcagaagaaatcctgacacccagtggatcaccaaaccagtccacaagcacagggagatgcgtgggctgacatctgcaggccgaaagagccgtggccttggaaagggccacaagttccaccacactattggtggctctcgccgggcagcttggagaaggcgcaatactctccagctccaccgttaccgctaatataagtaaagtttgtaaaattcatacttaataaacaatttaggacagtca

SEQ ID NO: 589737 - DNA, 327 bp, Homo sapiens
  misc_feature (219)..(219): n is a, c, g, or t
  misc_feature (247)..(247): n is a, c, g, or t
  misc_feature (252)..(252): n is a, c, g, or t
  misc_feature (277)..(277): n is a, c, g, or t
  misc_feature (316)..(316): n is a, c, g, or t
gtgatccacccgcctcggcctcccaaagtgctgggattacaggagtgagtcgctgtgcccggctctctctgattctgatgaccccacagtgccaggctgagcaggctgcccaccatgtgcactgaggtacaagccctttttctttcctgggatccagcactcagaggtagctgtgggtgggcgggccggccagggggaagcagctcccacgggtcctgnagctcccaggcaaccctagaacccacgnagggnaacaaaatcctgggttccaaaaagntcgttcattaaactcgttcaaagtgtggttcactcaggnacccctccctg

SEQ ID NO: 589738 - DNA, 405 bp, Homo sapiens
gaaacggaaaaagggcggggaaaggcgacaaaagaaaagaacttcctagaagcgacctgggcgcactgtggggctctgagagtcctgaattcttactgggttggtgaagattccacatacaaattttttgaggttatcctcattgatccattccataaagctatcagaagaaatcctgacacccagtggatcaccaaaccagtccacaagcacagggagatgcgtgggctgacatctgcaggccgaaagagccgtggccttggaaagggccacaagttccaccacactattggtggctctcgccgggcagcttggagaaggcgcaatactctccagctccaccgttaccgctaatataagtaaagtttgtaaaattcatacttaataaacaatttaggacagtca

SEQ ID NO: 589739 - DNA, 1252 bp, Homo sapiens
  misc_feature (45)..(47): n is a, c, g, or t
  misc_feature (759)..(759): n is a, c, g, or t
  misc_feature (762)..(762): n is a, c, g, or t
aagagtggtatcaacgcagagtgcccattacggccggggacagcnnncctttccgtctggcggcagccatcaggtaagccaagatgggtgcatacaagtacatccaggagctatggagaaagaagcagtctgatgtcatgcgctttcttctgagggtccgctgctggcagtaccgccagctctctgctctccacagggctccccgccccacccggcctgataaagcgcgccgactgggctacaaggccaagcaaggttacgttatatataggattcgtgttcgccgtggtggccgaaaacgcccagttcctaagggtgcaacttacggcaagcctgtccatcatggtgttaaccagctaaagtttgctcgaagccttcagtccgttgcagaggagcgagctggacgccactgtggggctctgagagtcctgaattcttactgggttggtgaagattccacatacaaattttttgaggttatcctcattgatccattccataaagctatcagaagaaatcctgacacccagtggatcaccaaaccagtccacaagcacagggagatgcgtgggctgacatctgcaggccgaaagagccgtggccttggaaagggccacaagttccaccacactattggtggctctcgccgggcagcttggagaaggcgcaatactctccagctccaccgttaccgctaatataagtaaagtttgtaaaattcatacttaataaacaatttaggacagtcaaaaaaaaaanaanaaaaaaaaaaaaaaaaaaaaaaaaaaaaaaaaaaaaaaaaaaaaaaaaaaaaaaaaaagaagagggggggcaggcgcacaaataaacatcctcccccgcgagggggagaccagaagaactagcgcagccaggccagccagtgtttgttgttgagaaagagagggggcccccctagaagaggagagagcattatatatcaaacgagcgagcgagcgagcggcggcgcgcgttaaaaaaagatgaggggaggaggagagaggataaaggggtggattagtaggggaggtcatatctatgttggggagaaaggagaacacccaataaatgaggggggggggggaggagaacaacaatatgtggtggagcaaaaaatcattctctacagaagaagaatgataacagcggtcgtgcaagggggaagaacataaagagaatataggaggaggactataaaggggggtggtacaaaaaacagagaggaagtatgtgt

SEQ ID NO: 589740 - DNA, 321 bp, Homo sapiens
  misc_feature (46)..(46): n is a, c, g, or t
  misc_feature (157)..(157): n is a, c, g, or t
  misc_feature (195)..(195): n is a, c, g, or t
  misc_feature (211)..(211): n is a, c, g, or t
  misc_feature (244)..(244): n is a, c, g, or t
aagctttacgcaactcaatctgttctaaacatagagaaatggtatnggtgagaagccataaaaatatgaaaaatgtggaaaagccttcaaatgcttgtcacatcttactgaatataattcttactgcagaaaacccctaggaatattaaaagtgtgncaaaacctttaaccaatgctcatatctctttgcacatnatagcatttatacttnagaaaaattgtacaaatatagaaaatgtagaanagccattaatgcctactccatgtgttactaaatatcagagagtttgtacttaatttaaaagggatctcataaatgta

SEQ ID NO: 589741 - DNA, 226 bp, Homo sapiens
  misc_feature (72)..(72): n is a, c, g, or t
caatagatgggaggctctaatcaagtagataaattctatttttggaattgtgaataaagcagaaaagattcnttggaaactcaggaattgaatagattgatggtacaaatgagagactatatgttgcttaaagaaaacaaaagattgcctatcaggttttaaaatgtgagtcagctagtttatcataggtgattcaatgctgaacagctatcttggttattaacta

SEQ ID NO: 589742 - DNA, 211 bp, Homo sapiens
tcatgctgtagtccaagcattttagaatgcaggtggtgaggatcgtgtgagcccagcccgagaacacaatgaaaccctatttctacaaaaacttataaaaaattagccaggcatggtgcggtggctcacatctgtaatcccaactactcagaaggccaaggtacgaggattatttgagcccaggagcccaacattgcaacacggtctctca

SEQ ID NO: 589743 - DNA, 928 bp, Homo sapiens
ggccgctgcactccagcgtgggcaagacagcgagactccgtctccaaaaaaaaaaaaaaaaaaagaaagaaatgaaaagtgataagggctatgaaaataaaggaaaaaacagaacagggtaaagagggatgggaatgccaggcgagggtcacagtgatcaatggaggcagccaggcaagccctccggccatatgaaactgaacacttgagaaagtcttgatgggacaatgaagggggggcctaaacaaagccaccaaagagaaattaatccaagggacgaaattaatccaaagggaaatcagcaccatcgtctcatttcagatatgcgacaaattgagaaactagagaggtctaggaactggtccgagaccacacaattggatgatagaaccaggtggacacgggggatctgcaagaattccctgccacaagcttccttccctataagtgaccaggatataagagccattcggtataggatcaaatccaacaagtaagctccagaaatcacaggccagaaacagccgcgtgcatttacaagcacacaaggggttaacaaatacctggtggtgtatccagtgccaactttggcaaaacgtgtaaactacccacaacgtgctcctgcagaaggtccaacccttataacctcattccaaaacagggcaaccgagagcaggaggcctgtgaccatataaagatccccttgatacaaacttctagaagtggccaaagcgaggaataaactacgtccaaaacccccgagctggccataactagacaaaaggctccaattatcgcaaaaaaaaccaacaaaaagaagcatcatgaatggttccacacagaaataccaggtggcacaaaaatagcgctaagaacatcccaaactttcacaagacagatggtagaggcataacgaatacgcaatgcc

SEQ ID NO: 589744 - DNA, 738 bp, Homo sapiens
cctgacttcaagtgatcctcctgccttggcttctcaaagtgctgggattacgggcatgaagccactgcacctggcctattttattttatttttttagagaatgaggtcccactctgttgctcaggctggagttcagtggtgtgatcatagcccactgcaaccttgaactcctgggctcaagcgatcctctccacttagcctcccagatagctgggaccactggcgtgtcccactatgcctggctaattttaattttaatttttttttttttttcttgggtaaaaatgggtttcactgcattgtcaaggctatatcttgaaattcctggcctcgaaggtgatcctcctgccttggcctcccaaagtgctgggatatacaggcatgtagccactggtgtcgggccatatccttcatcattctggtcctggctatggctcaataatttttaagagacagggtctctctcgtgtctcccaggctggagtccagtggcatgatcacctctcactacagcctcgaacttctgggctcaagcaactccttccacctcagcctttcaaagagctgggattacaggctgagccactggaggctgggatttcacgtaatattggggtgtatacccagaaagtggcaatggctggaatcattatggtaatcctatttccaagattctctgagagaaccaccatgagtgtttgccatggtggtttgcgccattttcacaatcctgaacca

SEQ ID NO: 589745 - DNA, 293 bp, Homo sapiens
gattgggtgatgggggaagttgcctcatgaatgacttggtgccctcctggaagtgatgagtgagttctcgctgagctcactcaagatgtggttgtttaaaagagtgtggcacgtccctcccccaactctccctctcactccggctctcaccatgtgacacacctgctcccggttcgccttccaccatgattggaagcttcctgaagcccttaccagaagcagatgccagccccacacttcctgtaccacctgcagaaccataaaccaaaataaagctcttttctttatcaata

SEQ ID NO: 589746 - DNA, 355 bp, Homo sapiens
gggaggatacgagagataggattgtggcggttggagcgaggatgcatccgagtatctaacgtggccccatggtgtagtgggcatctgaatgtatctttactacaaatagccactttcatccaaaacagatcatgagccgggacttggacaatatagaacaacggatgtttctgaaaatgaacttgaaaaaggtcacactacgattattctacgtgggttctgagcggggatcctgagcagacctgaccgttgtccaccgcagtgaaaaagaaatcctgccttattttctttctctccatttaaaacggggcaaccttttgcgctgtgttccgtctacggtcgggtcccgaagctc

SEQ ID NO: 589747 - DNA, 334 bp, Homo sapiens
gagccaggcactgcaggggatctgggaaagccaagatgggcaaggaaacccttctatggccaggagtggtggctcatgcctgtaatcccaacactgtgagaggccaaggcagaaggatcagcttgaggtcaggagttcaagaccaacctgggcaacatcgtgagactctgtctttacagaaaaaaataaaatagtggcatatgcctgtggtcctagctacctcaggaggctgaggtgagaggatcacttgagcccaagaggttgagactggagtgagtggagatcacaccactgcactaaaccatccccgacaaagcgagaccctgtatcaaaa

SEQ ID NO: 589748 - DNA, 303 bp, Homo sapiens
  misc_feature (56)..(56): n is a, c, g, or t
  misc_feature (114)..(114): n is a, c, g, or t
  misc_feature (186)..(186): n is a, c, g, or t
gccttcgagcagcgcggtgccctggttctcgatgtcttcggaatcgatgtagcgcnggttgaccttggtacggttggtgatgccggcatgactcatcgcttcgatcagcgactngtaggcgtccagcagctccatgtacttgccgaccatggcgatggtgacttcatgctcggggttgagcttggngtccaccaccttttcccactcggacaggtcggcgccgttgcattgcaggctgaaacgctcgacgacgaaatcgtccaggccctgggcgtgcagcacggccgggatcttgtagatggt

SEQ ID NO: 589749 - DNA, 436 bp, Homo sapiens
aaaatgtcaccatcataaaagacaaaggaaaactcatgcctgtaatcccagcactttcaaagcccacggtgggaggatcactcgagcttaggagttcaagaccaacccgggcaacatagtgagacctcatctgtactaaaattcaaaaaattagccaagcatggtagtgcacacctgtagtcccagctactccagggctgaggtgggaggatcacttgagcccaggaggtcgaggtggcagtgagccctcatcgcaccactgtactccagcccaggccacaagagcacgaccctgtctcaaaaaattataaaaattttaaaagccagacatggtggctttttatcccagcactttgggaggctgaggcaggcagatcacctgaggtcaggagtttgagactggcctggccaacatggcaaaaaccccatccctact

SEQ ID NO: 589750 - DNA, 182 bp, Homo sapiens
tgccaaagcggtagtacccaggtgttggagcagctcacgagggcagacccctgtgttttccaagagctagatacacttgtcagatcctattggccatccaggcagcaaatggaataagattgcctgtgccactgccacagttccgcaggggcctaaggccagcaagcaaatccttgcgagca

SEQ ID NO: 589751 - DNA, 408 bp, Homo sapiens
cacgaggagcctgcggaccgcgacggccctgtcgcggccaaggccgctcccaccgggaacgcacccgacctgctgcccgagcctgggcaggggattctgtgggaggggtcttgaccccgacaacagcctgtatcgaggcctgcggaccgcgacggcccatttcgcgagggccgctcccacagcgggaattcgccacacctgctgccggagcccgggccgatgcctgcacaccctgccccaaaaaaagacgccgcgccggcacgatgcgtgcaggcgcggcgtgagaggacgctgtatcagcggatgatgtcgtacgagtagtcggtcttgcccggaacgatggtgttcacgtcgatcgactcgaagaactcgtcgagcagcatcaccagcacgcgcatgccgccttcg

SEQ ID NO: 589752 - DNA, 251 bp, Homo sapiens
cagagtagggagtccttttgattgctgagtagtattccatggtatggatgtaccacggtttgcttaaccattcacccactaaaggacataagtgtgttttcagttttttgccctaataaagctgctgtgaacattcatgtacaggtttttatgtgaacatacattttcattttctgggataaatgctcaaaagggcaactgttgggttgtatggtaaacacatatatttttgtaagaaactaccctactct

SEQ ID NO: 589753 - DNA, 991 bp, Homo sapiens
gcactaccccagacacaaggccctgacgcactgctcctgtcaccttcagcacatcctgtgtcacagctggaagggtgcatggccgctcacctttgttcagatgggtggaaacgctgatgatacagatcctccctgcgtgccctgccacggagcagcattgtgaactggctggtgtttgcagtcccacgtggcatgggctccagccaagcccacagctggagactggacgacagggccattgagtctggtcgaggggcacgtggacgagtgtcccatatagggcgccccacccagacttatacaggcaagtgctgggcattggtcgcgacgcatcgacatcacaagcgtaaagcaagcctgactggcgtctgtgcacaagggcccgtccttctgcatttatatagtccatttctacatcatgaaaacataccgttctttacttataaggctgaggaggacgtgcttggtacggcaagaaaccaacaccacctgaacgacagacgagcagagggggcgaggtgtgtgtccaatcccagccacaacctgcacagaacctgcgggtggtggtgagaaggcaatgttccgtgttttgtgcgcctcgctgggctcgtgtcaacaagaacccgctcgcctcgggcacaatacatcgctggcggtgccgcgtgacggccatctcactcttgtaacatgactagcagagataagaccctgcctcacggacatgcgggcgtcttcacccaaacgtaaataataggctacgggcagtataaccaaaaatccatgtatgccaacggcccttgcgaacaccactaaattcgggctcctcccggcgacgcgcaacagtcgaatcatgcgcggccccctcgaacctactcagcattccaccgcatacatgtgtacactagggcagaggaaacacaatccacgcgttatccacggtactagcgaaagcagcaacactcacccccaccccccccactgcagcggcaca

SEQ ID NO: 589754 - DNA, 220 bp, Homo sapiens
cgcttagaggatccacagacgtctcgctcgttctctctctctctcttctctctctctcttctccccccaacaaatatagctaacgtaatagaaatggagaacaggatacaatgagatttctttcccttctctcacagcacgttggggttggctaggagaaggcaaggtatgggaatatgattatccctatttacggacacaaacaacaaacaaaaaaaaa

SEQ ID NO: 589755 - DNA, 422 bp, Homo sapiens
gctaaccactattcatatccttaccccttcttcctggctgatggaatctcaactttcgcttggttggcaatatgtcaagttcaggggcataaatcataaccagtctaaaccaaagggacaacatgcacgctccccttggtcagattatttaatgtggtgaatttataaagctctctgatcaatacgatggacagaaaatcgacttggggggtgattatccttcccaagtggaggggaggtatatacagacagcccactatgacgtactggacaactccaaacctattaccagttcctgcctctggatggatttgcatgtgaacatgatgcctgtgagacaaagcagacatcttgtggaattcacttggtccactcatcagtgaacacaagtcacagggtcttgagtgatcgtggggatgtaa

SEQ ID NO: 589756 - DNA, 1317 bp, Homo sapiens
ggaggaggtggaggaggaggcggctcgggagagcgagcagcgagctggctggatcgccgagcgcgagtgagggagccgagccgcccgccgccgccgcctcctgcctcccctccgcgaacaggagccctgggcctggggccctggcactgccgccccaagccctgtccctcgggcgtcagtgccgcgagggtagctgcgctgctgagctgagcgagggggagggagagcgagcgagcgccgggaggaggcggcctgtgacctgatgctgtggctgccctgctgcgtagttgtgctgtcgagggggagagcctgatttgccctggcatattctccccttacaatgaaagaccatcagtcagcagaagttcaggaacaagaccaggacgtcctgccgcagagaccagtgttacccgatccaatacagacacgatcggcagcatacacacacacagcctcatgcataagcaacacacccaagtcatacaaaatacaccaacaacactcggacagcgcagcgcatgactaacacaacagattcagtagcagcaagccgctgaggaaaaccaagtgagcggacacgaccgccagaacaccgcgcgaagcaaaccgatgcgggcaggacaaagcaaaacagaacacgcagagagcgcgccaaagaccaagagagacagacaaaactacgaacaagccgagaacagcgaacagagcagacgcacaaggccacgcacgcgcagcaggcagcccccagacaacaccagagaaaacgaagcagcaacagaggacaacgcaggagacaggcagcccagagccggaacgaacgccagcagagcctcacagacagcgagcgacagagcacacgagacacacaagcagcagacagagccaccaagaagctcacgagcgaggcaccccaaacaacagagaagacaacaagaacgaaaacaacaagaggatgagagccaaagacgcaggagacacacacgagccaacgcagcaaatacgagccgatcagccaaaccagagcccgcagcagagagactccaaagacagacagagcaacaagaagcaacacagccaggcaagagagacagcagcacgacataacacagacacagagggcaaaacaaagagaaagcgagcgagacagaaaagaagcaaaggcacgaggaaggcacaaacgaaggagacgggagcagcgaagggaaacaatacagacagcatcgcagacacaggaacagacaggcacacaggacgaggaagagaacacaaacaaaagtcgacacgagaacgaagtacagaccgctaaacaggacacag

SEQ ID NO: 589757 - DNA, 385 bp, Homo sapiens
ggaggaggtggaggaggaggcggctcgggagagcgagcagcgagctggctggatcgccgagcgcgagtgagggagccgagccgcccgccgccgccgcctcctgcctcccctccgcgaacaggagccctgggcctggggccctggcactgccgccccaagccctgtccctcgggcgtcagtgccgcgagggtagctgcgctgctgagctgagcgagggggagggagagcgagcgagcgccgggaggaggcggccggaccgagcgggcgcccgcgcgtgtggcgtgaggggaagccgctgtgggagagggagcggggggaagggcgggacgaggggggggggggggtggtgggtagggtgtgaggggggtggtgagggaaggggggg

SEQ ID NO: 589758 - DNA, 105 bp, Homo sapiens
ccttttggtggcctcatggtcagagatggtccagtatcctgtgcaatctggtgtgaagaccaggttgggtgggcagctgcaggctgccccagcccgttgctttgg

SEQ ID NO: 589759 - DNA, 164 bp, Homo sapiens
gatatgtgtagtataccaaagacacaacatccccctaaataattaaaaaactattaacccatataacctcccccaaaattcagaataataacacacccaaccacaccgctaacaatcaatactaaacccccataaatagtttatgctgtaatagtttatgctgt

SEQ ID NO: 589760 - DNA, 211 bp, Homo sapiens
gaagttgatcatgctgacaatcctagacagccatctccaaggttaagaaaaatcctgatgcactacactggcatcgatatccacagcaggctcttaatggacagaaacacagcctgcgatcaactatgtcaagtactctccagttctgcgaaaaggttatgttgggactatagattcaagtctgtacaaacaaacatgagaagaagataat

SEQ ID NO: 589761 - DNA, 233 bp, Homo sapiens
  misc_feature (202)..(202): n is a, c, g, or t
cctccccctaccacgcccggcccggggttccccggcaggctcccgggggctgccatgcagccattttctcacattttcccatcctggtgctcatgccatccttggtgggttcttccatccagggtctccttcccgggcccatcctggcacccaccacactcactcactcacttggtctcatcactggcacgggctttcaggngggtcaccggcagctcgcacattcggtcaca

SEQ ID NO: 589762 - DNA, 486 bp, Homo sapiens
acagcccaggtatactcctcctatcataactgggatatcactaaatgtagaggcgctccttggcaagcatgccatgctgagaactgggctctggggaggaggctcatggtactcactgcagctatcctcatcaccttgatgggctggagatacggctgcttcagaaagagtgggccctgtcgaagcgtgcttactgatctgttgtcaggtggactggctcaacttggagccctgattagcttagtcacttctggagtcgctctgaacgatggtcctttatgcatgtttgatgtctcatccttcaatcagacacaagcttggaaatatggttacccattcaaagacctgcatagtaggaataatctgtatgaccgttcgctctggaactccgactgcctggagccctctgcagctgtagtctggcacgagtccctctactccgaccttctgtgcatcagactgctccagctactcctggtggtcgtt

SEQ ID NO: 589763 - DNA, 377 bp, Homo sapiens
  misc_feature (325)..(325): n is a, c, g, or t
aaccctaattaacgcctcactgagtagttcaaccatcctgttgtttacagaagccagaaaagaagatcctgtccatcaggatctctttctcctctcatttccaatttatccccaagccctgtctacttgaaccagtacgtttctagtaaaaacttccatttgtttatatttacagtaccactgcccagtctagaggtaccattatctctcgccttaagtaccataataaaggtctgttttcactcagttcatcacctccagtaacttacctaccctcttgccagagttcccatttcaaaaggccaacctggagttcccgtcgtgntgcagtggttaacaaatctgactaggaaccatgaggttgcgggtttggtccc

SEQ ID NO: 589764 - DNA, 111 bp, Homo sapiens
gggggcaaagatggcggcggtcaggtgttggaggcctttgctacgcggtccgaggctttcattgaacaccgcggccgctgccgccgcgttttttacagaaacgacctccca

SEQ ID NO: 589765 - DNA, 106 bp, Homo sapiens
tcagactcaggatgcagatcatattccaggatatagggaagaatggcaaagtatcggctttgctcagatatcttagaaattatttaaagtgcgtacaagaacatgt

SEQ ID NO: 589766 - DNA, 195 bp, Homo sapiens
  misc_feature (195)..(195): n is a, c, g, or t
atttccacaaacctctaatcccttgtaattactttgtcagaggacactctttggacactaggaaaaaccttttggagagagtaaaactttacacccatagtagggcctaacgcagccaccaattaagaaagcgttcaagctcaacacccactacctaaaaaatccaaaccatatacctgaactccccccaccccn

SEQ ID NO: 589767 - DNA, 395 bp, Homo sapiens
gagctcgccaccgatgaagcgtagtaccaacaagatctacaatgacattgcagcatgtcttacacaacacaaatatttaaaacacacatgcacatatttatatttaacttatttatgaatttacaacttatgagaagtgtttgaccacaatttcttttgtctatggagtgatatttattttccatccattgcatgttactgtcatttcttttctcacttttccttttatccttgaatatatactgtgtcaattcatttttttattacttaacattttagaaggtaaggttttcttctcaggatgtttgcatatgattcctaaagctgggtatgtgccactttccttttggttgaaattttcattacaacctagttgggtactacgctttggcagc

SEQ ID NO: 589768 - DNA, 1521 bp, Homo sapiens
ttaccaacgcttggttgtgtgctcccctttatgttgctggtgtggggcctccccacagtggttgccacaaagaaccgcgcgcgtgttgtttactcccgcgtccccctgcttctattttctcctgcggtcttttatagtggtttgccggccgcccttggggggtgcgaaattttcgcgccacacgggggggtcttgtggcccacccttgttgggtcggagcgccctaagagggatgtgggggccccattgtaaccccgtgggggcggcaccaccacaaggaaagggcgccctaggttgttttttggggagccgcccccgtgtatttttcaaggcgggcccacccccgcccgccctgcccgtggtcgttgtctttggatctctttgggcgggcccctatatctgtggggccataattttcacagcgtgttgggcggccttgtggggcccccccgcttgtgggtgtgtgcacaccaacgggcgggcgcaaggtctgtgtgtgcacccccactttcggaggtcttcttactcccccctcgagtcttgtgtccaccgcgcccgttccagaccctccgcccgcggaattgggttgtggagttttttcctctggggcctttgttaagggaccccacgggttgccacccccttgtgtggttttgtgagggcgtttccccccggagaccttcttttctccccccccgctctgtgagggagatgagaagttattgtgaatgttggggcacacccccgtgggacacacctgggtgttttttcctcgagccccccctcgggagagaggagccccgcgtgttcctctgtcccgcgagaccccgcccttttctctctctggggaggaaatttgtggggccctcgtctgtgcgcgagaagagggagccacgcttggctatatctggggctgtagcccacacgctgatgtttctggcccccgggtgggcgcccacgaacttttctcttgggcaccaccgctgggcgccgcggagagcacgccttgtctcttggaggtgggccccaccacatggcccccactgtcgtgttctctcggagatacaccgcggagaggtgtggtgtggcccggccctcggaagaaaggccacttctacaccaagggccccaggcacaggcgagaacacacagggcccctcgagcttgcccccccccgggcccccactctctctcgggtctctcttcttcacaccccagccctgggtgaactcgagaaggtgccacgaacgtggcttcctcgctgaccctcttctgcgggctcccgcggctgtggttcctataaatgccaaagcaccaccctccgcgccgagggcctcgcgccccctcgaccactgctataccctctcttctgagaactgcacacacacctcggagttgtttcttttttaagactcccactcactgacttcctttactaacaccctcggctcagctatattattcttatatactaatatccactgtttttaaaataattaaaatagaaatttagaatcttta

SEQ ID NO: 589769 - DNA, 137 bp, Homo sapiens
agctgcgttcatctgcgggtggtacatgcccacggtgggcgaggcgggccactctactcgaagtgtgaccacgtttagattctgagacgggaagtggagggtgaatagtgtcacggtcggcctttttttttaaaatt

SEQ ID NO: 589770 - DNA, 161 bp, Homo sapiens
gtgttttagaacgggagaagaatgggcggaaaatgaaagggaagaaggaatgatgccgaaaggtaagggtttcctaactcaggtgaagtcatagctgcttaattgatagattgcgctagattgccatgtgctttcgtaacttggggctctgaggtctatca

SEQ ID NO: 589771 - DNA, 931 bp, Homo sapiens
gtcaacctcctctgcagtcggtgtgcggtcccgacctcagtgagcgtcgcgtcgccaaaagatgggcagcagcgccaagtgggtgcgcacagaggcgccacccgtgctgaacttgcggcggaaaaaagcacagtgcgccccctcctcccgtggggggcgcaggacaagaaatcaccagcgggtgtgaactctgaaccagaacggcggtgcgcaagtgccacaaaggaggccaacgaagagcctccgccgaacagagtggtggtcttcctgcccacaggcaaataggagcctcccaccgccaagtatgagcgaccctgggggcgcgcatcactgccagcagcgcgcacccgatttgtcgcgccaagacttgcaagagggcaaaaaaaacaggccgggaagtcaactggaaaaagacgagcccccggggttcataggggccccggggcaccctcctcacgcacgggacacccagggaacacgcgcgagcaacatgttaacaggggccccccctccaccagctcgtgtaaggtagatggaactgcatctagaaacgaccgcccaccctgcgtttggaacgcggctcaacagcaggccccccaccctccattgcacgccaggacactcctcgggagcacgcgcccgacgtatctcgcccagtagccaaaaatgtacaggctaattaggaagtcacatccgtgaccccaattgggcgcagaatgtgggtcgccgagaacacgaaatatgtcaatgaccttttcatgtattcagtgagaaattgttaaacactccaacctatgtgccatggcacgaccatggtcgtcattcgagattgaaacaggaggcacctgttgcttgtgtatctgagccggggggaaatgcagagggcgtcccacagggtttcaggcaaaaaaattcttttacgaaaacatgc

SEQ ID NO: 589772 - DNA, 345 bp, Homo sapiens
ggcaacatagtgagaccttgtccttattaaataaataaataaataaataggttgggcactgtggctcatatctgtcatcccagcattttgggttgccaatgcaggaggattgcttgagcccaggagtttgagaccagcctgggcagaatagcaagactccatctctacaaataataaaatattaaccaggtgtggtggtgtgcacctggggtcccagccacctgggaggctaaggtgggaggtttgctcgaggctgcagtgaactgtgaatgcaccactgcattccagcctaggccatagaacaggatcttgtctataaataaagaaataagtaaaaatataaat

SEQ ID NO: 589773 - DNA, 135 bp, Homo sapiens
ccagttcctgcttcttgaaacacttgattcctctgacagtgcacttcgtggcattgctgtttgtccttggacgaagtctcgggcctggtgacagtaggatggatgtaatctgaacactcctttgtcactaggtca

SEQ ID NO: 589774 - DNA, 656 bp, Homo sapiens
gcggacagatcacttgagatcaagaatttgagaccagcctggccaacatggtgaaaccccgtctctactaaaaatacaaaattaggtgggcctggtggtgtgtgcctgtaatcccagctacacgggaggccgaggcagaagaatcgcttgaacccaggaggcggaggctgcagtgggccgagatcgtgcactgcactccagcctgtgcaaaaagaatgaaactccatctcaagaaaaaaaaaaagccccctatggacatgtcattcctttagccttcttttcaaaaactttatgtaagtctatggttgccccaagtgttatccatgaccttaggcagctctgatgtcaaaatacgcaacaaatgggccaagtgtgggggctcacacccgtaacccaagcacttgggcgaggccacggcaggcggatcacccgagatccaggagtccgagaccatcctgccaaacacggtgaacaccaccatctcccacttaaatatcacaaaacattagccagggtgtgggtggttgcattgcccgtaattccttagactattggggacggccgaggcacgagaattcgcccgaactcgggcagacgggaggctgcaagtgagccgcagatcgggcaactcgactccagtccgggggacacgaatg

SEQ ID NO: 589775 - DNA, 116 bp, Homo sapiens
cgatttctagcaggactcccaaagattaaggatctgtcttaatatacactgtgtcacgtcgctattttcctttttacagtgttttctggacttggggtacccgagcatcaaattcg

SEQ ID NO: 589776 - DNA, 934 bp, Homo sapiens
  misc_feature (11)..(11): n is a, c, g, or t
  misc_feature (110)..(110): n is a, c, g, or t
  misc_feature (114)..(115): n is a, c, g, or t
  misc_feature (160)..(160): n is a, c, g, or t
  misc_feature (171)..(171): n is a, c, g, or t
  misc_feature (178)..(178): n is a, c, g, or t
  misc_feature (182)..(182): n is a, c, g, or t
  misc_feature (203)..(203): n is a, c, g, or t
  misc_feature (217)..(217): n is a, c, g, or t
  misc_feature (219)..(219): n is a, c, g, or t
  misc_feature (237)..(237): n is a, c, g, or t
  misc_feature (250)..(250): n is a, c, g, or t
  misc_feature (253)..(253): n is a, c, g, or t
  misc_feature (259)..(259): n is a, c, g, or t
  misc_feature (268)..(268): n is a, c, g, or t
  misc_feature (273)..(273): n is a, c, g, or t
  misc_feature (277)..(279): n is a, c, g, or t
  misc_feature (283)..(283): n is a, c, g, or t
  misc_feature (298)..(298): n is a, c, g, or t
  misc_feature (306)..(306): n is a, c, g, or t
  misc_feature (308)..(309): n is a, c, g, or t
  misc_feature (320)..(320): n is a, c, g, or t
  misc_feature (329)..(330): n is a, c, g, or t
  misc_feature (332)..(332): n is a, c, g, or t
  misc_feature (334)..(334): n is a, c, g, or t
  misc_feature (361)..(362): n is a, c, g, or t
  misc_feature (384)..(384): n is a, c, g, or t
  misc_feature (389)..(389): n is a, c, g, or t
  misc_feature (396)..(396): n is a, c, g, or t
  misc_feature (399)..(399): n is a, c, g, or t
  misc_feature (410)..(410): n is a, c, g, or t
  misc_feature (417)..(417): n is a, c, g, or t
  misc_feature (430)..(430): n is a, c, g, or t
  misc_feature (437)..(437): n is a, c, g, or t
  misc_feature (453)..(453): n is a, c, g, or t
  misc_feature (456)..(457): n is a, c, g, or t
  misc_feature (535)..(535): n is a, c, g, or t
  misc_feature (565)..(565): n is a, c, g, or t
  misc_feature (759)..(759): n is a, c, g, or t
  misc_feature (808)..(808): n is a, c, g, or t
  misc_feature (869)..(869): n is a, c, g, or t
  misc_feature (899)..(899): n is a, c, g, or t
cgggcgaaggngcttgtctggggggggtgtctggggtgtgcagaaaggtcaggctgggctgcctgtcacatcctgagaccacacgtaaacctttataagccattgtctcngggnngtattgtagcctgaaaaataaagcaaagtgagtcaaacctctggntcccacttccngacccantggnccccagacccatcttcaaggncccctcccgccacngncctgcctcctgatgaagngaagagcttccanagngaatgnagcctcagnagggncggnnnaganatggctgagtcctgngctgcccngnnggaggaaggancatgggatnnanangccccgggactcaggatcaagaatcannagtgcagatggatggactgtanaaatnaaaaaanttncggtaccttancctcacnagctgaacttgantaggaangatcatgatttgcttnaannaagcgaggagaaaaaagaaataaacatggctgtggggatgtgaaagaagtggctgattagggatggaaactggaaagngtcactgtataagcagaagaaagaaggaanccacaaagactggggaaaggatgcaaaaaaaagaataggtgaagaacaaggaacatggagaggccccaaggtgcttctgagagatgaacgagacacctcagtcatggcacactgggtggtgtgcttcccctccaagtcctgtctttgttttacacagtcatatgaaagacataaccccattgcccaaatcaagnctggaggagatgcgttactatatacatttttttctttaaaaaaattttntttttttggtggttttcttaaaaaagcctttgagttgcaggtcaggtgagttggttctggnagtaccggaagttctgttggtatgagaganacttgtctacaggcaggtaacccaagtttgccaac

SEQ ID NO: 589777 - DNA, 183 bp, Homo sapiens
atttttttggaaacctctgcgccatgagagccaagtggaggaggaggcgaatccaagggttgaaggcgcaaaagaggaagttgaggcagaggtccaggtaaaccgttagttttttgcaccttggaggccacaggggcggaaccatggattcccacggttgggattgcttggtccagttgtgga

SEQ ID NO: 589778 - DNA, 285 bp, Homo sapiens
  misc_feature (37)..(37): n is a, c, g, or t
  misc_feature (133)..(133): n is a, c, g, or t
  misc_feature (225)..(225): n is a, c, g, or t
cttcaccccagagctcctgcgctagaccctgcctctntgtcattgataaatggtatcattacacagcccaggccctcctcctggactcctattgccagattaaatgaactatacatttcaaatgctccatgtngcccttggggactttgatcccctggttcccctctttgtctgctgtccctgatcaccccttgtcaccgggtcagctttgtcctgtggaccctnccccttcaatgacctctcttcctgctcaggtgatgtgtaggaagcccagcccccagggac

SEQ ID NO: 589779 - DNA, 424 bp, Homo sapiens
accggctacagaatgagatcgaggacttgatagtcgacgtagagcgctccaatgctgctgctgagccctggaacaagaaagcagaagaacttcgacaagatcctgtgccgagtggaagcagaagtatgagagagtcgcagagcggagctccgagatgctcagcagaaggaggctgcgctccgtcagcagcagagctctcacatactgcaagaacgcctatgcaggagtccctgggtacatgctggaggacttcaagcgggataacaaaaacctgcaggaggagtatctccacttgactgagcagttgggtttcagcggatagactatccatgagctggagaaggtcgaatgcagctggaggccgagtagatggagctgcagtcagcctggaggaggccgagcccttggagcacgaggaggcatg

SEQ ID NO: 589780 - DNA, 364 bp, Homo sapiens
  misc_feature (39)..(39): n is a, c, g, or t
  misc_feature (161)..(161): n is a, c, g, or t
  misc_feature (189)..(189): n is a, c, g, or t
  misc_feature (240)..(240): n is a, c, g, or t
  misc_feature (242)..(242): n is a, c, g, or t
  misc_feature (248)..(248): n is a, c, g, or t
  misc_feature (263)..(263): n is a, c, g, or t
  misc_feature (307)..(307): n is a, c, g, or t
  misc_feature (315)..(315): n is a, c, g, or t
  misc_feature (317)..(317): n is a, c, g, or t
  misc_feature (332)..(332): n is a, c, g, or t
gtccccatgccctttgtcacagctactagataggctganggcaggagaattgcttgaatccgggaggcggaggttgcagtgagccgagatcgtgccactgaactccaacctgccaatagagcgagactccgtctcaaaaaaaaaaaaaaaaaaaaaaaaantacctttgaaaaaaatcccgcacttcanaggaaagcttttttcctgcttggtgtctttccaaagatagaatatttgaancntgtttnctagcgatggtgtgnatgagggtgagctggctgaggcatcgctcaagcgtggggggtgntgtgtaanangcacttggagccacnagaggcacctccctgtgacaagggtgcatggg

SEQ ID NO: 589781 - DNA, 138 bp, Homo sapiens
gaatgagccggtacctctaaaccttagttcagcattactctctgcgtttaagcatgtgcagcaaaaattcagcactcttttggggccaccgaccttgtgtccagccccattgcttggcctgcgcacgacagcccaaaa

SEQ ID NO: 589782 - DNA, 684 bp, Homo sapiens
aggcccagccaccctgagttggataggcttcctctttgggtgggctttccctctcagccccgaatttgtggacaatctatccatgcgcatccatgggccccctccattttcccgtacaccttccttgcccaacccggggctatagcagcccctgaagccccgtatactgccccttccccgcataagcgttttgatggtgtctatattgctccttcctcgtcggccttaatcccacaactgtatttctcccttagctcgtttattattcttcacccccggaatgcggtgggagcccaggccacatcccttttgccacctgtatctataatgtgttggagactataaacgtcacccaacggtgggcttttcctctggctgagaagatggaaggcctggtgggagtttgctcctgggttccctaggccctaatgtgagggcacgaagagaaacccactccttctccctttttacacccctgagggcccacgagtcccctcacgaaaggaaccagggaatgctgccctctccccatggtgcccctgcctctgtgctgtgtaatgtgagaccccccaagtgaggggataaacctcggccactaggttttgtggtttttttgccttcacctggacttgccccgataattttcctttttgaggcagctaaataaaagatcaatttgtgcca

SEQ ID NO: 589783 - DNA, 489 bp, Homo sapiens
gatcgcggtggggaaccttgaaggcgcgctgtggcggttgtcgatgctgatggccatcgctaacccaattgacctcgttcgtgagtacgtcgaaggcaataccaccggatggcgggttgccaccagactcggtggggccgccatctgccacgtccttctcatcctggccctggccgttgctgtggacgccgtgatacgacaccgtcaccggattctctccagcgtggctgccgtcagccatcttgcgtgtttggcagcatccgggtctcgcgccggaaccatcagcctggcactattcgtcatcgggctggtatttttcggacgttcttaccggacgcgcagccgaaaacagcggatcgtcatcgcagtgttgggaatcgtggcatcaggggtagccatatggctagtgacgacggtccgttctgggtctcttgtcgatccggcgcgtgcgcgaacctgggcattgtcgacgcgcccgcgaatttagta

SEQ ID NO: 589784 - DNA, 175 bp, Homo sapiens
ccgcagtctggggctggcgacgatcagagggtgctctgtgcgaggtgccttcccgccgccccctcccccgactcgaggcaatcatttccccctgcgcctcctcgaggaggcagatcttcccgttcccccgccgctctcctccgtgaggacggaggcgagggcctgtaggtcccca

SEQ ID NO: 589785 - DNA, 155 bp, Homo sapiens
gagatcctgcttccgaactccatcaagggttcatggacgggaagcaggcgtgcgtgctcatgattatagccctgtgtagctctgacatgcaatctgtaccgcattgtgccagtagcaatagttcttcttccgatgccgtgtgttgctggtcccac

SEQ ID NO: 589786 - DNA, 263 bp, Homo sapiens
ctcagtattgacgtcacttatgacattcatgccattggttatactcaatgtctctgcatgtgtgacaatgagtacgggaaaagagatacaatgattactatcactaatgacaagggccagtttgagcaaggtaagacattcgaacttatggtccagtgaagctgactaagtacaacagctgaaagatgagaagcagagggagcgcaggtgtcacttcaatgaacttcatcttgagtccatattgtcctatcaacacttaaatg

SEQ ID NO: 589787 - DNA, 678 bp, Homo sapiens
  misc_feature (39)..(39): n is a, c, g, or t
attcttggacataagtcaacagatagagtgctgggagcncatattctaggaccaggtgctggagaaatggtgaacgaggcggccctggcattggaatatggtgcttcctgtgaagatatagctcgagtctgccatgcgcatccgaccttatcagaggcttttagagaagcaaacttggctgcagcttttggaaaaccaatcaacttttaattagaagattgtttttcttaaaatctggaagcttttgtcaacattacatttttgaacaggataatcttccagttccaagaatttgcaggatgaaattatgaaacttctgggagatctttagtaggtttgaacagaatggaataaccatgtacctatatttcacgtatcttgttccagtgcattaatgcaaacagaaaactacatatagaagaatcctggaaagttttgacctgttttcatactgtctacgagattcaacttcactgaattagcactaatagattttacctctaatttagtggaggtgaatctgttgacaggaaggagctggaaaatatgtgtgaacaacttgaagaagactggcaaacttactttaaatttggttttcatattggaaacgagtcaatgactagaacaagattcaaatatgtacaaacaacttatgtaaataaaaatgattttctctca

SEQ ID NO: 589788 - DNA, 1025 bp, Homo sapiens
gctctctgtgtgtgctggcaggacatgtggcgccatcccggagtactcctggtgccgagctcttccccgatacactgggacctagacctctggagggtgactccgtaagtccaccagacccagatggtgcctcagactacctcctccactttgctggttcctgtgcctaacctcgagcaggtcaggtccccatggtgccaggcacgagcgggggtccagggtcccatggatggaaggatgccttccaatggatgatcttcccgtgtctcccgcgaacacccttatgggatgccatatctatggggcactctggccgtgctgaccctgcagctaggcaaggcagatccacttccagtggcatccctgtcagcagggacctcagtcgggtagaacactgctcctggcacagtcccctgtgaccgtttcttctcatctacccttgtggctagccatgctcctcacgtgcgacaacagcatcctaccccagctccctgatggacacagtatcccaggcacagtggactcagggaagccaggcttggccaggaagaagcctcagctcagccccggaacttcgtcgacaaagctctttgaggaggagctcgtccatcagggaaccctctgaggaaggtccggttgatttttggttcctgattgccagtagtagcgatcgagtccgaggcaaaaccaggccagcctcagcccacgtggtgaaccaggaacaagataactcaagaaagtcttccccttgaggaggctgtgattccaattcagcaggctcttccagctcaagctgttccatcggttcacttgcctgggaacaggagaacctgcagagtgggaacaacacggcagcgctttctcacttccagaaagcttgcagcccgagggtacaagacaagcgcagacaatgcgggctttgtgtccatgagctggcagagtgacccaaggaaattagcagcgggactaaatataggatggtgccgcacggccaggctggtcgacccgtagcagggcctctaaga

SEQ ID NO: 589789 - DNA, 176 bp, Homo sapiens
ccaagtcggggcttcatcgcaacagcatgccgatgggggtcacacccatggcaactggggcgagggcgcggtgctgtccgaccaggacgcggtcgacgtggccgagtacttcacccacatgccgcggccggacttcccgcccaaggagaaggactggccggacggcaagaagccga

SEQ ID NO: 589790 - DNA, 365 bp, Homo sapiens
cgtcgacgagacgatttctgtcccgtcatggttacgcctgtagccagcaaagaaagatcctctttcgtgaaagccatgttcgcccaggactctgtatttcagcgtaagtcgtgcgccgtgcgttgttccttcgcgggtgtcgtagctttcttctcgtctaaccatgatccaatgaagggtcgggccggaggggtcttttttatcttttacttcgagaatgaaataatgcggttttgcgttttttgagtcgcgcaggaagttcttttttcgtgtttctgagtacatgctgtcttccttgccatgaccgtatcaatcgatatagccatggctttttgcttttctttaccagcgaacacggtcgacgc

SEQ ID NO: 589791 - DNA, 114 bp, Homo sapiens
atgatatcaggccgaaaatatgtggctgcgcgacccagtcatgtacggatccgccaccaagcccaccactccaccggtaccgagtggtgcatctaccccacgtatgactgggca

SEQ ID NO: 589792 - DNA, 297 bp, Homo sapiens
tacttttcacaggcagtgcttacatgctcaaggattctcctaacagcactgactgcattatccaaaatggataagactctgtaatgctcaccaacaggagactgggcagatatgcctaagcattcctattcgatgacacgtcatgcagccaccaaatcgagaggcagctctctatgtgagcttgttacaaaaataagtctgagacatattattatcacgaaaaacaggacacgtgcaggaggaacagcttgttcagcattagccccactttcatggtttccgaaaggtctgtctttg

SEQ ID NO: 589793 - DNA, 1040 bp, Homo sapiens
aggcacactcatcatcagcgctaagctcgcactgatttcctaccatgagtaggcctagaaataaacatgctagcttttattccagttctaaccgaaaaaaataacacccgtcgcttcgcgagcagtaagcgtgcgcatcaagatagtttcctcacggcgaagcaaccgcatccataatccttctaatagctatcctctgtcaacaatatactctccggacaatgaaccataagccgaagtactacgcaagtcatagtactgcagtgcattgagagtagattccagtaactgtgctagtaggcaagtatacaacgtaggaataggcccccgtttcacgttctgagtcccagaggttacccaaggcagcgccctctgtagcgatccggtcctgccttcttgctgcacatgacaaataactagccccgcatctcaatcatataccaaatctgctcccatcactaaagcgtaagccttctcctcacgtctctcaatcttatccgatcatagcaggcagtagaggtggattaagagccaaatccaactacgcaaaatcttagcatactcctcaattacccacataggatgaataatagcagttctagcgtacaatcctgaacataagcattcttaatttaactattcatattatcctaactagtacggattcctactactcaacttaactccaggcacacgaccctactaatatctcgcacgtggaacaagctacatgaactcacgacctttaattccgtcaaccttcttcccaagagagctggcccattaacgcggtattgcccacggggccattaggcgaatctcgcaacactacgtccttatccacaatatatttacaactataccccttacacccattatcagagcacgatatcatccccatataaccccttatatcgcacacatcatgagcgccacacaacacccacaccacaactcagcccacctcctcacgctcatcacaacacaccacaaaaacatacgacatcaattgataacatggatatatattattacgataa

SEQ ID NO: 589794 - DNA, 596 bp, Homo sapiens
gacgtagatttcagcatcaaccagaccaaggattactagaggacaataacatcagataaatgagtgataagggtccatcagaggattgctcagcaatgtgagcataaaggacaaatgtctccactcctaccccaccgaaacatggcagagtgggtgcccatgcccctgggctgaatctatgcagtcccaggagaatatataactcaataatctatgcagtcccaggagaatatataactcaatcgttgagataatcactgtaggctcccacagtctgacttcctagcatattcaaatactatacctcattccgcttggtctgtgcttagagaggtaagacttctgagccagacttggcttcctctgaggattggcaacatcctaccggttcccccagcatgtctgggtgagagctccttctcaggttaaattaacaacctgattggcaacttaagcatcatctatgaggttggtgtatatgcaactccaatcctgaaacaggagattctcactcccataacaccattgagttctaaggtattagtctcaaggccagacatttgagactttccttgccccttctccactatgagacg

SEQ ID NO: 589795 - DNA, 197 bp, Homo sapiens
gaagccgcgggcgatctcgcggatccgggcctccagcgcccgcaggttatgcggcagcagcgagccttgagtgatcttgcggtaggcgaaatggtccgggttatccatctgcaccaacgagcggacgaggagaggggatccgcccatcatctcgcgcaccttgcggtcggccttgatcgtggtcagcaccgtggcgc

SEQ ID NO: 589796 - DNA, 405 bp, Homo sapiens
cgtgtctgataaaatataccctgaccgaagtgtagctgttacaaacaaaaccacaggaaggtccaaaactgtgtgatcatacttcatctctccttaacgttcgtcgaagcatgtctctgatcaacgggtgtgtagggattaataacaagtgtctactactgactacgcatagtaatttgaagcagatgtccttgacccgattggtacgcttgagcatacatgattctctccatgtttgccagaccatcctgtatggattgccaccaaatgcacacggaagattctgataggcgcttgagacaccacagtcttatcaatcttgtccttaaggggcttactctttcatccaatacagcagaggttcaaattctatctaatatgaaccacggactctcaggggatcca

SEQ ID NO: 589797 - DNA, 392 bp, Homo sapiens
  misc_feature (84)..(84): n is a, c, g, or t
  misc_feature (116)..(116): n is a, c, g, or t
  misc_feature (150)..(150): n is a, c, g, or t
  misc_feature (187)..(187): n is a, c, g, or t
  misc_feature (228)..(228): n is a, c, g, or t
  misc_feature (383)..(383): n is a, c, g, or t
cctaccaagggaccccctggaaataccaagccccccgataacctccaaggatccatacccacgggaccaagaaccttccaaaantttaatgaacaggctgataccctccatgaaantccaagacaaagaagaaaaatacctcaatgttantggacctaaataatcaaaaggataatgatttcataantttcctatttgaaaatgtgcctgaatcttggaatgtttcantctccagatttatgaacattttttcttgagcaattggtaaagtatacttttgtaaacaaaaattgaaacatttccttttgctctctatctgagtgccccagaattgggaatctattcatgagtattcatatgtttatggtaataaagctattttntacaagttc

SEQ ID NO: 589798 - DNA, 936 bp, Homo sapiens
tgtatccagtgacgcaattgcaagaagctccataggttgaacgcatggctctctcgggtaggggatgtgagattcgtacttctcgtgaaaagtagtgtcccctacctctgatgtagcaactcaatgctcatatcaccttttaaatgctgtttctggtgaagacgctgagtgacttgcacggagagaagttccaactgcatgaagcactttagcttagaacagatggactctgtccagggcttggtagcttaaatgcccgatggatccttggaggtaagggccctagggcactggtgaccaatcgactggtcgaaggccgaggaacatctccatgctgtcctcatgaatctggtctgctgctccttcagatgtaggatatgtcctcctaaggccccctgaaagaataccgaaactgcctctaggaccattatcttcgacggcccagggtggtactccgctttggacgcgaaggtgttatgcactggtttcgttgggggacaccttctattggatgcacccctgtgtatacgaccaaaatcatattctgtgaggacgcctgcatagattatttccaacgctagtggacttgaacaaagccccacggaaggggatgtaccaaccaactcgaaaaaggtacgtcgatgtagtacctttagtaaaggaatccttacaatcggatcggtgacggtccaacggttactttccctatgaacaaccaaatactctggcaccctttgggaggcgcgaccgtgatttcctcaacggacactctggtttgcggaggcttcgccggcgtacaaacctaagagatagctcacgatggggaacaccgatcggggactcgcatactgcacgggccatggattggaccacgcttatggttggagccaactaaggcattattgcaacacgacgtgggtggaacccacctcacaa

SEQ ID NO: 589799 - DNA, 120 bp, Homo sapiens
accgaggtgcactggaaaacaaccagctctggagaaactgctgccacatatcctgggggaatgtgggctttgttgtatcaccacaggaggcactcactgacgatcagtggacatgttgct

SEQ ID NO: 589800 - DNA, 723 bp, Homo sapiens
  misc_feature (541)..(541): n is a, c, g, or t
  misc_feature (604)..(605): n is a, c, g, or t
  misc_feature (621)..(621): n is a, c, g, or t
  misc_feature (634)..(634): n is a, c, g, or t
  misc_feature (652)..(652): n is a, c, g, or t
  misc_feature (654)..(654): n is a, c, g, or t
agcgtggcagggcagggagctggcaccggggttggagaggccttgggcagacgcagcccctccaccatggcagggagctggcctcaggcagcaaggcactgcgggtgccccagagacacagacaggctgcgtcaggctgaaccccagaccagctgagccaggtggcaaatcccatgtccgctccagacagccctggggctctgaatctgcacttgggagcgtgcaattgtctcctccaagactctggtggaggggatttgaaataatcccagctcagggagggtggggcttagggacagggcccagggagggtccaagggcaccacggggggttttgccacctgagcccagggatcaggcagggcttggccagcgctgagcaccctaagtgcctggcacgggctgagactcaggggccggctgtgcctctcctgaagccgtccctgttggcgggcaggcgggtggggcaggctgggggctgggcgcggctctcatatcttccccgttacttcatccattttgttcccactgatcccttgtntatctcactgggaaggcagccgcggtggaagacggggccaagggaaaggcagagcctgggtcnnctccagcctcactcgncctcctccctcanctggtccctgagctgagnancagggcccggcctgagaacctccaaggcagcacccagaggccgggtctgcaccgtgcctgacactgacg

SEQ ID NO: 589801 - DNA, 239 bp, Homo sapiens
tatggtcaacgccgtcagtgacttccttacccctcagaacctggacgccgagcctggcgcggggattctcaccctcaatctggccacgactcgacgccgcaaaggcatgttctcgtggggatgggattttgctccccgtatcccctcgatcggcttgacgggtccggtggagttaacccgtcgttcaccgatcgaggtgagccatcacgtcgacacgatggccatcggtgacggcgaca

SEQ ID NO: 589802 - DNA, 132 bp, Homo sapiens
gtctctcttcatcacaatgctatcacgagatttgtggacgtttcaccattagcttcttttgcacgcaccaggtcagcttcatctgtatctttccatttcattaggaacattacatcaacacaggaatctata

SEQ ID NO: 589803 - DNA, 543 bp, Homo sapiens
  misc_feature (20)..(20): n is a, c, g, or t
  misc_feature (98)..(99): n is a, c, g, or t
  misc_feature (379)..(379): n is a, c, g, or t
  misc_feature (387)..(387): n is a, c, g, or t
  misc_feature (431)..(431): n is a, c, g, or t
  misc_feature (436)..(436): n is a, c, g, or t
  misc_feature (467)..(467): n is a, c, g, or t
  misc_feature (479)..(479): n is a, c, g, or t
  misc_feature (531)..(531): n is a, c, g, or t
gtcagtagcgcggcggccgngcccgcaaatggtgctaccctggttgctgctcgagactgcgcgcaggggtcctcgggtccgcggaggctgcgctctgnnaatgaaaatgacagatgaaaatagaaaagtgtggctggtctgaaggtttgacgtcaataaagggaaactgccacaatttttatactgctatttctaaagatgtcacttataaggaacttaaaaacctgttgaattctaaaaatattatgttaattgatgttagagagatatgggaaattctggagtatcaaaaaatccctgagtctatcaatgtaccattggatgaagtaggtgaagctctacagatgaatccaagagacttcaaagagaagtacaatgnagtaaaancatccaaatctgacagctagtgttttcttaattagccggagtgngaaancaagaaggccctggacacagcaatatctctnggctttcacagngataatagccggccaagcgtggtggctcaccctggtaatcccagcactttgngaaggcccaggc

SEQ ID NO: 589804 - DNA, 229 bp, Homo sapiens
  misc_feature (51)..(51): n is a, c, g, or t
ctggcatttctccagatggagctgagagcttgtaaggaccatgggattctnctgtttgaaggactgtaggcatttgtggtggcaatgggggttggtggtgatattctgcttacctttttcccatgatggaaagttccctccgacgccaggcagatctgatccaggtcggggagatggggttatagaggctatgtgcttccatgctgccctcctgtcattacagatgcat

SEQ ID NO: 589805 - DNA, 110 bp, Homo sapiens
cgtgactcttgaggatcccgacgtaggccactgaagaattacggaatcgattgctattcaatcactgaaaaacggaactcaatttatgacgcacagaatatctctgaaag

SEQ ID NO: 589806 - DNA, 910 bp, Homo sapiens
gtgaagttcgaccttgatgaaagtatgccagaggacatcccaaagcaaagttggtctagcggattgccactgatgattccaaagcagtctgtcgtctcactgtgaaattcggtgccacgctcagaatcagcaggctccttttggaacgggcgaaagagcgtaaagtagtcgatgctgtaggtgtcagctatccatgtaaggaaacgcggctgtaccgagtcctggagaccttcgtgcaggcaatctctgatgcccgctgtgtcatctagacatggggactgagcgtcgcatctcagcatgtatctgcttgatattgccggtggcattacctggaagtctgagagactgtgacaatcgttaacactttgaagagatcaccggcgtaatcgagcccagcgtaggacaaatactttccgtcagactcgtggcaacgtgagaatcatagctgagcccggcagatactatgttgcatcagctttcacgctgtgcagttaactatcattgccaagaaaattgtattaaaggaacagacgggctcgtgatgacgaagatgagtcgagtgagcagaccctttatgtattaatgtgaactgatggcgtctatggatcattttaattgcatactcttatgagccacggcacatgttgcaacgcccccttctagcaaaagacgaacctaaaccagaatgagcacgcattaattccatcccagcacaatgccggaccacaatgtggatggccaccaaccggagaaatcgtgaaccccgggacacgccggaaatgccaactgtgacaaaggcgcgcccttgagccatgaggctaacacgtgtcggcgccaccacaccacagggcccagaggcgaacaaatataggcgcacaacgcggagaccacagcagacaagagacgccat

SEQ ID NO: 589807 - DNA, 710 bp, Homo sapiens
actaagggatcactgcagttcaatcaaactggaaaatagagaaccgattgctccgtatgtagcctctgtctgaaccatgaccccataggtctaaggagaaagcacataggataaatgtttacgcttgctcgtggtgcacccagatccatttttgtttttgagtctggctatttcgtgtggatgaagatataccgcagtcagcaggtaatggctggatttgggcgcccccatttgtttcttctgcttccctaaaaaatttttcatatttgtccaggtatggtggtcgttcaggtagtaggtaataatgtgttgaactaaccttcttcccattttcaataatgggcagaatgcaaggaaccttactggcagatccttcgctgttctgtctttgcagtgctttgctgctgacatacttgggatcaggggcaaagctctgtgtcgggggcatgaccccattgaggtaagacggaaggcttttgggactcggtgtgcgcgagttactcggtgacaaaggttctcttggcggtactttgggaggcctgtcttcatcactataggtgctcgaagtaacttctgctgaccatcttctataatctggctttactgctctaagaggtatggaactctgggggaactcaggtttgcttatcggagtaggaaagctcgtgtatccacagtgatccttatgggtacgagtcgatcgacgacgg

SEQ ID NO: 589808 - DNA, 172 bp, Homo sapiens
  misc_feature (61)..(62): n is a, c, g, or t
tactggctcagcatctcccactcagctccgagcagctggacacagcacattcacacgctgnncactttaaacattttttgtagagacaggtctcactatgttgctaggctgtcttgatctcctggctcaagcgatctcctagcttggctcccaaaacactgcgatacaggca

SEQ ID NO: 589809 - DNA, 261 bp, Homo sapiens
gtgaggtgtggcaggtgtataaactgagtcataggcttcagaggatatgtaaaaccccagaaacggaatgcaaaaaaaaaaacgttggtgggtgtcttcccaattgggtttatttggagggaaggatcccaaatttcccccaaaaaaaaaatttttttaggttgccactgtgcccaaccaaaggttggggacccctaccttttaccggcgggtttttccataaaagcatgggtaatctcgggcattgtaagcaaaaaccat

SEQ ID NO: 589810 - DNA, 264 bp, Homo sapiens
  misc_feature (5)..(5): n is a, c, g, or t
ccttnagaaaattccagttgtttttttccccccggcatcctgcctgaaaagggccggggagggttttaaaaaaggggggcattgggttccacaccatcggcagccgattccgtgttttgatcccgggggggagggacccggggggtccctgggtggggcccatgggtgagaccctccagtattgagccctaaggtccaaaggtttgtgggagccaagtggggttttaagtattttcttaaaacaaaagaatccggttttcccca

SEQ ID NO: 589811 - DNA, 1302 bp, Homo sapiens
  misc_feature (766)..(766): n is a, c, g, or t
taatcttatgaacagtggctgtgagactgaatgccatttgtccaggcttagctctaacacagcccatccttgaatcacattgacaacacgaagaaaacatgggacacctctatagcaactatacaggatcatatcaaggatatgacttaacatactatggcaatctttggacccaccattgcattgccaatggacttgattaacactcacttgaagcatgactgcatcttacacactggctgctcattactgcaccgatcacaacgttctaagggcaacttcacttcttcaaagcactatgcatacacacgtcgcagtctccacatgcaccaaaagccgcaactggaaccatgcgtctactgctgctatagacaccatacgctgacaacactaacgccacacacactcagctctactagtctcagcagtccagtaagtcatatcgactgtatagacaacgatattaaggccttattatcaacaaaatggcagaaactcagctatacaccaaggctccacggaacacgcttgcacgcccccctctgcgaccaggccacccatatgcggctgggacttacaacaccccggctcgtcagcaccttagcacacttctcccacaacggcttgccacacctgagtgacttacactcgccgcagcttccaccgcaaccagggcctctcaccctggacacacgctttaatctgtcacgcacacaccactgggcatggcaccatgggccgtgtgtaacccccacacaaaaggagngccaataacccggcctcccagggatcacaacctccatacgtggcaacctacgggcatcccctctaccacatcaacaaccccgggaaactcccaaaacaacaccgcacaaacccacacgggaagcctccctcctccaaacacggcggcaccaactaacccatccacacagcatagaaatatcgaccccatgggccacaacaacgcacccaaaacgaacacacccacgcccctgggcaccatactctgctcgacatccaccgacaacccttgggaatcgactccactcccccgaacttcacacaccagccaacatctccaacacaggcaggacccccgtcaccgccacgagcaacaaaacccgaccttcgcacaatcagccgacacgcaacgagggctgacagagccaacatctaccacccctgggccgacacctccgcggccgcaacaccttacacacgcaccctgccgaccacacaccacagacgaaacgtagccacacacaacaaaccgaccctcgcagcaccacgatcagccaa

SEQ ID NO: 589812 - DNA, 103 bp, Homo sapiens
gccgactcaccagacgcctcaagcgcctttacatcaatcgcccagatcactcgagacgtaaataatggctgaatcatccgctaccttcacgccagatggggcc

SEQ ID NO: 589813 - DNA, 325 bp, Homo sapiens
actctagaggatcgcgctgatcgcttaggtccagaagaatgaaggaacatcagcagcctgttcagaaggtggtttgaaagacttcatttgctgtagtttggattaactccccttccggcttaccccattccaaactggatttataattttgggactgaggatcatttgtttgttaatgtactgtgcctttaactttagacaactttttattttgatgtcctgttggctcagtaatgctcaagatatccattgttttggacaaataaatttactgaacttgggctaaaatccaaccttgggcacacaggtgtgatacaacttaagc

SEQ ID NO: 589814 - DNA, 282 bp, Homo sapiens
gagcagagatcatgccacatggacaccagcctgagctacagagtgaggctccgactcacaacaaacaaatcaatcataaacactggcaacattggaaggactacttgacactgctggaaggactgtaaaatgacgcagctgatggaaaacagtatgatgatttctcaaaaacccaacccacaagacatgaaagcagagactcaagctgtcatttgtacacccatgttcatagcagcattgttcaaaatagccagaaggtggaagctacccaagggtccatca

SEQ ID NO: 589815 - DNA, 464 bp, Homo sapiens
cgtgcacttatgaatttgcggaataagatccacatctgatacaacaaactataatcagataatttgggtggggagtgttacaaaggaggaggggaaacaattacagcacaaatcatgttgataagagtaaagctgaaatattttagacaagcttaagcaatcactgtcagtgaaccagagttcatcagaaagacctgtaaaattgtggttcccaaaaggcactttcattttgataccagcttcacagtcactggtttcactaacacctgatgcttttcctagtaataattcaaaggctttcagagttaaaaattcccataccagggactggtgacttgaggggaattttaccatgtaaataataactataaaattaagtctcactgcagcttgaactttggaaggatttttttgttttgttttaaataacagaagcaacgacaagagaaacaacaacagcaaca

SEQ ID NO: 589816 - DNA, 318 bp, Homo sapiens
cgaggcggtggtggggcacgaggcagtggtgggcagaggcagtggtggggcacagcaggatctcaacgggaaagcagccagaggggttgtggtggcctgaaccccgtgctcccttgctccatgtaatccgcacctacccctgtaatgatagggattcccgttggaaaacaggtctcacccgctggtagccatctgccgcttcccatggacgagccagtcctgacacttactctccagcgtgggtttgaaggggctgcccttcgctttgtgtgacttgtcctaatcctagccagatgtgttgccccaccagtgcctcgg

SEQ ID NO: 589817 - DNA, 178 bp, Homo sapiens
  misc_feature (47)..(47): n is a, c, g, or t
gtcgctcaaggatccccagataattgtagaaaagtatcagagattancttaatctgctaatgcgattttgctgatctgggtagactgtagcctgtgtacagatgagctgctgtgctggcagttccgcagccagcaaaccttttatctttttttttttttctagaacggagtctcgctc

SEQ ID NO: 589818 - DNA, 175 bp, Homo sapiens
aacgatggtcctcagcgtggtagaggctgaggcaggagaattgcttgaacccaggggatgaagttgcagtgagccgagatcacgccagtgtactccagcctgggtgacagagcgagactccgtctagaaaaaatatagggactggatgctgaaatccgcaccaaactcttccaag

SEQ ID NO: 589819 - DNA, 147 bp, Homo sapiens
atttccctatgtcataatataatctttaaaaacatgattgtactgactggataatcatcccctgtactataatttgtaaaccatttcctgattgaagaacatttaggttttgtgttttttttgctataataaatactgtagcaatga

SEQ ID NO: 589820 - DNA, 1198 bp, Homo sapiens
  misc_feature (775)..(775): n is a, c, g, or t
  misc_feature (1198)..(1198): n is a, c, g, or t
gatccaggccctggggagagctggccacggacaacatcattctgaccgtgccgaccgcaaatcttcgtactctggagaaccctgagccgctgctccgccctctgggactgcacggctgactgcaggctgtggcgcgacctgggagctgagccctatccctttttgcgcccttgcctcagacgcgacttgctctgcccgacgctgcagactctcacgtgggctggatgcactgcacgggatacccccactccactgctgccccatcctggcagctccagctgcacggagcctcatcgaacgcaagcaagcctccatttccacggacacctacaccccccccgaaacacaaccacgcggacaagccaacgtcccattgcgattgccgcagcgaacccaccaggtcttcgccacattgcaccgccctggagcgacacagcaaaaacccaacgcaggccgagcccacgcgacgctgcgcgacgattacccccacacaacaaacaacgcagcccagaccggccaacaccttgccctaaaccccccctctgctgccgcgcttgggttcggcatcggatcacttcgggtcgacccaatttgcaaaggcaaccgccgacctcccctctagccacgctccactttacgccaccagtcccagagcacagcggcaccccacgcctacgcccccaaacaaattacaaattccaggcgctctccccttcgggcctccgcctcgcacccccccccccccaccccaagaacgacttatcccgcgaggcgncaacggcaacgacgcaaacaggcaaggccttcccacggcaacatagcttcccgttaagccccctttggcaaaccgccccaccacacgcgcggtgacaaacgacacctttacacccccccccgaacagagtctcgcagctagctcacaccctaaccaattcaccacatcgacctcgcacaacactttcgcccccccattggcgcgccaaacccccccgaccagcaaacacactgcccccacaccaataccccccgacttacacattcttatccacacacctaaatgcacctgtctccccacccagctcgccccaaatcacactccacccataaatcatagcaccactcactagctcacacaccacagcccccccccgtcatatcccacccaaactatcccaccgcgccatcctcacgtttcacn

SEQ ID NO: 589821 - DNA, 508 bp, Homo sapiens
  misc_feature (336)..(336): n is a, c, g, or t
  misc_feature (351)..(351): n is a, c, g, or t
  misc_feature (359)..(359): n is a, c, g, or t
  misc_feature (383)..(383): n is a, c, g, or t
  misc_feature (417)..(417): n is a, c, g, or t
  misc_feature (421)..(421): n is a, c, g, or t
  misc_feature (425)..(425): n is a, c, g, or t
  misc_feature (429)..(429): n is a, c, g, or t
  misc_feature (469)..(469): n is a, c, g, or t
gggaatgtgcaagttgtgttgcaccctaacctaagccatgacccctggcatgccaggcaaagtgggaggttctctgctcccagggcctgtccggggactgaccccttcatacccaaagggcaatctcccggcagggttttatgccctgtccaagcgtaaacccttttggaacttctttttggggcaattttcctgtggccttcctggcctttacttccatgtgggcagccccccagacgttgttgagcaactcgccagcctcctgagctccatgcccatcaggactttagcctttgaccttgctgttgactttgaaatcaggatttggaagttttngaattaggagtaaanagatttgncctcttgccaggaatgcccatggntcatgtgattggcttttttacccataaagggccntgcncctnatancccctgggagtgagggtcccaaaggagaccttggctcccncaggtccccaataaacctgtttttttatcaaaaaaaaaa

SEQ ID NO: 589822 - DNA, 143 bp, Homo sapiens
ggtgagcttgcagtaatgtagggttaggcgtacggcgaggctattggttgaatgagtaggctgatggtttcgataataactagtatggggatattggtgagccttgcggtaagaagtgggctagggcatttttaatcttagag

SEQ ID NO: 589823 - DNA, 334 bp, Homo sapiens
gggccttttgatgtgaacagatgttttttaggccaaactataagggctaattttaaacttcaaccattccccttttggaatttgttttaaattgttttatgtatagtaagcccaactgtaatctagttttaagagaaaccgggggcttcctttaggtccatttggatttccccgggtactggaaaaggctgtttattaattgtttccagtttgttgcaacagccattttcttgggagaaagcttgagggtaaagccctttgtaaaaggctttgccatactcattttaatatgggccgggtgctgttaacttttgatgaataaaaacctttcttt

SEQ ID NO: 589824 - DNA, 520 bp, Homo sapiens
caaaaaccagtggtcccttattaaatccagggttagggggaaatatttttgaaaaccatacttcccgggaaatatggaaaccggccggtaattaacttatttggattttaaaaggtgaacccacccttaaatcccgggaaaaattccccttggccaatgaataaaaaccctttttatgggtggcggaatcaagttggcaaaaattttggtaaaggattttggggttggaataaaaaggaaatatgggctaaaagtttcttggggaggccaagccaagatccagggaaatcctgcccaaaagaaagtgggaaagggtccttccttccctacctttaaaaaccaggggcgaaaaattaagggtaaatttaaaggttggcaaaaattaacaaagcgccccttttgggccgtggatttcttttgggaaattttaaaaatcactaatccagtattttcctttgaaatgccaatggatttttaacccaccttttaggtgggcccaagaaagaaggttttttctccg

SEQ ID NO: 589825 - DNA, 153 bp, Homo sapiens
ggttcaagcctctcttcagcttgaatttccttgcacttaagtaacgtgatgctgtgcctgttttccatgggttcaggacctgtggggaaagccaggactgtcctcctcatacaaaatcactgtggggctgggtgaaagggtcttaattctata

SEQ ID NO: 589826 - DNA, 140 bp, Homo sapiens
gtcgctctagcggatcctccctggtggtgatggtggtgatcaccaaaaaaaatcacttggctaaaaaaaaacagtattaaaaacgagttggctgagaaacaattggcaaaataaagggaatttaggcactcccacacccc

SEQ ID NO: 589827 - DNA, 811 bp, Homo sapiens
gcccatcctaaactggacacaccatggaaagagatttgttcacgggaagagaagcagaagccccaggctgagcggaaggaggagaaaaaggcggctgcccctgtctcctgaggcaggagatggttttaatgtgagcagcgcgcatggcatgctgtagcccaagagccaatggacccgcttcggctcaccatgcccattttttaccgtctgtagttgcgatgaattctacagcgcaagatactccaaatgagtgacacacatctactgtgagcacatgaccatatatcctgggacgcacattatgactaacggcacgcgctggatcccatagtggtacctcaggagatatcagctatcccatgacagaacctcagctcagcaccattcactgagactgcaactctcgatcacatggcacatgttccgagcgtactggcacaacgctgcaggacagaaatgccattcggccacgtgtcgatcactttagtaggaaaccaaaccaacttagcaggctaccgatattctcggacgtctaggcgtcgttccagaggaccagcgagcattgcactatatccagctgatgtccagcatactggcaggctggaactaacgagctccatcacagcattggcggtacaactgcgatcctgagcagacgacggagagcccagaatcgctgcgttcggagacgtacgtttatccatgcggcaggggagcctatccacgcgatgctcgggcaaatgccttcaactcaagggccaaagatcgttcaagttgaacactctctttgccatcaacctaagcttgacct

SEQ ID NO: 589828 - DNA, 111 bp, Homo sapiens
atttgtgatgtaatagtacgtgtgggagcttcaatattccacagtcgattgtacaatgagtagatgctatgtttgggaagaaacttttcaacttgaatttgccttaatgaa

SEQ ID NO: 589829 - DNA, 412 bp, Homo sapiens
ggatacataagggaacatggatcatctctcttcatagactacgtgtcaattatagtatacatgagtacttagaattaagaaaatggacccctttaccaacaatacccacttcctacatgcttctccccaagacggtcgtgaagactccgaaattctttttatcttaggaacacagaatactagctgaaaaaagataacattactgagtcagttgattagggcagactggcccaggacttccactgtgaggagacacttacctctgctgggcaccatatatatatactgaatgaagcagttggatgatgaacatagggatgtacccccaattcttgggcatgactcacagttcctagcaaagattcacggtccccaggtccaccggtactcaagagcagagggctgacatggc

SEQ ID NO: 589830 - DNA, 335 bp, Homo sapiens
  misc_feature (82)..(82): n is a, c, g, or t
  misc_feature (226)..(226): n is a, c, g, or t
tagaaattctatttgccatatagatggccctcaggagcctctcacgcatgtcattccttatgatggaccactaggggatttncaattgggaaagccaacctttcttttagtaagggctcccataatatattgggggtgtccttgatgaaggagggggagtcccgggccaaaggtttatatagtaatgggggtgcccccttgggcggtttcttgaattccccatctnagttctttaaaggtccccctcaatggatttacgatggctcccatgtaaccttttggcgaattcaaaatcgttataggcatcatctgcagaacgcttaaggcgatgacca

SEQ ID NO: 589831 - DNA, 121 bp, Homo sapiens
gtagactctagagatcccctgcaaggttttgcgaccctcaagctcgaagtacgccgcagatcacgccggagaaaatcatcctcgaggtgacatcaacgaggccagccgggcgagaaccacc

SEQ ID NO: 589832 - DNA, 1562 bp, Homo sapiens
  misc_feature (37)..(37): n is a, c, g, or t
ggaacgaactcgtcggtcgtagatgatcgctgtgttncgtaggtcggaattatttgcctgcgtgtctacttagaccatcgccccgtacgaatggtggtgtttcttccctccgccaacagtatgttgtaggtaacgtcccccacccttgtggtggtgagacactgtgtgtagaaccgccgacacataaagtggggtgaaatacaagcttcgtcaaaagaagtggggttttgttttcgcccctgtgcttgggtaacacccaataagggattatttactcctgggggggtatatataagtgtacgtgtgactccccaaagaggattttttgtgccgtatactttcgggtcgttataatgggtggaaacaaaccaacgggggcctcccgtgtttgttgtgctggcccccaatacgcggagagatgtgtacactccttctgtgacaacaggttggtacatgggcgtttttccaacagtgaaacccccttttgtaagtatatagggttgcacacatatatggtctttgtatataggaatgttgtgaattgacataagtggctaatagtaatagggggggacacataacaatggggttggtttccaaaatgttccccctagcatagggatatggtgttcaaaaagattgttggaaagagctcccctctaaaattcgccgccgttgttcgaaagaaactactttgggcacaaactcgcccatcacttcttcgtgttgtgggataaggatttgtgatcgacatgagccgttgttgcaaaaaaggcgccacagggatttttgtagctcgcgatcttagtacggggccacacaattatctacggcagagcagaagttttcccgggagcaacaaaaggagtcgtgggaatatgggcactattttggattgccaacagctggggctcctttggaaaatagagaggagaaaatctctacgctcttctgtttctggtgagatacagggtgtaagacaaaactctttggggaaccattcccgacaccacgaggatagagagtgtctggggtgagagaaaaaggttctggacatagccctctattggatgcgagcacacaaggtgtgtgtatcccaggtaactcgcacaagtgtaggcccacaggcacacgggtagggatatagccctgggggggatatatgtcctctgggtggggtagagaagatctactctctcccttctggttggtgtctgtcactcagggactccacccattttgaaagagggcttgattgtagaacccctcatcctcaagggtgtaagaatgtaaggcacttgtgttccacacacacacattttgaacacactcttgaaacggaacctaaatttcgctagcacaaattcatgtggcacgtcttttaaagaaagttaagctgagataatacgtaagcgtactgtggcaattctcaaatatcttgaaatatatggtaccatattgctccatggggacaaggaaataatctttgcactttataaaccctgtattgtaagtggaacatgctatgtctttaataaaactatattaaaattggcaccata

SEQ ID NO: 589833 - DNA, 193 bp, Homo sapiens
tgctgcgacacgatcgatgcggcactgagcagacgcgagcgccacaacgcaccagacactcagagcaaggatcgagctgaaaacgtgacccactctgtcctgcagcgactgggaagcctagagaaggctgtgagcaaggaggcagggtcttcctttggcatgggatggggatgaagtaaggagagggactgga

SEQ ID NO: 589834 - DNA, 444 bp, Homo sapiens
gggtaatgcatctattcaagggaactggaaggataaattcatgaaagaagccacgacgaatgcaccattcagattgaataagaaagacagaaaaactgtgaaaatgatgtatcagaagaaaaatttgcatatggctacatcgaggaccttaagtgccgtgtgctggaactgccttaccaaggcgaggagctcagcatggtcatcctgctgccggatgacattgaggacgggtcaacgggccttaaggagatttaggaacaatttgactttggaaaagttgcatgagtggactaaacctgagaatctcgattttcaatgaagttattgtcaagctttgcccaggtcaaaccttggaggggagtacactctctacttccgacctaggccgctagggtgttccagggtctccttaccagtaggcaaggcttgttctctcttggctag

SEQ ID NO: 589835 - DNA, 547 bp, Homo sapiens
ggtccagagggttaatcagtgtgagacacaacatatatttagagataggaatagacgtagacacaagagacatatttcacatccgatagcataatcatcagtataccacaacggggtcaaagtatttagctgactcgaccacacgtacaaggaagcaatatgaaatgatctgatgacagtgcatctgagccctaggattacatctttacttttacaacgtaggtggcctgaatggcatggtatatagcaaaagtcatcactagacatcgtaatacaggacacgtactacgtggtaggctcacttacactatgtcctatcaataggagatgtataggacatcataggaggcttcattcaatgattataacgctattctcagggtaaacacatagagaaaagctacgccaaaaatccatataaaataatgatattcatcgagaggtaaatctaacttatgagtacaaaaagagttaatgagaatatccggaaggacacggaagataaatggaaataacacgaagaatagagcaaatgaacattgtatca

SEQ ID NO: 589836 - DNA, 367 bp, Homo sapiens
taagagacgtttgcaatgaaaagtacggagattggccgggcatggtggcggccacctgtagtaccaggtgctcgggtggctgaggcacgagaatcgcttgacgccaggaggcggaggttgcggtgagctgagattgcgccactgccctctagcctgggcgacagaagcgggattctgtctcgagaaaaaaaaaaaaaggaccggagagtctctcctcctcttattaaaggggtaaatataggcacgttgggaaaactcagcaggttatacaagatttcaacttctcttcatcctcagtatatccgtgtcatcagtgtaagaagccttctttaaggacagatttaacctaagctatggtttaattggc

SEQ ID NO: 589837 - DNA, 532 bp, Homo sapiens
  misc_feature (400)..(400): n is a, c, g, or t
cgggtgaccgtatttaccggtttcgcctgcatccagaatgctcatcactttgaagttcatctggccgatttccattgaacactcaagaagcgcgttcatatcggcaggccaggtccccagccacgccatgattttatggtactgggcataaatatcgttgtcgtattgaccgagaacatgcgcgtgttccatataggccgccgcacctttcaggccatacaggcacagcagacgcaggccgagaatgttttcgccaatcgccgctttatctttgttaggggtaaattctgctgcctgacgttgcagctcgccgagatcgtcgctcaccagttgcaggtcagccatcgggttatcgacgcgcgcgttggcatctacagccaggcattgcgctttcagcgcntcgcgcagggcaatcgcttcacgagcgtagcgaccaatacgcggagaatcgaagttaacgttggtcagggttgagaaaaaggcacgtggcgcgaagtgttcaacatcgtgggttgatgatgccgtattcacg

SEQ ID NO: 589838 - DNA, 274 bp, Homo sapiens
agtacgttgaccaccgtgcctgccccaacagacatttatttactaataattattactgttgctgtaaattctgtgccatacagcttatggttctcccatcccatgttgattgagacgaacggcagttcgagaatgtctctgaggaattgactttgaatggtgaaacctaagaatgaagggaggatctaagactgtcctaagtcgagcagatggcacaggtggaatgtcctgaggagggaaacactgtttgtatttagacgtagtccgtgaggag

SEQ ID NO: 589839 - DNA, 459 bp, Homo sapiens
  misc_feature (80)..(80): n is a, c, g, or t
  misc_feature (82)..(82): n is a, c, g, or t
  misc_feature (216)..(216): n is a, c, g, or t
  misc_feature (244)..(244): n is a, c, g, or t
  misc_feature (353)..(353): n is a, c, g, or t
caaaactggaccaactggcctcttcctttcccctgggaccaaaatttaggggcctcagtccctcaccgccaatgccctgncntattctgtctctccttcttccccctggcctgttctgtctctgagctctgtgtcctccgttcattccatggctgggagtcactgatgctgcctctgccttctgatgctggactggccttgcttctacaagtatgnttctcccacaagcttgtggctgcaaggnaacttaaattttataagggaagaagccctgttggaagcttgcttgcccccaagccaacaagctggcaacttgaacttgtgctcaaccacacaatctggggggcaagccnttcccttgggcaaggggcccttcggtggcttcctcaattttccaattccctttcactgtgggctaaggggtggggtgaggggatggagagggaggggctgcctaca

SEQ ID NO: 589840 - DNA, 236 bp, Homo sapiens
gcgtcgacgaggcaggagaatcgcttgaggccagcgtgtttgaaatgagcctgggcaacatagtgaggccaaaaaaccgaaataattagctgggcatggtagcatgtgcctgtagtcccagctacttgggaggctgaggcaggaggatggcttgagccctggaggctgaggctgcagtgagctgtgatcatgccactgtatgtactccaacctgactcaaaaaaaaaaagtcgacg

SEQ ID NO: 589841 - DNA, 210 bp, Homo sapiens
tgctgatacaatcagctctgtaccctcaggagtatattctcaaagggagtggtcagcagccctggccaggaaatgggttcaaggtgatcatatgaaaattgcccatcagttcttccagttggtgggaggatcagctagtgaatgtgatacaataccaggtaggcagtgcatggcttcctgtttcttcctgcttaagcaatatgatgatgt

SEQ ID NO: 589842 - DNA, 407 bp, Homo sapiens
  misc_feature (204)..(205): n is a, c, g, or t
  misc_feature (212)..(212): n is a, c, g, or t
  misc_feature (219)..(219): n is a, c, g, or t
  misc_feature (237)..(237): n is a, c, g, or t
  misc_feature (252)..(252): n is a, c, g, or t
  misc_feature (261)..(261): n is a, c, g, or t
  misc_feature (274)..(274): n is a, c, g, or t
  misc_feature (279)..(279): n is a, c, g, or t
aacattttagagtaattttaacacttttatcttgcccagaacataaaaaaatcttcattttcaatccttataactttgtgtgagggaaattaggcatcagggtgggaaacagaggtgacttttatttgtctaagtctaccaaattgctgaactagtaggtaaaactcccccttcctcttaactgagctgactgattttgcgcannattttcnctttcgngttcctccatttgggttncttcggttcccgggnattccaggngggattccttttnctaangcacaacctttggggtgtaggttaagagacatttttccctgtgtccccaccaccccttccacacatgtgcaggtctcccctgagtgcccagacagcgcaggaccacgcagtccactccctctgcccct

SEQ ID NO: 589843 - DNA, 423 bp, Homo sapiens
taggtggaaacagcgactgtaagagagacagaagtcctgacacagtgcactgcgcgctgcacacacacagacacacacacatgacgcacccaccccaacacacacacacacacacccatgacgaacacacacgtacagcagggaacaccctcccgcaggcagcccctgaagctgccgggttctgctctccgcgactgatagccaccggtgagagagccgcccacgggcacgcaggcggacctatgctctgtcatcacaagggctccacttttggggagactcgcccgcacacctgtccgcgcacgcctgagtgctgggatcccgcgctgtctcgccggcgatctgtctgaggtttcttccctcctggggtttcttcctgctgctggaccctccgcgaatcccggcctccggagaacgtcctgg

SEQ ID NO: 589844 - DNA, 939 bp, Homo sapiens
gctgagcgggccgccgggctccggggcttccccttgcctggcccgaagccgtggagatgagagacccgtcgagccccgagctctgtagatcttcccctgactcggaggccgctcagccgtacctctcgttcccgctcggagagctcccaccgtcagaagatcctagtagatagtccggtgccgaatccagaaaccccgcctgcccaccctagtttccgaaacctctccctcctgaaccactgaaagtccgttccccgatcatcggagtctcacacagagaatctgtcgcttcagggccaaagctctgagacttgcccgcagcaccctgtgcttggagctccgacacccgagactgcaactgacctccctcgccagctcggagccctcagtcccctccggggcttgagggcccttccatcccattctggactcgaagtacagtatccccatcagaatggtttggtggatttgagccctttgtcccatcccagagctcagagcctccatcctgcatggaggcccaatcctggggctctgaggattgggcagcctcccctcatctaagaatatatttcatacccctggctttaacaccgggttgttcggggtccttcactcttccttcgcgctcaggtgtctgcgggtggctcgtaaaccggaccatccgcggcgctaggggacctaccaggccctgtaggcggcagtgtgcaagcgcactaaacagcgattccaacaaggggtggtgagcccagaagaaatgccgctcgcaagcccaagcttcagacttcacccggattgcgtagaaatccgggccacagacttgatctagacccgcgaagatccgagcagagacaaaacggctgtcaacaacacacaccagaaacctccaccggcacacccacatcacagcgacgcctcctcgcacgcgaccctcaccag

SEQ ID NO: 589845 - DNA, 227 bp, Homo sapiens
aaaatatggtacattcgtgtatgacaggtcactccaccagcatccttatagtctgagtgcctaccatgcagaaagcagcaagtaaatacatgtgagggcaaggatcatgtctcacacatctttataacatttttggtaagacatggtgctgggatctaaaataggagtatacagtcatgcgtcacttaacgatgggaataccttctaggagatgcgtcataaaggta

SEQ ID NO: 589846 - DNA, 125 bp, Homo sapiens
cggttacatctctctatgaagccctcaggaatgtccactcctctctgcttacccctcctgtgtgacaccttgcacctctgcctggcccttcccagagcccacagagtaaaaatgttctggttctg

SEQ ID NO: 589847 - DNA, 322 bp, Homo sapiens
aaccccgttggtgctttgcagaaactggtggtgcaaaaaggctggcggttgccggagtacccagtgacccaggagtttgggccagccccccccaaaaaattccccatgacctgtcgagtggagcgtttcatttagattggtaactgggcaaaaaggggttttccccactcctctcccccagcactttggccccaaccaaggaccccaaagcctcagccagcccaggatccgtcctcttttttttggtgattatgaatgggaatgaaatcagggggctgtttactaaagcctggaataaatatgctgctttgtggttttttta

SEQ ID NO: 589848 - DNA, 154 bp, Homo sapiens
  misc_feature (80)..(80): n is a, c, g, or t
  misc_feature (83)..(83): n is a, c, g, or t
tcgggctggcggggcgtcctgagggtagagccaggagagggatgtttcgccattaagggggccaccacctctgtcatgtnctngctctggcgatctttttggactccagctgcttctggtgtttcagctctgctccgtgcttctggagagactc

SEQ ID NO: 589849 - DNA, 1049 bp, Homo sapiens
gcctgaagtgttctttggctgtttaacaacttatttgtatgagtgttttattaaacataacggctgctgtctttggtaacatagatgagggtggatttttaaatggcttcgtatcgacccctttctacaactaatggacgtagtctatgttgctccatataaattacagaatgaaaatagatggggcaaaagtttgactaaactttacctttttatagtttcactttttaagttatatttagaatatatcgatagattataaatcgattgtgaaacattttttctctgaattttttcaacagtgtctcacatcagttacatgagttacaaggatattctcagatcctgctatcttcaattgcagtctttaacaaaaaaccagcctatgtgtactactaggtatatatgtcatattcatacagtaaattcatttcaaggttttatgccagtgggtatactggagcttaaagaagttgaggtgaaccatccaggacaggtcttgtcaatgttatgctcactctactcatggactagggggcacatatatactatcttcactactcgtaacccattgtacctgcaataagcttacatcaccccctcgaaagccacactggttggaccagggggatgaagatatgggaattcaccaggtctaatggaccatatttgaagacagaggtgtgagctaatgtggacaggtacaaatgggacattgaagggaagaaagatatccggtaaagaattgctgcattatataacagtggcaataaagtgggatatcgacatagctgccgccaagccgggtctttaaacggccaccacaacgaccaccaagaacagagcgggacaccagacaccgggacacgacagagacacccttaggcccgaagaacaaggcaggaccaaacggcccaagcgacccatgatacaaaacggctccgacaacaacgcaacacacgggcgcgcgcacacaacaaggccgggcaaaaacaaaggaccaagagatcaaagcaacgccagtgccgatcacgaacaacgtgcatcga

SEQ ID NO: 589850 - DNA, 292 bp, Homo sapiens
tggccctgtatgcccttctatccccttagctgctggtgtgatcatagcctcaaattgctgggctcaagtgatcctcccacctcagcctcccaaagcacagggattacaagcgtgagccaccatgcccagcctgcaaaataattcttaaacttgaagaggtccctggcaaaaaaaggatgatttcatccataggtgacacagcaagaaggccctcaccagatgcagctcctcaatcttggacctcccagcctccagaagcatgagccaaataaatttctgttcattataaatt

SEQ ID NO: 589851 - DNA, 843 bp, Homo sapiens
  misc_feature (21)..(21): n is a, c, g, or t
  misc_feature (76)..(76): n is a, c, g, or t
  misc_feature (116)..(116): n is a, c, g, or t
  misc_feature (269)..(270): n is a, c, g, or t
  misc_feature (289)..(290): n is a, c, g, or t
  misc_feature (325)..(325): n is a, c, g, or t
  misc_feature (331)..(331): n is a, c, g, or t
  misc_feature (336)..(336): n is a, c, g, or t
  misc_feature (338)..(338): n is a, c, g, or t
  misc_feature (340)..(340): n is a, c, g, or t
  misc_feature (343)..(343): n is a, c, g, or t
  misc_feature (358)..(360): n is a, c, g, or t
  misc_feature (370)..(370): n is a, c, g, or t
  misc_feature (386)..(386): n is a, c, g, or t
  misc_feature (395)..(395): n is a, c, g, or t
ggcttcgtacatgagtaatanccatcataatcggaggcttgtgtaccttctaggtaacgaccagatctacaacgtnatcgtcacagcccatgctttggtaataatcttctacatantaatacccatcataatcggaggctctaggcaactgactacattccccgtaagtaatcggtgccctgcgatatggcgtcgccccgacataaacaacgtaagcttctgactgcttacctcccttctctctcgtagctgcctgctgcgcgatctgnntatagtggtaggtccgganncaggaatgaggttgaacagtctgaccctcccttancagggnaactnananagntggaaacaccaaaannnacaaaggganatataaaaacgagaantactcagantaacacttaaaagaagagcatgcgctggtgtcgtgtgattattgggcgtgagagagggcaatgagagactcgcggaacatgttccctttggcatacctgcccaatgcaggggaacttcttgcccacgctctctcgtgtctttttgtactgcaaacgtcgtgtgtaaaagcttctttgctagtagcccaccttaatgcgtgtggggacggaggaacgaaatacctatatacatctgggcgagcacaattccactataatataagggccctctggccatcctggcccacgttgccttggaaatctcttttctgctgaaccatttgcccctggcttcctattgagaaagctgctaaacaggttccgcaatttcaaaaccccagaccacggttattgcccaaacacttctgcacggggatcgcaagctcccaaaatgttctcccgacagaaa

SEQ ID NO: 589852 - DNA, 207 bp, Homo sapiens
tggtgatctagaggatcccgtatagagcataccctgggtcgaacatctcctttacttggagaagttgatcgtctgaagccttcttctctcaactcatcaaagccattctccatccagctttgttccattgctggcaaggagctgtgttcctttggaggaggagaggcgctcagatttttagaattctcagcttttgtgctctgtagt

SEQ ID NO: 589853 - DNA, 252 bp, Homo sapiens
tgcaggcttgatgattttggccccatggatgttcttctgcagtgaactgctgcactcaccatcttctcctgtttcttcttggtcccatgtagaaggttgtcatgcttctcactaaatctgggtgtcctgctgatcttcctggctaaaagttagggatcatcaagtggccagagatatccacaagcactacccaacgggcatagcatcgccatcctgctccccaggtgctctgtaacaggtgcatccgaaaga

SEQ ID NO: 589854 - DNA, 808 bp, Homo sapiens
agcgaagggtttcagcggccgaagcagagcctttttaaatagttcccaatgggcgctcacggccaaacgtgaacacctcccctcctcacctgtcacctcctgaactttacagggttgcgagggggagtgtgggatctgggtgtcgcctagccgtggtcgtactgtccgggtgtgtctgagagcccccgtctgtcatccctgtctgtctttccgggcctttactttactgtcttaacacaaccagccccagccactgggtgccgggggtggtgtgactgtgccttcaaatcgtgcctgggtactgacccacgtgctgggggagaaatggagggcaagagacaaacaaagtactcctgctcacttctgcctggtagctgggtgcagcaggtatagggggagggactggggtcttcagtacgtcgtacgaggaaggaagtcttgacgggaagaaccatattctacgaaatcaatgctctaacacagggctccggaaaacaatgctgcctgctggggtatcctaccttccaggggccctaaagcagtttgatacattcctagataccctacaggagtttccctgggtcacggagaaagctgaagaagagcgaggggaaagagggcactgagcgagctgtctgcaggtgacagattgactggggatcccctcgcgacatcctcaaaagtcccccatcagaccggggagattaaacacgctggtgccacaggctgggccctgagtgggagcccctggtgctgtctctgggactgtgcccgacggatattaccgctgtaaaggcgacacacccaa

SEQ ID NO: 589855 - DNA, 885 bp, Homo sapiens
aacggctagtgagccgcgcgtaatcggccgagggagagcgaggtacttggttactcactccatggctgcagcaaggaagaggcggctggtggcctcgtgctgaagaaagaaggtgggagcggagagcgcaggcgtgccgaggtggatgtcctgtcttttctctgttgcagaaacccaccttgtcccatccacatcagtgacatcccagctggagttcaaccttcatcccttctgtggcagttaggatgacttgaatcaaggtccagagaatgtgtgtgagtgaatcctgatacttgagctgaaatcttcccaatgtgcttgcagacacctgactggattttgcttttgtggatgccagagtagcttgcctgccaccatgagtcctggagccatgagctgtggtttaatttttgggaggctaccttggtggccccatacaggctgggttcacagttttgtgcacattgcaaatgacgtgcaatcaaaccacacacttgcatacatggggtttatcgtttctcacacacatcatagggcacttggacgtggtatataattatattgtgagagctcccctttccaaaccaagccaccaaagtacccctttccaagactgtgcccttgttctcaacttagccaacccatgatatcctgtgcccaccacatgactgaccatggcttcacttttatgtgaacagacgactctttgctctccgcgggcggacacttgtgacttttctattgtggagatcagcgtgcttcaaaagctcaacatttgagcaaccaaaatgctagccaaccccagcccatggcaaaacccccaggcggacttttgggctgtgtcatgcagcaaacctcaactaaatgccataatctgagcaacgc

SEQ ID NO: 589856 - DNA, 127 bp, Homo sapiens
aatacaagggctatgtgtttgatagaagagtatgcaactgagcgatataaggtctgtttgtcgtacgcaagatggagcttgtcataattatgcctcatacggatagtacaaggaggtgctgaaggat

SEQ ID NO: 589857 - DNA, 879 bp, Homo sapiens
gctgccctctggttccttaatggactggaccaggggctgggttggcccccatgtgggaaggtcctgcggaagtggtttgagccatctcagttggcactgtggtggggccatcctgtcaaccagacatgaacctggctggagggcatgggaccctatcctggcaaccatccttgccagagactacgatgctggatgacagaagctggcctatctggggcactgtgtgtgtgtggtctccttcctctgttctcctgttcatccacaagtgaaccctgctgatgtggactccgaaactgtgatgcccatgccctctgatgggcactgatagggctccttgaatgcgaggagaggaccctggcaggaggctgctgctgtgcccttacctgtgggtgctctccatggtaacgcttgtggtgttcgaagtaaagacctgctagtatggactggggcaggttcttccttattcaggagaactggacagttcggcccttgtaggtagctcctacatgagtgcccttgaagttcgggggccgttgtatggtcagcatcgaagctggttacgtgtcaagaacggggctatggacaaaggcggggactgtccaattgacgggaaaccctcgactaggggctgtaggggggtgcatgatggctggcatgacaggggtccaagtgcctcttccgtgtagcagtgaccagggaatcccccaaggtcgaatcggatatgggaacgggtttcgggtcccacgaatggccattggccgttgggggctagccaagaaaggcctccaatggttggctccacgcggggactaggaaaggggggccggaggggccacacgtggcacacaagggcccctggggagaagcggacaagttcca

SEQ ID NO: 589858 - DNA, 931 bp, Homo sapiens
cgcccgctactcatggttctcccggctgctcccgggtgcctgccgctccccggtatggtgacgccgcgtggttcttcatggcacatgggctcactcaaagctgttagatcttcgggccaccttggtgacgcagatgccccccggcaaccgcgggttcccctccaggaatatcgtggccctcccgcgccttttgccccgcgtgctccctttttggttgtccccccgttcatccaccaagatcactcgttctcttgctgagggacgggtggttgccccgcttttgcgtttaatcttcggcagagccgcccctaatttctgaaggccgtggtgtagcgcaccctgggtcataatggtccgcggcaaacacccccccgggagtggaggcagcttccaagtgcacccaaccccccgggagcgaacctatccaggtcggaccaaggaccaaaccaagcagattactcggcggggggttcataccaaaaaggcacgcggggaaccacacaaagtcctggggcatcgaccgagagccaaccagtagttgcccgccagatgctcacagagggcacaaggagtattattccccgcgtggaatccccccgccccccgcttcatgacaacacagggtagaacaacacctcatcacaacctggttgtgatccacatttgccaatattcaacatacactccttcctacaaactgtgttcaatagaataccacatgctcgattgtcaccgccacctcaagaggaacaggatagattcatttagtgagcccaccttggtcttattttatgtgttctagcaccgacctaatagttaattatgatttcttaaaccccctaacctttttgaactggaaccacactaggcccccaaaacacctccaaaatgttggcaaccccttacaaaataaaaagcagcaaacaaaaca

SEQ ID NO: 589859 - DNA, 602 bp, Homo sapiens
atccgactttggacatgcttggagaaaagattggcctagatgaccctttctatgctgagattcctgctactaggctgactgctgctctctacccccacaacatcccggttactcctggaagtactttgaaacacagcgaggctcagccgggtgtatcttctaccaagaagggcgacgtctgtgccaccccaggatagcaagttcaggttgcatgaaatgctgactgacacacggtcagacagaagaattgacttgcaagggaaggacacagtgcaccccaacttttgctcactccttctgaatattttttaagagcttattcttggtctgattagagcattctctaataacagttctcacttaaaaaaaaaaagttgcggcgagctattccttaggaggtatttagctgcctgccgcgttcacgcggatggaaactgcgtacccactatcgctgcgacatcccttcgcagctgcgtatacgaaagccgacgacgccttcacagtgcgcgctgatgcatggacccctgacgccatagcgcggggtggtacccaggacgtcctgcaggcctcgcgtcttgctctcctctctgccgtcgcgcttc

SEQ ID NO: 589860 - DNA, 204 bp, Homo sapiens
  misc_feature (5)..(5): n is a, c, g, or t
  misc_feature (25)..(25): n is a, c, g, or t
  misc_feature (63)..(63): n is a, c, g, or t
  misc_feature (70)..(70): n is a, c, g, or t
  misc_feature (84)..(84): n is a, c, g, or t
  misc_feature (116)..(116): n is a, c, g, or t
  misc_feature (120)..(120): n is a, c, g, or t
  misc_feature (139)..(139): n is a, c, g, or t
  misc_feature (145)..(145): n is a, c, g, or t
  misc_feature (160)..(160): n is a, c, g, or t
  misc_feature (176)..(176): n is a, c, g, or t
  misc_feature (182)..(182): n is a, c, g, or t
tggcncgagaaacagtgaaaagggnatgataaaatgttttttgaatgaactgttttttttgtngacaagntgagaaattgttgncataaaaaaaaaaattgaaaaaaccccttttncccntttgtgaattgttttgaanttaaangtcccctaaaacaanttagacttttgtttgntaaatntgtttttttttttaatatttta

SEQ ID NO: 589861 - DNA, 621 bp, Homo sapiens
tccttctgtcatcagcaatcctgactctatattggatgtaacttttcccctcaaatcccaacatttccatatccccttgccgagtaaattaggtccagagctatagaaactgttctgtaagtggaaaatgcttcagtatagattttgattttcaggtactcattttatttgatgagtttaaacctccattctttgagaagctcattttagattcattagactcattttttatgttgataatatatcatttaaatgtccatgttctactatccttcagtaaatgtatgaacttcattgaaagctgaaacaaaggggtttcaaattaaatgaagttgttaattgtctggtttatcttgggggagtgcaagtcagtgtaatacttcactaaactaacacagtagtaccatgaggactgtcagagagccagaggaggggacccaggtttgaggggaaaagaccctggggtaccgagcggaagaatgatgtcctgactgagacagggataagaaggaattgggtggagtaagagtctagcatagagccttctggtagagttagaagggagatgagaagaaaacactgtatatatacatagaatactattcgcctttacaaagaagg

SEQ ID NO: 589862 - DNA, 277 bp, Homo sapiens
  misc_feature (68)..(70): n is a, c, g, or t
tagcatttaccatctcacttctaggaatactagtatatcgctcacatctgatatactcctactattgnnnagaaggagtaatactatcgctgttcattatagctactctcataaccctcaacacccactccctcttagccaatattgtgccgattgccatactagtctttgtcgcctgcgaagagcaggttgggcctagccctactagtctcaatctccaaccacatataggctagactacgtacataacctaaacctactccactgctaaagctat

SEQ ID NO: 589863 - DNA, 555 bp, Homo sapiens
  misc_feature (1)..(1): n is a, c, g, or t
naggcttccccacccacattcatatcctgcgagtaaataggcagagtatagaactgtctgtagtggaaatgctcatatagatttgattcaggtctcatttatttgatgagtttaaacctccattctttgagaagctcattttagattcattagactcattttttatgttgataatatatcatttaaatgtccatgttctactatccttcagtaaatgtatgaacttcattgaaagctgaaacaaaggggtttcaaattaaatgaagttgttaattgtctggtttatcttgggggagtgcaagtcagtgtaatacttcactaaactaacacagtagtaccatgaggactgtcagagagccagaggaggggacccaggtttgaggggaaaagaccctggggtaccgagcggaagaatgatgtcctgactgagacagggataagaaggaattgggtggagtaagagtctagcatagagccttctggtagagttagaagggagatgagaagaaaacactgtatatatacatagaatactattcgcctttacaaagaagg

SEQ ID NO: 589864 - DNA, 429 bp, Homo sapiens
gaagccggaggtgtccggcgggctgcagttccggttatcgcggccttcccacaccttcgcgtgtaccaccacggggctagaggggccggggagcgcatcccgcgcccgcgacaagagagaaggcaaacagaggaacacagatagggaccacatacggagaaaagacagcaatagcaacgagcggaaatacacgcggatcccacgaacctggctacctactaacaagaagagacaagcaccgaaaaaaccaaaaaaccacaaagagagcaaagcaacacaaaaaacacacaagacacaccacagaagaagacaatagaaacacgtcaaaaaacaacaagccgacaaacaagtgacacaactcaacaaacaaaaagatacaacaaaaaaacaaacacaaacacagtaacaacaacaagaaaaaaacaaaaa

SEQ ID NO: 589865 - DNA, 454 bp, Homo sapiens
agcagtaggctctaaataactcccataagcttagcgttccaataatggaacactagacataaatgggtcaagatatttttcttgagattcagtatctttacctagtcactgattattatttttacaaataattaagctgaaataactaaattcctctgtagcaccatttatctgatttatccagaagtttgcatctctttgttatctttttttgttattctattatgttcatagtatattaagtaatgtacagttgcaccttctctaatacataattatgtaaagtccaaagcattgatgaccattttgaattttcagaaactgtatgttttctcacatgggaacaagaacaaaccagaaatataaaatagaatgagagtttcatgaaagaaaaggatttagcccacatttccccttaccactaaagaattcacacaccacacacttcttaaca

SEQ ID NO: 589866 - DNA, 181 bp, Homo sapiens
ttccccgcgccgattgggcctgtagctggcttttcagctgaggcccgaggacaccatcttaaagtctgttctgctgctgcccccgtcactcaccttcgctggagatttgctgccctttgtacctgggagagcttgaaccccgttgtggtcgcagctcgtggggcgtagtcactgtggtcga

SEQ ID NO: 589867 - DNA, 581 bp, Homo sapiens
gtggaacctctctgcgtcccagattgtgctctgcccagtattcttgcgttcagctagctgtgaatgtgtttgctctgcttctctacttcttttaattgtgatgttagggtgtagattttagatctttcctgctttctcttgtgggcttgagtgctataaatttccctctacacactgctttaaatgtgtcccagagattctggtacgttgtgtctttgttctcattggtttcaaagaacatctttatttctgccttcatttcattatctacccagtggtcattcaggagcaggttgttcagtttccaagtagttgtgcagttccgagtgagtttcaatcttgagttttaatttgattgcattgtagtctgagagacagtttgttacaatttctgttcttttacatttgctgaggagagctttacttccaactatgtggtcaattttggaataagtgtgatgtggtgctgagaagaatgtatattctgttgatttggggtggagagttctgtagatgtctattaggtccacttggtccaagagctgagatcaagtcctggatatccttgttcaccttctgtc

SEQ ID NO: 589868 - DNA, 407 bp, Homo sapiens
ggaccatccatagctctgaactctctgataccttcacccgcaaacggcttctaaaacactccagtgaaacccctcatgtggctgtcatcctgagtgccgtgaaactggctacaaaatgggattcctttggcatctctaaaggaattcccaactgaatgggcaccaagtcagttcatggcattttactatctcttttctgctctcgttgctttgtgctctgtagggatttttgctgctctcctccctggtcgttaatatcagcacattgccgctgactgattgacttaggccatgcatgcagttggatcattctagcacatccaacatgtgttccttctatttccttctctgatcacatcattcttaggaaagacaggaatcagaaggctgcaccatcactttctgtt

SEQ ID NO: 589869 - DNA, 235 bp, Homo sapiens
cttgaacctgttttttggttttagagcctgcccccttccccccccccccatattgtgtagcataaaccttcaggggggtaaaagggtttttttctatttccctgggggcattttttgaaaaatttgaatcttataaatttgcttcaaagaaaccaagtaaatcaaaatggaagttttgatccagaatgggtagcattcatgaataaataataggcctttttggttttaaataata

SEQ ID NO: 589870 - DNA, 331 bp, Homo sapiens
tttggtttttttggggggcccccccccccagttttttgggcttgggaagggaaggcccctttaaaaaaaaaacccccccccccccccccgggggggggtgggccctgggccgggcttggggtttgtgccccccccccaccccggggccccgggggggggttttttttttcccccggtttttttttttaaaaggggggccgggttttccccccgggggggcctttttttcccccccgggggcccccttttttggggggtttttcccccttttttcgggcccgttggggggttttttgggggggacccccccattaagggggggggttcccca

SEQ ID NO: 589871 - DNA, 134 bp, Homo sapiens
cactgtatgggggagggggtgatctcgaacactctttacgccggtttctattgactatgggttactcgtgtgaccgcggtggctggcacgacattgaccacccctggggttagtatagcttacgttacacttat

SEQ ID NO: 589872 - DNA, 126 bp, Homo sapiens
gcagggaatggtggcttacacccgtagttggagatacttggggaactgaggagggaggatcgcctgtgcctgcagtgagcataaatcgcagtccagcctgtgagacaaagtgtgactgtgtcacca

SEQ ID NO: 589873 - DNA, 1050 bp, Homo sapiens
cctgggtcggggattttccctcgggaatccaatttccctcattgggtccagatggtcaattcaaggaatatgcgaacagctcacttcgcaggatacccagccctgcaaaaggaccatgaatgtcatgtactcttgctgtgcttttggctggaaggagaatttcttggattgagactcatatactttgggggctaacactggggccaaaatgtaaaagaaaccctttgtggcttagtaaagttaaatggccttgtggtttgtaacaggccataaagtctaacagcttgatctggatacccatcaagacacgtgaaatcattatcatgagcctagatgctgagcgaagagacctccgggaggatcccgaggactggcccatgttgctagccatgttgagactgtacggctgaggaggacccctaactgtcacgagcaacacctgtcgaacacagccacccacctggggacagatcaagaagtctgtcacagatggcagatagcatacctgaggaaagcgggactaaccgagtcacacatgagtgaattgtcatggtagctatgatagcagttatcaccacttgcttctgcagatgtggatcctaactcctgcgagaagtaactcacagtgacaaagctgccttcgcttgttatcgagcttgcaaatcaagagtaaggggggacatgttgggaatcaggccccccatagatctggccataaactggccccatatactggctataaacaaaatctgcagcactgtgacacgttcatgatggctcgtgacgcccacgctggaaggttgtgggtttaccggaatgagggcaagggacacatggcccacccagggcggaaaaccgctataaaggcgttcttaaaccacaaacgagtagcctagagtgatctgtgcctgtaaagacacactcctgctgcagataactaaccagacccaccgactttacttcggcccatccattcatttcccataagggatactgttagttaatctattatcgtatagaaacaatgctaatgagcctgacttactagta

SEQ ID NO: 589874 - DNA, 1494 bp, Homo sapiens
  misc_feature (50)..(50): n is a, c, g, or t
  misc_feature (883)..(883): n is a, c, g, or t
  misc_feature (1209)..(1209): n is a, c, g, or t
agtaacatatttgtctccggaaggagacggcctctctcaccacttcactngtccgggaaagtgttgttttcgacccgattaatttccgcgctatagaattgtggggaaggtctgccccgagaagatagatttgtacttctctcccgatcataatacgcctgggcggcaacaaagataatattttcttctcgtcaaatccacagacaccgtcgtgtatagtttgtggtttgtgtgggtcctcctttcccccacccaaagagcatccgctgtctgtgtccatagtttcttccaatggggggccacacaccccattgtgtccccccttccgctggtaatttccccgggccatgatcctcacttttcctcgtgttaccccacaggagatggtgcccccctcggcgtttctctctgttgttgcccacagggctttctcagagccccacaatgggtccgtggatattcggctccgcgataattaaagagattgcctcacgctctttctatgccgttgtatcgaatgagtttctttggggggaaacataacccgagcgggaacgcgtattgtatgaggaagtgggattgtgtaagtgttattataatggtaaggagtggtagtgagaatccttttctaaaggcccaactttcccgatcgcgccgcgactgttaatataccctgctagacacttgtgtatggacccaccgcaggaattttcgtcggagaactaaaacgctcgtgtacacacgcgggcccccccaagcgagctcgtgcgctctccccccctcgagacgcccgcgccccacaaaactcggggtggttctcggcgccctatatatgaagcgggagagccccgcggggggcttcccgcgcactgtgtcccacacncccacacacggtgtgccccgcgagatattggcccctcataggaggggccccctctctcgagggaagagcctcaagaggttccccacggcacaacagggtggccacagcctgagccccctatacacactgggcctcgtggacacacattgctggcttggtggtcttgtgcccttctgggtgtcctcgtagaggggctatatagggcgagacaacattccccccacaaaaggggtatataacaaccccctgggcttctgcctacactccactgagaaccacgccccacggcacttccacgcccacgctgaagtggggcacacccacantgccctctctccacggaatgaagaccccacgctataaattcccgcgaagcgtggagacctgggcacaagcctgtggaggccccacggccaccacggccacatctcgccttggctttcatgagctgtggtggtggagaataagtgtggggagagcctcgcccacatggtttcacacctggccaagaaagtgcccttatagcttctggaatccccaccctttggcacagctttggccccaaccaggcccctctggaattgtccctacctccacccagtttcccgaga

SEQ ID NO: 589875 - DNA, 84 bp, Homo sapiens
agccccaaccagacctctctgtacttctgtgccagcagttttaccgtggtgaggctagcgggggttcgggagacccagtacttc

SEQ ID NO: 589876 - DNA, 959 bp, Homo sapiens
gaggcagaggaacgcaaagctgagcaacatggacgttgaatatcgccccactccgctcctgggacgatttacttcccgggttcgcgatcgcttgtgcccggacgactacagggacatgtccaaagtggacacaaccgcggtagttgagcaagctgctctaattaccgagaccaaaacttacctgtgtgggctggtctggcattgatgaattggcgcacttgtgggggttctagagtcccttcgacatgatcctggagaggaatcgtggtgtgtgctggatgttcaccacggttgtgtgtgtgggggacccaccaactaaagatgtctttcgggcggatgaagaaagcgctaagccgacgacgtgccggcaatggtggtcatgttgagctgagctattttcacttatctccaagtgttgacaggagtcatggtctgtgtgtgcgggcattactttctccttctgctcgtggctgttgatccatgcatcgttgcagaccttcgggaacctctacagaatcacaacgtggagtaataaaaccctggacaggactcggcgtctcgacagaggacacccgatggcctgtgtcctgggatgccctaggacctagcaggacagatgggcattcgaccagactcacctggaacttataattcagtcaacagtgaaggtcgttaaacagtaatcaacggagcctacggtttgcaggaagaaactgcggtggccgttgggccattgtcaagaacctaattactggtggggttgagaaacaaggagtgccggtacccccaattattaagggacgttcaggataggcgaaacatattagctggttcgatgagcccggaccaagaaaccccctcgatgtggtcatccctgtcgacacgtaagggccacacttgggacaacacaagtccggcgctttgaacacgtcgcaaaacgcacataccgccacgacgcc

SEQ ID NO: 589877 - DNA, 1434 bp, Homo sapiens
  misc_feature (687)..(687): n is a, c, g, or t
  misc_feature (1167)..(1167): n is a, c, g, or t
gctctcttctttgtttgtgtccccccttcttggggggcacaccacacagtttttgtggcccccacccttattttgtgggtgcgcccacttcttcttttgtgggtggggcccccctcccccgctgtgggggcgcccgccccccccctctttgttgcgtccccccctgcgaggtgttgtgggaggcgacactctttttggtgtgagagggatggtggggtgtacctcctcttttggcgacgccactcatggggggtgttgtctccccccccacctggggcgactaccacacaggggggggtagagcccccccgccatatattttctctgcgctttggtggcacccgctttctccccccgtggggtgtctcaccccggcggtgtgtgtgcctggatcgtctttatatgtctctctccctctcgtggtggagtccccccctccccgctcggctctcacatctagttcccttctctgtttggtgcgccgcggcggtggtgttttctcacagcaggcggctgccccatcgtcgtggtggtatttgagtggtctcaagcgagagagagtgtgatttttttcccccacagcagagatataatagaagatatgttttacctactacacaacacagcacacacagcgtgtgttgtggtcaacagcacgacccgccgcgcgctctcgtcgtcgtcgtntagagtgaagagagagacgctcccctctctgctcccacgcccgagtgtctctcatcacgcgggggacgcgcacaccactactgtgatgagagagaggagactatgttgtgtgatgatactactgtgtcgtcgacatagagaagagcgacgactactctcttctcctctctcatgaatgagagagcagacagctcctctttttctttcatctccaccacctctgatgatactatactgtgtgtggtattctcttcctcctctcgcggcgtggcgctcatctcttgtgtttgtgtgtgtatatgtctactcccccgtcgcaccgcgcgcgtcgttgtgtgcactctcgtcgtgtggcagagactacacacgacgcgtgtgtgtgcgcgccccagagagcgcaccacctctctctctctcttcctcaacagcgcgcgctgtgccacactctctcccgcgagacctctctcgcgcgcggggtgnttttcgtgtgtgcgagagagaggccctctcgtgtgtctccgcgctctctctcgtgtggtgatatctctctctcgtggtgtgtattttgttgtctcctcacgcacaccgagcggcgtttctttgtggcggtgtctcccccaccccgcgacgagagagggtgccctctggggcgcggggcgccgcgtgccccctctgggccccgcgcggctccttttcctccccccccctttttctttttttgtttatccctctctcctctctttttta

SEQ ID NO: 589878 - DNA, 100 bp, Homo sapiens
tccacacctgcacggtagtctacacctgcacctggtagtccacacctgcacctggtagtcccactacctgcaccgggatgtccactaccttcacctgtgc

SEQ ID NO: 589879 - DNA, 858 bp, Homo sapiens
  misc_feature (20)..(20): n is a, c, g, or t
  misc_feature (122)..(122): n is a, c, g, or t
  misc_feature (140)..(140): n is a, c, g, or t
  misc_feature (148)..(148): n is a, c, g, or t
  misc_feature (163)..(163): n is a, c, g, or t
  misc_feature (206)..(206): n is a, c, g, or t
  misc_feature (270)..(270): n is a, c, g, or t
  misc_feature (284)..(284): n is a, c, g, or t
  misc_feature (349)..(349): n is a, c, g, or t
  misc_feature (375)..(375): n is a, c, g, or t
  misc_feature (408)..(408): n is a, c, g, or t
  misc_feature (417)..(417): n is a, c, g, or t
  misc_feature (421)..(421): n is a, c, g, or t
  misc_feature (448)..(448): n is a, c, g, or t
  misc_feature (453)..(453): n is a, c, g, or t
  misc_feature (458)..(458): n is a, c, g, or t
  misc_feature (465)..(465): n is a, c, g, or t
  misc_feature (572)..(572): n is a, c, g, or t
  misc_feature (631)..(631): n is a, c, g, or t
  misc_feature (635)..(635): n is a, c, g, or t
  misc_feature (643)..(643): n is a, c, g, or t
  misc_feature (726)..(726): n is a, c, g, or t
  misc_feature (815)..(815): n is a, c, g, or t
cattacctgaagttccaggnaggccctgaagggcattggcacatccagtcccagcccaagatccagtctacccaggccatgtccccgaatgggcaggaggccgtctgtccagtttgtatatntggatcagtctctctgantgtctganccgctgcctgcaggncccccccattctccgcacatggtaggggctgttaggaacatancgtggcatcccccggtggaccactgggccccagtgctgaccatggggattagggccagggattngaggtggcagaggnccaggcacaaagttcactccagggccacatcctaagtggggtggcatcgagaagtcctccactgnattatagttgaagaattcatggggtnggaagggctggcctgggaaaaaaaggatatcanaaaaaaagngtanaaaaaagggaggtggcaaaggctaaanaaatnggtanggaaaangcatgggaggaggcaaagaagaaggtgggggtgggagcaaggccaagtgctccccgaagtctggggtctgcctatggcttccctggaatggatgattcatctctgcncagtcctcaatccacgggtcagggggatagccacgcttgggcagctccacgccccaggntcancaccatgnggtcagaagcaggtgtgagaggtggcggtgtgcatgctggtcccagtggacaccatcccgatgacggtgctgtactgcatgcnggaagtgaaagtggaggtctaggacatcaaagcagtggtccccggccagcgtagacttgtagaagttcccttcaaccacatcccgccgnagggagcctgccaggggctggagctctggcaggaggaaacccc

SEQ ID NO: 589880 - DNA, 643 bp, Homo sapiens
  misc_feature (274)..(274): n is a, c, g, or t
caaaaatattgcttccaaaatcgccaatgagttaagctgtaccccagtgattatgatgtaaattaaggagcaataaaggtgttttcttgaccacggagggaaatgtatagaataatatttaggcaaacacgtctgcatcttctaaatcatgaaattaaagtctgaggacgagagcacgcctgggagcgaaagctggccttttttttacgaatgcactacattaaagatgtgcaacctatgcgccccctgccctacttcggttaccttgaaagtnggggtgtggccccatctccatgtgcctcccgtttgggtgggtgtgagagtggacggtatgtgtgtaaagtggtgtatatggaagcatctccctacactggcagccagtcattattagtacctctgcgggagatcatccggtgctaaaacattacagttgccaaggaggaaaaaactgaatggctgctaagaattacccttaagaccagttcatagttaaaacaggtttccagttcaggccgggggttttgtgtttgttgttttgtgtttttttagggcaaaaggtttaaatttaaagttgtgaacattgcttgggggtgtttttttaagtagattcccaaaataattaaaaattccctttttctcagta

SEQ ID NO: 589881 - DNA, 481 bp, Homo sapiens
aggtttggtttccctaacggttaccaggcggggtatttctggccataacgccgcacctgttccttgcaccccgagaaagggcaagccaacaagaataaaagactttgagctgatgcaagatatggacctggatgagcctctgatattggcacggagacgtggagcagaagcccggaggctatctatcaaagtggagatgagggcaaccaacggtttaggggcagggctgatagcagcaggtcatctgaaccaagggatctccctgttggcggacttcatcctgagagggtgatgaagagctcgctttctgttattataactgtccactgcacgcagggatacataaatcgcaatatttaagctctgaaggccgatatcccccaactgtaagccacatccatttattattctggaaggccctaagaccgtccatgcaagcttcttagtgaacttttgaaccatgcttggggacggctcctct

SEQ ID NO: 589882 - DNA, 125 bp, Homo sapiens
agatcaaattggttttatgccctttcccccagatattgtagagcaagtctgtgttacaagcccagtgtgacagtgtcatgatgtactagtgtcttactggttttttaataaatccttttgtatag

SEQ ID NO: 589883 - DNA, 356 bp, Homo sapiens
  misc_feature (10)..(11): n is a, c, g, or t
  misc_feature (19)..(20): n is a, c, g, or t
tttaaaaaannaccccacnnccgcggacacattaccaaggctcccccccacctctttttcctattaaagatgtaattcctctcattgatataaaaatgatttggaccttaagctgatttaaaatacttatttttatacggttccgctcatgagaaccagtgagaattaagggtactcatgagcattaaattccgtttaaattgagcccctttcatagacctgatacattcatttccctacctacctctcgtttttttttttaactttctccctctgaacttgtgtttgtttaaaattttcttttttcaaccagcattaaataatagattagcctagatattatttttaacggaagc

SEQ ID NO: 589884 - DNA, 317 bp, Homo sapiens
acgctcgggacagaaaaaaacattttcaataagactaaacacccaatgaagctaagtaataaaaagaaatgttaggtttaagtgaaagtgtagaagcagtaaaataataagttatatccatggaagtggataaagagaatgaaagctccacctaagtccagtagctgccattaaaaataaaattaagaaattgataacagaaatgatgaattgtattttttctttgaatcataaaattagaatttgacaaaggaaaataaggaaagatagggtagaagcaggaaatttaaagaataaagaaattataatctaattca

SEQ ID NO: 589885 - DNA, 531 bp, Homo sapiens
  misc_feature (18)..(18): n is a, c, g, or t
  misc_feature (61)..(61): n is a, c, g, or t
  misc_feature (66)..(66): n is a, c, g, or t
  misc_feature (112)..(112): n is a, c, g, or t
  misc_feature (268)..(268): n is a, c, g, or t
ccggcccgtaaatccaanatgtaggcccggcaaacaagggggccgcatcccccccgccccngtgtngggtccctccggccatttgtgtgttgcccccggttgggtccacacnaaggtgggcgccggccccggtttcaccctggaggagctcaggttggccggcattcccaaaaaggtggcccggcccctcggcatttttttggatccaaggagggggaaaaagtccccggggtcccttcaggccaacgtgcagcgggtgaagggggcncgctcccaatttttccttttccccaggaagccctcggccccccaaaaggggaacagttttttttaaaaatttaaattggcccccccactggccgggccggttatgcccgtccggaaggtttttaaaaaggagaaagctcgggtcctcccttgggaaaaaaaaaattttaaagcctttgctagtttccgtttgggccgggcccacccccggctttttggcatacgggcaaaaaaaaccaaggaagcccccgaaccgggttttta

SEQ ID NO: 589886 - DNA, 368 bp, Homo sapiens
acggagacgagttctggctccatttttgggagtcgtggttactctgtaaccagtaacagagagaactatgaaggcagccacttacactaatgctgttgtcctgaacatcgttcactatgtgtctggagcctgttttgtcaatttctgttcggtaattaatggaaattggcttgctgcttgcggggctgtctccacggccagtgacagcatacacagtgatggtataatcaactccaggtttaaggccgctgatggtagctgtagacttgctcccaggcacagtgaactcctggacagggctatttcctcctgtttctccgtaagtgatcctgtaatatctcactgtgacagcaggagcattccagctg

SEQ ID NO: 589887 - DNA, 397 bp, Homo sapiens
ggagtgcaatggaatgggatggagtggagagaaatggaatggagaggaaaggattgctatggagttgtctcgtatagaatgtaatatatatatatgtaaaacaccaggtgcctaacctggcacagagcaggagggctaagcatgacattccactccactccactcaagtccattcaattccattccactaaactcctttcaactccactccacactattccattccccttcattccactgcactcctctccatttactttccactccactccactccactccattccactccattcctttccattcctgttcactccattccgttccactccactccactccattccactccattccattccactacaatccattctactctactccattccagtcc

SEQ ID NO: 589888 - DNA, 748 bp, Homo sapiens
  misc_feature (206)..(206): n is a, c, g, or t
  misc_feature (209)..(209): n is a, c, g, or t
  misc_feature (222)..(222): n is a, c, g, or t
  misc_feature (332)..(333): n is a, c, g, or t
  misc_feature (351)..(351): n is a, c, g, or t
  misc_feature (364)..(364): n is a, c, g, or t
  misc_feature (374)..(374): n is a, c, g, or t
  misc_feature (424)..(425): n is a, c, g, or t
  misc_feature (441)..(441): n is a, c, g, or t
  misc_feature (443)..(443): n is a, c, g, or t
  misc_feature (463)..(464): n is a, c, g, or t
  misc_feature (497)..(497): n is a, c, g, or t
  misc_feature (514)..(514): n is a, c, g, or t
  misc_feature (516)..(516): n is a, c, g, or t
  misc_feature (550)..(550): n is a, c, g, or t
  misc_feature (561)..(561): n is a, c, g, or t
ggcaagtacgtagtgtgatcaaacatgatcatccagaatttatattttttcttgtgtacagaggttacatatcgtggtgtcctttataaaggaaacattttaaatcccacaaattgacacttctatcttcaatgactaagatttttgtgtcagtaatctctgaaatttccttaaattatatattaacatagcagagaaatgatttnttngtatataagatgnttccacctgaaatgctgtcataagtactggggggtgggggagtgcccatcttgtacatgatattcttagaggtaataaggtaatgatgcatgaatttattttataaatcnntggactatgtatttgacntgtacaatatgtncagtattaangtcaaccatctctttaaagttagcctataaatattgttgtataatttctnntggtcagaaacacttngnactgaatagtgacactcggnnaggatttccagtgccatttagcaaaacgtcttnagtctatgcaactagcnanaaatctgcataatgcaacaacacagttttcacanttcaaattttncatgagggttcttcagattctcctgaacccagttagcaaaatgagaggaaaggcctaggagatattctgtaaatattaactctgtgagtatgaaacgtgttatattcaactcaaattgagatgtggctgcatgggaatttagggggaagaaaaaagggcgaattaggcatggcccataaaagaaatg

SEQ ID NO: 589889 - DNA, 897 bp, Homo sapiens
  misc_feature (143)..(143): n is a, c, g, or t
  misc_feature (273)..(273): n is a, c, g, or t
  misc_feature (603)..(603): n is a, c, g, or t
agcgggagacgcacgcagctgacttgtctactccggacgaccgttacagaggtctccgagacccttctctctcctgtgcaaaatggcaactcttaaatggaagaactcgatagtctagccagatttgcggtaggatggagggnaacagtttccgaaagcaactatagatccagctgtagtgggagtgtctggtaggaagttgggtaatggccgtcgtgcctatccaggcaattcgtagggcaaagctcattcctgggctgtatagaagcgttngactgcatttgtggaggatgcttctatggcaacggaatacagcgtgtacaatggagagaaactgagtcggcatcttggacgacaatgtggatgccttagtatgtctgtacatgagacactctaatcatagtaggccagactaagagacttagtgtctgtgacacgccacattcataaagatggtacgatggtaacttgcaagagagctgcgcgctactaggcaacgaagggaggagagcctacggggtcgacattctgggtgtcaggagcaagatgtctgagagggtctctcaaagttgcagttgattgccgtgcagcatcgatccaagntacaggtgccatgatcgccaatcataactcgctggggtttatccacatgcgcacgtgggtagctattgcattatcgtttatagattcagcgctggtaaaacctgatagtggcaattaatcccattaacagcacggctgtggattgtgagagtgagagtgttaactcatggtagttcatgctaggagtttctcgctagcattagtgagctgatgaacatttgggcaattcattcccgagacgagctgccactgggatggatttgcggggggaaacatggatgacttaagtgttgg

SEQ ID NO: 589890 - DNA, 172 bp, Homo sapiens
gtggggatgctaggagcgctgggtcgtcctttgttcggctggaggctcagaggatgggctggggtggggttctcagtccacctgtgtgagtgagggcagaaaccctcaggggctgggtttctgcccatgctcctgggccagccttacctgattcccccccactgcctcgtgc

SEQ ID NO: 589891 - DNA, 456 bp, Homo sapiens
ctcctaacgagtttcgttctgtggtacataccatgtagatacatagcactttatcaagaatttcccttattttctaccaataatctagaattgggtaatcgtgaattatccaaggtgatgcggtgtttttgtcgtttggcagtcgctcaccggtacaccaaggggatgcgctcagatgagccaggagatcgagcggtacctgcaggccggcactcgtgccaacacccggcggagctatcagcaggcgcttgagcacttcgaggtgacgtggggtggctttctgccggcgactagcgatacagtcgtgcgctatctggtcgatcacgccgccaccctgtccagcaatacctttgaagatgcgcctcgcggcggtggcgcagtggcattgcaagcaaaggctttcccgattcggaccaagattcggcttgtcgccagattctcaagggcattcgtact

SEQ ID NO: 589892 - DNA, 376 bp, Homo sapiens
  misc_feature (189)..(189): n is a, c, g, or t
  misc_feature (256)..(256): n is a, c, g, or t
  misc_feature (263)..(263): n is a, c, g, or t
  misc_feature (281)..(281): n is a, c, g, or t
  misc_feature (321)..(321): n is a, c, g, or t
  misc_feature (342)..(342): n is a, c, g, or t
  misc_feature (362)..(362): n is a, c, g, or t
gtcggggacgccgggcgcctcccaccggccgaagccttcctcccgcgcccactttcggggctctacgtcctatcaagtctaagcacccccgcctcgtctcccctagaagagccgccccggcgcggcgacacctgccccaggcaggaggcagccaacggcaacccattgtgcggactcatcgtccacagnccacccgggcgcaagagccgcaagctggtgtcccggcgtcctggggtcggggcgggggtcccagggnccacagntcacccgcacgcccgggnaccaccaggatcggggtcggtcaggtctccctcggttggncccggagccatcaacagcggnccggtgtcccttaggctggncccggagccatcag

SEQ ID NO: 589893 - DNA, 221 bp, Homo sapiens
cccccttccatatgcgacacagtgagttttatctcttggtctacactacacacacacacacagcacacacacacacacacaaacacagagtcaggttttatctcgtgtgtctacacacacacacacacaatcagttttactcgtcttggtctattctacacacacacacatattttttctctcttggtctacacacacacacatacacaagtcatgtttgg

SEQ ID NO: 589894 - DNA, 281 bp, Homo sapiens
tcatgcctgtaatcccagcactttgggaggctaaggcaggaggattacttgagcccaggggcttgaaactagcatgcacaatatggcaagaccctgggtctacaaaacataaataaataaaatccaaataaaaaattagtcaggtggtggtacccctgtagtcctagctactcaggaggttaaggtgagaggatcccttgagcccaggagatcaaggttgcaatgagttatggtcatgcccctgtactccagcctgagtgacaaagcaagacattttttca

SEQ ID NO: 589895 - DNA, 931 bp, Homo sapiens
  misc_feature (327)..(327): n is a, c, g, or t
  misc_feature (377)..(377): n is a, c, g, or t
gacccacgcgttcggacccacgcgtcgagacgctacttcccctattcatagaagagcttatcacctttcatgatcacgccctcataatccattttccttatctgctttcgctagtcctgtatgcccttttcctaaatactcatcaacaaaactaactaatactaacatctcagtacgcttcaggtaaatagagaccggtcttgaactatccgtgcccgctcgatcgatccttagttccttcatctgctcgcttcgccatcccttagcgcgactccgtttagcataatcaagatcgcaggtcagatcgattgccactccgcgttaccnatctagagatcgagatttggtcgcgagcgctacatggtggtactgtaganccgttatcgcaggtgacactcgtacctaacgtgtcgtgaacttaactcgttacgaactctcgtatcagttatcttgccgccgctagttattccctagtaagctcaggtcgatcgctgcgtactccgattgcacagttgcactcaatgtcagaagcggtagtacggtccgctgagttgcgaagcccacgctattcccgtatcaactatatgtacgattctagcgaagactgttcgtatgctacatctattgagcatggctcgcccaacaagttacggcgttaaaatactagagtgcctagttccgcggacgatctaagagcctaaacctagtttcgaccggtaacacgacccgggggtattactactggtcaactgctctgacaatcgtgtgtgagcagaacctacgagtttgtcagtgcgccagtcgctgccttagtaattacattcccgctaaaaaatcttgtcgaacatacgggcgcgtaatttacgcctgatagcagccgctcttttaaccgctcttagatgcctgggggcctcgagccggaacccaaagg

SEQ ID NO: 589896 - DNA, 964 bp, Homo sapiens
  misc_feature (964)..(964): n is a, c, g, or t
gggcacagcagaggtgaacatgaggatgatgctgcgtctgggctgtatccatgtgtaaccagctgccggtacaaattgcaaggtgaccttcttggcagtgacaggtccagattggtggcctgaggtggaggttgtgtgtgttgcctttgatacccctgacagagcctagtcaccagatgcaagagatagagagaatcaatccattccttagaaggattgctagcacattgaaccaagtaccacagatctagccaactgagaaaagacagagatgtaccatcaaagggcgaactccaatgacgacacaatcaagagataacatacacaaatcaattacaattgatgcgtggcaacacaacgagagcacttcgtttagcaaaaaaaagtacctaccaccgaataaatagtatcacgcacacggtgaacaacgatagagaataccaaccaatgaggccaaattggaacatgggagagacaatcaaaacagtaaccacagacatatcatcaaacaataggaaaaaaaaaatgaaataatcctaatacaacaactagggaatgcacatcgacaggagcacaacataggacccgacagatggtatagctacggacgcattgacaacaatatcacccaccaaaacgaaacaaaagaacacgggcaggcattcaggcgccgataacattggcatccacaattccccacttggaggcacgaatactatcacccaatccatttgacttttcacctatccacattgctaaaataatacaataaagattcacaaaaagaaactaactcattacaaaatatgagaaaaaaaacaccatagcaaacaataaacccctaatacactaccaacgatgtactaactatgactaaacatcaaacaatacacaacaacatatccacagaccacccactacaaaaaacacacaacaaacaacacaaacaactactacactacan

SEQ ID NO: 589897 - DNA, 486 bp, Homo sapiens
ccggcatgaggctgtggcgcctactggccctggcggtgcagtgtcgtgggttcggcgctgctcggagtctggtctggggtgctccacagaagctgttgctgggcttgggaggcacgggcatgtccctctcccggccatgtgtgagacggcgcccatccgacagtgtcagctattgccatgtggccgcctgtccagatattggggccctcgacacccttgggcgttgagggtgggatagagcctagctccttcctgcagagcccgcctaggtgggagagatcatgcggttggtgaatgcctactggggcaaccccgtcctcactgtagaggccctgtcgcaggtcttctcctccatgccaagatctgctagatagcctcccctcccaggcagcgcccgggcctggacgagcccagggacggtctggctgctgggggcggctgccggactgagcctgccatgaggtcaggacttccctccggccgcag

SEQ ID NO: 589898 - DNA, 151 bp, Homo sapiens
tactatctctatgcctcagctcctgagagctggggttacaggcacacacatcaatctggctaatttttgtgggtgagtaggagacaggttttgccatgttggcaggctggtctcaaactcctgatctcaagtgatccccctactcacctct

SEQ ID NO: 589899 - DNA, 632 bp, Homo sapiens
agcggagccgagttcgcgccgccggtaggtgctgcatgccaggggcgggatcgtggagcgcctcggagaagcgcacgaaagcaataaacaagagccatctctccggagcagaaatagaacagacgtgggcggggaaagccgaaatatttcgctgccgtcctggtgaacacaatcgagcaaggcagtgaagcaaacatcattaggtggctggactcagacacatcacgctccagtttgggttccaaggtgcttctctctggattttcaccaggcttgccaaagaatgatggattacgctgggccaacctgggtgtccggcaatacccaacaaaagtgacgtttggcccctaacagcaggtcttgggccagacgagaaatcaatattgtcaccattaaaatcgtatcaaagaagagttaaggcaccatctgtgcctggcgactctcatatggtgtgtgaacattaaatccgagacttgtactagcatgggtaatcaatatatagtggtgcacagatgcattggtggttcctttgagcagtgatggctgtcgtggaatcgtgtgatgcagtgtagtcagaccattaaacaagattcgtgtccaaagaagaagaaaagaaaagctctcgcagcgcc

SEQ ID NO: 589900 - DNA, 360 bp, Homo sapiens
tatatacaacgtgattgactgggacccgtttctaaatacatctgctgcctacattcctgctcacacatacgcttgcaattctgacggtggaaacggtgcctgagcatccttatgagagtatgtggctttaaacttttgcgaaatatactttgcccttgcaaataatggcttgtggcagccaagctttcatagacacataccttttgaacccctacgttattccactctctgttctaggcactgggacttcaccaagcgctggattgctcacctacttgtactgaaccttatcttatagtgaaggagatgaaacagacaaaataaatctataaaatatgtaatacgtgagagagggaagga

SEQ ID NO: 589901 - DNA, 670 bp, Homo sapiens
  misc_feature (237)..(237): n is a, c, g, or t
  misc_feature (508)..(508): n is a, c, g, or t
tgggtcccggcaattggtttattaaaacacaaagcaagggacagggaaaaacaatccggatttggtacttttgggggggaggggggggggactgggaaggggtagggctcagagtggagacagcccagaagaggaaagccagcttctatccaccccttacgagcttctcccgcgggccaaccgagggttcaaagcccactcagttattattctcagcgtggtgccgcgtgtctcaangtgcagtggtgggtggcgtggtgtgcgcaaaagggaggtgtgggtgtggggcccctccacagagaagagagagagggagttgggaaacacttgaggcggtagaagagctcacagaggggcttagagaacacttggagagtgcgtttttctctctccgagttcacgtgggctcacgaggacatagaacgcagccgagggcccccacagtggtggcacgaggggtgtggccatgggggttctcgcgtgaaacaagaggccgaggtgtttagcncacccaattatacagtgggggtgtggaaagagaggggctgtgccgcgtggggctctcagaaaaggggggcgcagggcgtggtctccctggcgcggggggagaaaacgtgggggaacggggcaccccgggcgcccaggggggcgcggggtagaccgcggggga

SEQ ID NO: 589902 - DNA, 99 bp, Homo sapiens
cagtgctagctgagtatgcgtctttgcttgccctttgctcgtgcactcgttaggagaagttgctatgaaagatcagtagcatcagatcatcgatcaaaa

SEQ ID NO: 589903 - DNA, 289 bp, Homo sapiens
tttggagtttttccgttttttggaaaacctacattggtttgcctgaaagagagcttgaatttggagaatttttattccccacccaactttatgtttttaaaggccttttgtttttttgaggagagaaaaaaaaagccttttggtatatttttggtaaccttcaaccctgggggtttttttttatgtttaaagattttttttattttagcccaaattttggttcaattggtttttttttcaaaccatttgaatttttttttttttaaaaataaaaaaaatggttgtttta

SEQ ID NO: 589904 - DNA, 325 bp, Homo sapiens
aggtcggacctggggtgcacactagggtagtttgcaggtgtaaagccatttaccaagatagttgtaggtaaagaagggcagatttattagagaaattgtgaaaatgttgtcgcagtgggcagctcagcagagaaggggctacctgcaaagaggcaagggctggaggaaagttttatagggtcctgctgaagggtgctacgtgtggaatgaggtcattgtgcccgcaggttgtttgtgattagctgtctctaacaattgttcatacaataattgttcattattgttctcaacttggggctctccccaacctggggacccttcctta

SEQ ID NO: 589905 - DNA, 102 bp, Homo sapiens
  misc_feature (28)..(28): n is a, c, g, or t
  misc_feature (36)..(36): n is a, c, g, or t
ttggtcccaagaagttgggaccacacgnataagccnccatgcctgaactgggaggcagaggttgcagtgagctgagattcggccattgcactccagcctggg

SEQ ID NO: 589906 - DNA, 144 bp, Homo sapiens
gtggcatgatgggcactggttaggtgctcgatatcgcaggttgagtatatgagaaagtcatattgtgcacgcccacctacagtggggaggccaaggtctgccggactcacgtgggggcttgagggcagctggtgatcctgggga

SEQ ID NO: 589907 - DNA, 107 bp, Homo sapiens
ctactactagaactctgaagtcgctttttctgtataaacaagccttcatacttctgcataatgaccattgatggtatggtatatctgcaatactgattttatccaca

SEQ ID NO: 589908 - DNA, 329 bp, Homo sapiens
  misc_feature (26)..(28): n is a, c, g, or t
gcttgggccaaaaggtttggcaatcnnncttcttagtacactgggaacagctaatgttcagtaagaaaagaatatttttagggccaggtgcatggctcatgcctgtaatccccagcactttgggaacatgaggcagatggagtgcttgagtccaggagtttgagaccagcctggtcaacatggtaaaaccccccccatctctaccaaaaatacaaaaaattatccaggcatgttggcacatgcctgtcatcccagctgaggcaggagaatcacttgaacctgaggcagaggttgcagtgagccgagatcagtgtgagattctgttgaaa

SEQ ID NO: 589909 - DNA, 126 bp, Homo sapiens
ttgaaagatcaggctgactgctgccatagtagatatggtatccatggcaagcccatgtgtgttgagagcttctcagactatccacctttgggtcgctataagctgtatcgtgcatatgaagacaga

SEQ ID NO: 589910 - DNA, 966 bp, Homo sapiens
ggcgcgagccccgtgtccccacggcggcagcagcggcggggcgggctgaacgcggagggggcggagggagcccgcggggggagagtacaggaaatggcggagaccggtgcttgacaccgggggggtgatcaccaggccgcagaacctgaattgacggccttaggggaccccccaagcaaattccttcgagatcgatgtgagccacccccgcaaacgggtgggggtcggccgggggcccgttttccaccatttttaacgaaattcggggtcaaaagaacaattttcttccttatttttcaaggcttgaacagactcttacttggtaggcaccgacgattcccgggtggacttttgggaagtgcgcttggcgaaggtggatttacggaaaaggagaagacgcaggggttcggtagtttccccccccgcttcccgttgggaaaaaaggcggtttgggggcggtacaggcttccccttttgacggagggaagacttggatggacattttgggatggaccatttttttgggccggaaaggaacaaacgggggcgtgggagcgcgtgttttataacccaagggtcggcctggtcttcctcggtgacacaggaacgaaccgtgtgtcttccaccgttgtttttacccgcgatgacattattagataaaggcttatctttcttctaaagttaggacgtgcttgaatttgtgggcaagagggggcacaaccgtgccttttaattggtggttacgccccagtgacagaagtcctactttttagcgttgtggcccagacagttggttttacttgccttcagtattctaacactcatctcccagttggttggtgcgcggtgacaacaagttttgctgttgaaaatcctctcaggcgtttattataaaagcctcttgggttaggggcgccacattcccccaacttgttcctgtgtggggcggcacatcggtgggttgca

SEQ ID NO: 589911 - DNA, 1139 bp, Homo sapiens
  misc_feature (1139)..(1139): n is a, c, g, or t
agatagcagctctgtatcagctaagacggctgaatcgatgtggttgagttactgtaatcccgtcttatagcaagggataggtctgacacaaatacaacttaattctctaactaacgctgccataatcaacgtatgattgcaatcgtgacttctcccgcacggctgggatcaaccaggcgggagaagcacccgagactcgttagcttatgattctctccgtttctgctgtccccaatgaaccagtcacctcgccaagcctgcgtgccccatgacgggcctatgcccgtgtattggcaattgactgtgcattcgtccatcagtcgcgcccatctatatagcgtcagtccccctagcgtaggatgctatgtggcgaccgggtggacatgattgcgtgcatagctgagagcctctgaatgacatcgcgaagcacttagtacccaaaattgagttcgggtgcatgtagccggagtgcgtaggtctagatctcagcatccgtatgtgtagaccgaagcatgtgggttcgggacacaaggccgtacccgttgcgttaaggttctagcggagctcagcatgcatagcaaaagtggttacgtgcaatgatgggtcatgacatctctgtactttagtctctcgtgtcatcagtagatacccgcattcataactccgcgtaggcttttggcaactgactagttcccctaataatcgtgtgccccgaggatggccgtttcccccgataaacaaataaggttctgagtctttacctccctgctctactatcctggtcggttctgtattagttggaggccggaccccgggaccaggtgcaccaggtctacccttcgccttagaagggttgagctatcccacccggggcgtcgtttgaacggaacatttggtccctggaacccaaacggggtctgcctaactgggggcgcccttttgtcccaaaatcgttgtttagagccgtggaaccagtataaagcctgtattatcgctgtggaaggaatgattcccacttcgcgcaggaggagaacaaagggggtctcacactaggcgcgggagaccatcaacgatgtgcgaatagagaacacgttgaaacgtagagtggcagaattcaaacgcgactagacacaatcacn

SEQ ID NO: 589912 - DNA, 1113 bp, Homo sapiens
gcaggatgatggagagtaagatgattggcatgccataacactcactagagagttgcatgatgcgcagcagcctagttgcaaattatcagttcctatggtcacatgctagcgatccagcgcatctgtggacggatgcattgccgtttaagcaactttcctagtgcgcgacaaccttaggcatgcttctcatgaaaacaggtaacgtccgtcctctgctaggcccgatggtcagccactgaagccctttggtccagataactgtgatgcagtttcaatatgactccaaactgccagtagcggtccccagaggtgtacctccaccatcagaataaattggagcagcaccaagtgtatggtgccaggtcagagccaccagcctccatgggtcttcgttataacacatatgtggccccaggaagaaacgcatctggacagcactccaagccatgcagccgggtcgagtatgtgtcttcttatgagctcctctgtcaggaatacctgttaccccgaagacattccaccgtaccctaccatccggagagtgcagtctctccatgctccgccgtcttccatgattcgctctgttcccatttcacggacagaagttccccgcagatgatgagccagcctagtgcccaagagctctgtaacaatataagccatatcagtcctcgcaggccgctcagattatcaggtcactcagcttcagccttactttgagaatggccggggtcactacagggaatagccatagtccagttcttctagtcctattacagtgcagatgggggcctgagtgatgtggaatgcgaatggaaagcacaggtggaaccccagtacaggcatccacaatcgcaacattgggagttgcaacacaaacccataagccggtgaacagaaacagtgatggtaacagaacatgcagagatggaggccacagataccgcgggaccacgaggaccgggggaagttctcgcacacagacacaaatcgtgtgtcaggaatagcccggagaagaaggagataacaacgaacacacacaaggagaatagaggaagcgaaacagaagcgcaggagccagacagagaagaaactagacgtcaacaagagata

SEQ ID NO: 589913 - DNA, 728 bp, Homo sapiens
  misc_feature (504)..(504): n is a, c, g, or t
  misc_feature (580)..(580): n is a, c, g, or t
  misc_feature (582)..(582): n is a, c, g, or t
  misc_feature (601)..(601): n is a, c, g, or t
  misc_feature (624)..(624): n is a, c, g, or t
  misc_feature (652)..(652): n is a, c, g, or t
tcttgttattgatattacctatttacatcaaaaagcttttagaaaatggtatgatgtaagcaattcttgtcctggtgaaatctgatggtgtaacccgttttactattggcgctgcttcataacaaaaatgaaaagctatatacatctacagccagaatggattgtttatgtcatataatttcctttactaagttcacttacattacttacagagttttattcattgccataatagagccatgtaggaaatgcactgactgcatgttattgtggcaagaatatcctaaatgtcattaaaatcctccaacatgatggatctacttatggtcttgtttgttgacatgccaaattaacatagttccatctggaaatgagcatttgaaatgataatccggctgggcacagtggctcacccctgtaattttagcactttgggaggccgaaggggggcagatcacctgaggtaaggagttccagaccagcctggctaacatggcgaaaccntgtctctactacacaaacgcgcgtgcgcgcgcgcacacacacacacacacacacacacacacacacacacacacananttagccaggcatggtggtncatgcctgtaatcccagctactncagattctgaggcaggagaatcacttgncccagaggcagagtttgcagtgagccgagatgcgctactgcactctagcctaggcgacagagcaagactccatctc

SEQ ID NO: 589914 - DNA, 665 bp, Homo sapiens
gataagccaggcatgtgattccttggcttcaagtgccttctgtcttccccgaaggtccactgagatctacaatcccccctttcctctgatctcttgccatgtaagtaatttttcacaaagatcagtacaacgagctatattttttcctaagaaaaacatttccaccaggaatggggagtagccccgtattggggctgatctggtccagaacttgggcagtgaggacacaaatcccattctcatctactttccacatttttccctctgtgtcggagcgtcctgtttccaacccttacattctctgaaactgtctctagagcaacttgtgtctctccctcatagtccataactataccccttacagccctcaccacttacgaaacttcacactcaatctggttctaactaaactttttacctacgacctggtaaaaggccctccctttacaacacgacttaaccgcgcaccttacggcgcgaaccgtccccaactcctacttgttacttccccaccccaagaaaagggttaccacgggcgcacttccacctacccccacggccggtcctccttaggcactggcaacacttcaccttagacgctgcgacaactacacttcaccccaattatatctccctggtcctcccactttccccaagcggacggg

SEQ ID NO: 589915 - DNA, 156 bp, Homo sapiens
ctcaatgaaatgtcggggatcattgcggacaggtccacttgagcttgttcaccaggagcagctccatttgcagcagctcctcgggccgtgatggatgttgtctggtgtaagatgcaccagcttctcgcgccgtcaggggtgatggagcacccatgt

SEQ ID NO: 589916 - DNA, 291 bp, Homo sapiens
actttaaagtattcacttctgtgagaaaggcatctgagtagctgatggggatggcattgaatctgtaaattaccttgggcagtatggccattttcatgatattgattcttcctacccatgagcatggaatgttcttccatttgtttgtatcctcttttatttccttgagcagcggtttgtagttctccttgaagaggtccttcacatcccttgtaagttggattcctaggtattttattctctttgaagcaattgtgaatgggagttcactcatgatttggctctctgttt

SEQ ID NO: 589917 - DNA, 927 bp, Homo sapiens
aggctgaggcaggagaattgcttgaatccgggaggcggaggttgcagtgagccgagatcgtgccactgaactccaacctgccaatagagcgagactccgtctcaaaaaaaaaaaaaaaaaaagaaagaaatagctttgaaaaaaataccgacttcaaaggaaagcttattttcggcagggggttttttcaaagataaaattttggaagcatgtttcctaacgcgatgggtggtgaatggaggggtggacgctgggctggaggcatccgcccaacccggggggggtgggtggtgtaagaacgcaccgtgggagccacaagagggcacctcctatagtcacgctaaggggctcccctttctggcgcccagctttgggcgtgaaggggtggatttctactagacacattctggtgcttcagtcatagatgttactacgagggacgcagtttccctggctggcagatccctggaatagagttggctggacaaggagtctacttccgtgggactcgggacagttgaagggccagtctggtgtacgaacagggtgggggcacccgggggaaaagacctggacagttagttacataccgctctggacttagtactcccatgagtggcttcccagttgacccttgtgcctgatagaattctaaaccctctggaatttccctgctggcgacttctatggccgtggctgtccgggtacctgattgccagatgctaggggctgatgagaactaagctgtgcggctggggcaccgtggggcccaaaaacgggctccggcggcattctgaaaccccggtagcacggggatgcccgactggctgaccaagtccggcgacctgccgcaccacgctatccagcacggcccaccggcagtcggaggcaaggcccaaaccccgagggggcacgcacacgtcaccc

SEQ ID NO: 589918 - DNA, 290 bp, Homo sapiens
  misc_feature (117)..(117): n is a, c, g, or t
  misc_feature (120)..(120): n is a, c, g, or t
agacaatcatgtggttgtggagcagagcatccctgagagcaccagcacttctgacctagcgggtgagcccagtgctgaaggggcttattggacaagcaggaaatcatcaattacccnaanctccaattcttgaggttaattgaagggcaaacttgaggccaaaaaaatttctaatcacatcagagggatatgtccctagccaagcctgtgggtgagaccttcccacagctgtcgcctggagaaatagaggtgagagaagggcccataccttcatctatgggcgcagtccc

SEQ ID NO: 589919 - DNA, 116 bp, Homo sapiens
acctaggcccacctggcaagcagcagagccaggctggtagccttggtgaagtcattcatctctttctagttctggagagctgagatagtaatgccagctctccagaactagaaaga

SEQ ID NO: 589920 - DNA, 285 bp, Homo sapiens
gccttgacccaagattcaaacatttcattaggtgggataaggagggtgaggtaaagtttatgcgaactagcagctgttagggtactttgtgcatttccatagcagatcacagcaggtgagggtttaatgcagattgccagtgcagacaaggacaaggcaggaacattggtgcctgccataagggaaaaatgcgaactggagagtgttcggaatgggaacaccccgtgcgactttagactaaagaatatattggggtgcccggctgatttttgtgtttttggtggg

SEQ ID NO: 589921 - DNA, 782 bp, Homo sapiens
tctctacaatgagagctacaaaacactgctcaaagaaatcagagatgacacagacaaatgggaaaacattccatgctaagggatgggaagaatcaatattattaaaatggcaatactatccaaagcaatttacagattcaatgctattcctatcaaactaacaatgatgtttttcacagaagtacaaaaaataattttaaaattcatatggaaccaaaaaagagtccaaatagccaagacaatcctaagcaaaagtacaaagctggaggcatcatgttaactgacttcaagctatacaacagagctacagtaatcaaaacagcatggtactggtacaaaaacaggcacatgaaccaatgaaacagaatagagagctcagaaataaggctatatacctaaaaccatctgatcttcaaacaaagctgacaaaaacaagcaatggtgaaaagactccccagttattcaataaacggtgctgagataactggctagccacatccaggaagattgaaactggacccctcgcttatacatatacaaaaaatcagtcaagatgcattaagtgacttaaatgtacaacttgaaggtataaaaactggaaaataaccaggcaatacatctggagtgggaaaggcaattattttcatgacaaagatgccaaaagcatgggacaagcaaaattgaaaaggttttattaattaagagttgaagaaagaatatagagaaagaggtcagatgggaaattgcatatttgaagtattcggttgggtaaagtggaaagt

SEQ ID NO: 589922 - DNA, 305 bp, Homo sapiens
  misc_feature (21)..(21): n is a, c, g, or t
  misc_feature (196)..(196): n is a, c, g, or t
ttacgctggccaatggcaggnttggggacatgtagacagggtggggttggtcccttcttgccacggtgagaagtcgtcgtcagcatcatcttccgcctggagagcagagaagccaaatgcccgtgggcttgcctcgggcacggaggtagagagctccggccaccaagccaagcagtgctccagcggcaagcacagnccccatgcctgctggcacaggtggggcttcaggcgccagaactgcctggggctgtgggggtgcacggagggggctggcaagagcatggatgatgccatggggccagcgg

SEQ ID NO: 589923 - DNA, 894 bp, Homo sapiens
ggggccccgggaagtgaaaaagcgggagctggtcttcctccagttccgcctgaacaagagtagtgaggacttcagcgccattgattacctcctcttctcttctttccaggagttcctgcaaagcccaaacagggtagggcttcatgcaggcctgtgagagtgcctattccagtctggaaagttctctgggggcttccgcacctgggtcaagatgtcactggtaaagaccaacggaggaggatgggcgtggaagcagtcggtagttccgtgcaggtagacaagtgtggttaatctacattgtaccagaggtcagttgccaaaaaaagtgctcaactgtttgtgtggtcttgaatggaaagatcctttcatccagaaaggtccaagatatagtcactgccattcctgtggaacacaatcgctcttctctgtggcgccttctgggctttattttaaagcagccggagttgtgccaacactgagtactacctatggctgactcaatgtcagaaagagattccttaacaagaagaggtcaggcaacgagccaataaagctgaagtcacctcgcgtgttagagactgtccacgatcaatggggaggtgtcatcacttccacttgtgtaagcgggcttatgcagaatcctgtactcagttgagaaaaggggctgctaggagggaagggatgtagactgatctacccgccaagagggggtaagccaatgagaggtaggaaacgtcagttttacttctattcttatcacttttagagcaaagaaaacaaaacaattggcggccgcacatattacaccaagtgggcggccataaaagatagcagacggggaggggggccaaggggccgcgcacgggttgcaccccacggacagaataaatacca

SEQ ID NO: 589924 - DNA, 143 bp, Homo sapiens
gataaagtgatccttaaaaaataaaaaactttagaaggtttagaatatatgtagggagagaaggaggaaaaaatacatttgtattcagagttaaatcttaaaaaaaaaagtgttttttaatatatgttcggggtttacgtgtc

SEQ ID NO: 589925 - DNA, 384 bp, Homo sapiens
  misc_feature (19)..(19): n is a, c, g, or t
  misc_feature (40)..(40): n is a, c, g, or t
  misc_feature (71)..(71): n is a, c, g, or t
  misc_feature (97)..(97): n is a, c, g, or t
tgttgttatgccccccaancccaacaccaaccaaccttcncccctggtgccagaggaagccccctgacccnaagctgccccattcacgtccctcccntgggagatgtgaagttgaggcctgtggaatgagagtgccccatcggagctggctgcttgagctggggaggaatagggagtgtgggctggctgggtacatagttaagcagagagcaagagggggaggaggcagatgcacagagaaaagcagagatgggaacctgggaatcagaaaacaaaagacaaaggacagacagatcgacacagacagaggctgcctccttcttgctggctttccagtccctaatgtccctaggtccaggcctcatgagagtttcctgtttctca

SEQ ID NO: 589926 - DNA, 792 bp, Homo sapiens
gacttccggtcgtcgtgagcgtaaggtgtgcgtgtcgtatctcaggtaaaacatggctaaaagcttacgggagctaggctggccggcacgaaagattgcgtgctgacaatgagatatgaagattgtcccccaaaggagtgccgagcagggcttgagaagtattctcaaaaactagacggtgatgtgtatagtgaaagaatgttccaagagatagcaaacttgtggtggtacccaaaaacctcaaaaaggtttgtccaaggagcaaaacatgcgtgtgtgaggtttaccctgtatgaaaataagtatgagctttgactgttgtgagaggtgtagtagtaacgatgaaacaagagaatgacgtcgttctacgaacccaagcatgtgtacgagtggctagatagtggatgaacccaaagggctggagaaaaagggctgatggggcaaaagtggagatggaaaaagaatggggtgaaataggcatcggcaaaaagtcagtagaaaacgttggcaagaggggtacagcggctggaatagagtctttcagaaaccctttgggaaaaattgccatccattgggatacgatgacgcggttaggacttgtttcctgatgtatacttttgagtttaatttggcgaccaatgtgaaatgccatttgttgctctatttcaacttggtccttatttgctgaatttcaaactcaggattagatcttgaaggattaggggtgggaacttgagtaaacatattggttggatacatccaaggtctactgatagatttaggtggatgtac

SEQ ID NO: 589927 - DNA, 101 bp, Homo sapiens
ttatctcccttggaaaaattcctctcactggaaatgtacatttcaatcatcctttaattgtacatttccagtgagaggatgattgaaatgtttaaaaaaaa

SEQ ID NO: 589928 - DNA, 187 bp, Homo sapiens
gggggggcccggggggaaaaagggggccccccaaaaatttttttgggtttttccccccccccccccccccgggggggtttgggggggggggtcccgggggggggggtttttttccccccccgggggggggggccttttttccgggcccccttaacccccccttttttttttttttttttttttcgga

SEQ ID NO: 589929 - DNA, 726 bp, Homo sapiens
aaactacggtaggtacgaggctgggtttcggatacaagagcaggtggaaaagtctgcttatgagtttgctgagactgaatctatgcttaaaatagcagaactatctgtgcaggaccgtatgtatcgggacatgtatgacctattgttcctgccaccatccttcccttatggtggcatggagaatccttgccttactttgtgtaactccgtactctactggcaggcgactagagtcaactcttccaatgtcgattgcaacatgatcatatctcatatcctggacaggcaatctcacgtgaccaactaaagacttgagtgcatcaccttttgagattaataatgagggacatacatgtgtactttggtaactgccacagtttgcgcgacgatgtgtttgagtgaaaacgtatctgacattatctaactcgcgtctgggcacgagagtagcggagagaacatacaggaattacggtaaatgacatttggtgagactcatcctttcagcaatacttgctgggttgattcatgacatgagtatacacccctggatggttgcttcacttcgttcatgttccctgatgaggaagggctcttgctttacgtttttcacccttgcaacagagcgtgctcgcgaggaccggcgatttcctagggttcttttgacgcctattgtttgcgccgtcttcctattagagcttactagtggtgactgggagatttcctgtt

SEQ ID NO: 589930 - DNA, 503 bp, Homo sapiens
  misc_feature (286)..(286): n is a, c, g, or t
cccaaatcggattgcgaagataggattacggatttgcaacattttggaggactaattaaaggctaggccaaacacatttacatagacttagcacgcttctgctcaaatttcgagtctatttcttttgaactacttttccaaaatggcaaaaccaaaaatataaaatttgcagggcagcccggagcttacgtttacaccaaatgctgctctttaattgcagctacctctccccacagaaccccttcccgccagctcagcgatccgagcaagacgcggctctcttttncgagcaactcttgagtccaaggcctgggcgaagctggcggagacaatcgcccaagtttgaaggggccgcgaagcttggcgggggaggtcggtgttggcgcctaggcccgtgtccccctccgcccccgtcctcccgcccggcccctgctgcccctcgcccgccgcggatcccgctcacttaccacgtacgaggagaaggcggcggcggcggcggccgc

SEQ ID NO: 589931 - DNA, 1013 bp, Homo sapiens
  misc_feature (562)..(562): n is a, c, g, or t
  misc_feature (644)..(644): n is a, c, g, or t
  misc_feature (653)..(654): n is a, c, g, or t
  misc_feature (660)..(660): n is a, c, g, or t
agcgggaagtgtcccctcctacttcttgctgcctcacggttgctgttgcagaccaggagtctctgaaggcttccgcggctttggggccggttgtgagatgccaggcagaggccgctgcccggactgcggctccacggagctggtggaagactcgcactattcgcagagccagctggcctggttacgagttctgagacttgacaaacggtctgtggtgaagcacatcggtgaccttctccagcaccgccagtcactggtccgctctgcctttcgggatgggacagcagaagtggagacccgactgcggctgcgtggtcaccgagggggtccttaccactaccttcagcgacgagggcaatctccgagaggtaacatattcccgaagcacaggggaaaacgaacaagttagtcgcagccagcaacgaggtctccggcgagtgagagacctttgtcgagttctgcagttgccaccaacatttgaggataccgcggttgcctactaccaacaggcatatcggcactctggcatccgagcggccaggctgcaaaagaaggaggtgtnggttgggtgctgcgtcttaatcacctgccgacagcataactggcccctaacaatgggggccatctgcacgctgttgtatgcngatttgganngtgttntctagcacttacatgcagatagtgaagctcctgggactggatgtgccatctctgtgcttggcagaactggtgaagacctattgcagcagacttcaaactgtaccaagcattcagcttcttgtgccagccaaatacgtggaagaccaaagagaagattggtgtctcgaacaaatgcaggatggtggaggctggcacactgagaacgtagctaggttgacctgggatgccaatccacttgcccgtcattactgctagcgaaatttcctggccttgcgaagccgtacgcagcctgacacactcgccgatacatcttcgcgttccccgattttgtaactcatgcacagtgtgacctg

SEQ ID NO: 589932 - DNA, 432 bp, Homo sapiens
gtcggcttcctgcctcggaagcgcagcagcagaatgcatcggatgggaaggtgaagagcttccctaaggatgacccgattcaagccggtccacctcacagacttcctgggatacaaggctgtgcatgactcacatcgtgacgggaagtcgaaagggcgagagatccaagagtgaacaagtaaggtagcgtgtgtgtgaggacattgtgaaccacttgtcacgaagacagctcacctcactggatgagcttggtgagtgcatgtgctgtgcgccttaaccgactagggacacacaccccttcgacagagagacgtcacagaggaaggctatccacagaagcgtagattctataggcatagtaagacacacatcagacggcaggtgacactgtcgatcagaaagagaccgatcgacacgatactagacgtaaaa

SEQ ID NO: 589933 - DNA, 103 bp, Homo sapiens
ggggtggtctagaggatcccatgccaataacctcccaaaacctagacacagtatcactgtggaaacagagtaatagttctgggaatcgattgaggattaggtt

SEQ ID NO: 589934 - DNA, 429 bp, Homo sapiens
  misc_feature (55)..(55): n is a, c, g, or t
cgccccagggcaaaagggggttttctgagcagctgggtagtggttattcttgggncctgacctctggcctcaatcgggttccttaggaagacacaccgggaaatttgtcattgccccttcacccaaaatggatatcagcaaggggaaaatccccaaacttctttttgatgctttcttcaagaagaagaagctggggaagccccgcccccaggaaggggggtttttcgccccagaaaaaaagaaatttgggatttcggggcagggcaagattggtcagaaagctgggggctcccaaattttcccaaaaatcaaagctattccccagctccaggggtccctgcgatttgggtttgctctgaggaatgggatttatccccccaaatgggggttttaaatgttttaagaccctaattaaaaagctggccccca

SEQ ID NO: 589935 - DNA, 890 bp, Homo sapiens
  misc_feature (439)..(439): n is a, c, g, or t
  misc_feature (521)..(521): n is a, c, g, or t
  misc_feature (530)..(531): n is a, c, g, or t
  misc_feature (537)..(537): n is a, c, g, or t
agcgggaagtgtcccctcctacttcttgctgcctcacggttgctgttgcagaccaggagtctctgaaggcttccgcggctttggggccggttgtgagatgccaggcagaggccgctgcccggactgcggctccacggagctggtggaagactcgcactattcgcagagccagctgggactgcggctgcgtggtcaccgagggggtccttaccactaccttcagcgacgagggcaatctccgagaggtaacatattcccgaagcacaggggaaaacgaacaagttagtcgcagccagcaacgaggtctccggcgagtgagagacctttgtcgagttctgcagttgccaccaacatttgaggataccgcggttgcctactaccaacaggcatatcggcactctggcatccgagcggccaggctgcaaaagaaggaggtgtnggttgggtgctgcgtcttaatcacctgccgacagcataactggcccctaacaatgggggccatctgcacgctgttgtatgcngatttgganngtgttntctagcacttacatgcagatagtgaagctcctgggactggatgtgccatctctgtgcttggcagaactggtgaagacctattgcagcagacttcaaactgtaccaagcattcagcttcttgtgccagccaaatacgtggaagaccaaagagaagattggtgtctcgaacaaatgcaggatggtggaggctggcacactgagaacgtagctaggttgacctgggatgccaatccacttgcccgtcattactgctagcgaaatttcctggccttgcgaagccgtacgcagcctgacacactcgccgatacatcttcgcgttccccgattttgtaactcatgcacagtgtgacctg

SEQ ID NO: 589936 - DNA, 412 bp, Homo sapiens
aaatatatgcaagagttcatgtttacattctgatttgatatcacaatcaataaaatctttgaagaagtttgtaagttctgggttgttgctatagatccagatagggaaaaaagtcctttacctttcctcaaaaggtaccttcccttgacaagtaagttaggtttctgcttttataatttaggttatgtactcagtttaccatggctttcttctacttaccagtgacttgataaaccaatgtttaaaaaacccaattacacatttttacacaatttgggttctatttaaaaaaaaaccgtggctctactctttaaatatggagcctaaccttgattcataaataccgtccctcttgaaaatggtcctcagctcaggcttctcatacctctgtgaacctagaattagcacgagt

SEQ ID NO: 589937 - DNA, 388 bp, Homo sapiens
  misc_feature (147)..(147): n is a, c, g, or t
tttaggccgagcatctcctacctaagaggctctgagaggggaccctgtgctgtcccatagcgctcagtcgactcagcaggcacctctttgcttccccactggccaggctgatcccctcagagaaatgatggaaacggaggagtacanggatcaagttcctttttttggtggtggatctaggactatgtaaaaaacactttggtagattttcagaggatcctggtaagtttagagatgaatttgttaaaactaaatcttgccttttcattgacgtggcaggatgtaatggtcactttgcagtactgatgaaaagcaacacatatctggaaaggctaaggaatatgccgagtagccaggtggtcactaaagaccaatatgcagtcatctg

SEQ ID NO: 589938 - DNA, 208 bp, Homo sapiens
gacagcctctgggagctcgaggttgaacgtgtacagcagggatgatgtgagggtaatgagccccggaaagtcggtgtccgggaaagcgagggcctccacgtaaaagtccatgttgtgctttctaacgggcaccatcaggtagtgcgagggccacttgggaccacaatagtacgctgcacttagaggattagtttgccccgatgtggcc

SEQ ID NO: 589939 - DNA, 633 bp, Homo sapiens
gcagtactctcccgggtatggtagcgaggctgggtggcgccatcatcagcccctaccctgcctgctctaagggtagaaaactccagggtcccctgccaccgactgcccagccactccaagccccctggcagctgccctcctggagcagaaagtgcctttatctcagccatccgcagactgctcggcagatgcggggacaggctggaatgagggaggcgtcttcatctccctgccatccccctctcacgccacccccgccccaccggactgcatgtgctgctgatgcgctgggatctgattgaggataaaaaggaaggagagatgacccctacccctcatcccccagttttgaaaaggtctaagcaagtgagtctggtggaggagctgagggagggagccatggtaaggtgccagaaggaaggttggcgggggcacgtgtggagccgatgagcgttgtggctggtcagcagtggcgtgagctgcctggcgccgtgctcctgccgcaagtgacgaggcaagtgtgttgtgtgctacatgtgtatgcgtgtccagactgtctgtcgtagtgtctgggtttggccaagactgggctgaagttaccattaatgcccaggcagcaccctgccatcaacc

SEQ ID NO: 589940 - DNA, 5690 bp, Homo sapiens
tctcccgggagccactcccctgggcgcctctccagcccctgggctggaagcaccagcaaccctggggatggggcagaccctcacagcccggggtctggagccggtgtcggagctcacatgggcccatgacctctccagacatttggcaaaatcaaggcccttagaccagggacagacccaagcccaggccctcccagaggtcataggacgcaaccctttgtgcccttgggctatggaagaggtttgggaacggctttggggtggaagatggccaaaggagcagcttggccaggtgaggatgaggcagggcagacacaggccagtggggcgtgccatgtgccacagatggagaggaccaggagccagtggcccggcaggcacagcccggttggcgtgggccagagcgcccatcactgacccgtgagaactcgactgcccctgccagctctggcactgccccctcccagccgccccgccctagcaccctggggggcaccccgcccaaccgtggcctggtccggcccctcccgccctttgctccagttcccgggcttggcacctatagtgggggtgccgcccgcctgccaggctccggggccgggcccacgggagggtggggcggctgggaagctggcacgctgccccgggggagcctctgtcggcaggcgcccgggtgccgcgggggggagggggaacaaagggctcattctccccgtgcgcagccggtggcatcgccggggcgttggcggaagcccccggggcccgggagggggccggcccaggcgcggccgccgaatcacgggctcctgtttcccgcagggtgctggaggaggaaaccggcggagcagcttccccactctcagttgcgcgtctggcgatggcgatcagaggtcgtgctgcgctctccgccgcgctctacctccattagccgcgctgcgcggtgctgcgccctcgccggtgcctctctcctgggtcccaggatcggcccccaccatccaggcacgacccccttccccggcccctcggcctttcccccaactcggccatctccgacccggggcgcgtgttccccccggcccggcgccttctctccctccgggggcacccgctccctagccccggcccggccctccccgcggcgcagcacggagtctcggcgtcccatggcgcaacctacggcctcggcccagaagctggtgcggccgatccgcgccgtgtgccgcatcctgcagatcccggagtccgacccctccaacctgcggccctagagcgcccccgccgccccgggggaaggagagcgcgagcgcgctgagcagacagagcgggagaacgcgtcctcgcccgccggccgggaggccccggagctggcccatggggagcaggcgcccggtgccggccacgacgaccgccaccgcccgcgccgcgaccggccggtgaagcccagggacccccctctgggagagccccatgagggcaggagagtgatggagagtacgcccagcttcctgaagggcaccccaacctgggagaagacggccccagagaacggcatcgtgagacaggagcccggcagcccgcctcgagatggactgcaccatgggccgctgtgcctgggagagcctgctcccttttggaggggcgtcctgagcaccccagactcctggcttccccctggcttcccccagggccccaaggacatgctcccacttgtggagggcgagggcccccagaatggggagaggaaggtcaactggctgggcagcaaagagggactgcgctggaaggaggccatgcttacccatccgctggcattctgcgggccagcgtgcccacctcgctgtggccccctgatgcctgagcatagtggtggccatctcaagagtgaccctgtggccttccggccctggcactgccctttccttctggagaccaagatcctggagcgagctcccttctgggtgcccacctgcttgccaccctacctagtgtctggcctgcccccagagcatccatgtgactggcccctgaccccgcacccctgggtatactccgggggccagcccaaagtgccctctgccttcagcttaggcagcaagggcttttactacaaggatccgagcattcccaggttggcaaaggagcccttggcagctgcggaacctgggttgtttggcttaaactctggtgggcacctgcagagagccggggaggccgaacgcccttcactgcaccagagggatggagagatgggagctggccggcagcagaatccttgcccgctcttcctggggcagccagacactgtgccctggacctcctggcccgcttgtcccccaggccttgttcatactcttggcaacgtctgggctgggccaggcgatgggaaccttgggtaccagctggggccaccagcaacaccaaggtgcccctctcctgagccgcctgtcacccagcggggctgctgttcatcctacccacccactaaaggtggggatcttggcccttgtgggaagtgccaggagggcctggaggggggtgccagtggagccagcgaacccagcgaggaagtgaacaaggcctctggccccagggcctgtccccccagccaccacaccaagctgaagaagacatggctcacacggcactcggagcagtttgaatgtccacgcggctgccctgaggtcgaggagaggccggttgctcggctccgggccctcaaaagggcaggcagccccgaggtccagggagcaatgggcagtccagcccccaagcggccaccggaccctttcccaggcactgcagaacagggggctgggggttggcaggaggtgcgggacacatcgatagggaacaaggatgtggactcgggacagcatgatgagcagaaaggaccccaagatggccaggccagtctccaggacccgggacttcaggacataccatgcctggctctccctgcaaaactggctcaatgccaaagttgtgcccaggcagctggagagggaggagggcacgcctgccactctcagcaagtgcggagatcgcctctgggaggggagctgcagcaggaggaagacacagccaccaactccagctctgaggaaggcccagggtccggccctgacagccggctcagcacaggcctcgccaagcacctgctcagtggtttgggggaccgactgtgccgcctgctgcggagggagcgggaggccctggcttgggcccagcgggaaggccaagggccagccgtgacagaggacagcccaggcattccacgctgctgcagccgttgccaccatggactcttcaacacccactggcgatgtccccgctgcagccaccggctgtgtgtggcctgtggtcgtgtggcaggcactgggcgggccagggagaaagcaggctttcaggagcagtccgcggaggagtgcacgcaggaggccgggcacgctgcctgttccctgatgctgacccagtttgtctccagccaggctttggcagagctgagcactgcaatgcaccaggtctgggtcaagtttgatatccgggggcactgcccctgccaagctgatgcccgggtatgggcccccggggatgcaggccagcagaaggaatcaacacagaaaacgcccccaactccacaaccttcctgcaatggcgacacccacaggaccaagagcatcaaagaggagacccccgattccgctgagaccccagcagaggaccgtgctggccgagggcccctgccttgtccttctctctgcgaactgctggcttctaccgcggtcaaactctgcttgggccatgagcgaatacacatggccttcgcccccgtcactccggccctgcccagtgatgaccgcatcaccaacatcctggacagcattatcgcacaggtggtggaacggaagatccaggagaaagccctggggccggggcttcgagctggcccgggtctgcgcaagggcctgggcctgcccctctctccagtgcggccccggctgcctcccccaggggctttgctgtggctgcaggagccccagccttgccctcggcgtggcttccacctcttccaggagcactggaggcagggccagcctgtgttggtgtcagggatccaaaggacattgcagggcaacctgtgggggacagaagctcttggggcacttggaggccaggtgcaggcgctgagccccctcggacctccccagcccagcagcctgggcagcacaacattctgggagggcttctcctggcctgagcttcgcccaaagtcagacgagggctctgtcctcctgctgcaccgagctttgggggatgaggacaccagcagggtggagaacctagctgccagtctgccacttccggagtactgcgccctccatggaaaactcaacctggcttcctacctcccaccgggccttgccctgcgtccactggagccccagctctgggcagcctatggtgtgagcccgcaccggggacacctggggaccaagaacctctgtgtggaggtggccgacctggtcagcatcctggtgcatgccgacacaccactgcctgcctggcaccgggcacagaaagacttcctttcaggcctggacggggaggggctctggtctccgggcagccaggtcagcactgtgtggcacgtgttccgggcacaggacgcccagcgcatccgccgctttctccagatggtgtgcccggccggggcaggcgccctggagcctggcgccccaggcagctgctacctggatgcagggctgcggcggcgcctgcgggaggagtggggcgtgagctgctggaccctgctccaggcccccggagaggccgtgctggtgcctgcaggggctccccaccaggtgcagggcctggtgagcacagtcagcgtcactcagcacttcctctcccctgagacctctgccctctctgctcagctctgccaccagggacccagccttccccctgactgccacctgctttatgcccagatggactgggctgtgttccaagcagtgaaggtggccgtggggacattacaggaggccaaatagagggatgctaggtgtctgggatcggggtggggacaggtagaccaggtgctcagcccaggcacaacttcagcaggggatggcgctaggggacttggggatttctggtcaaccccacaagcaccactctgggcacaagcagggcactctgttcccctcccccttaagccaacaaccacagtgccaccaagctcacacctgtccttctcaggctggcatctcccccaccctgtgccccttttaatggtaccaggcccgcactgggggcaattgacttcctccaatccccactcctccgagacccaggagacaaacagcccttccttggggaaacttgggaatcattctggcttaaacaacacctcctcctgctgctcactcccgctgagcccactctactgccccagctccgtttctaccaccgcatcctcactgggctcactgcaggcatgctgaacaaggggcctccaaccttctgccctcctgccaaaagatctggggagtgtgaggagagggtggcatcaggagctgctcaggcttggcggagggagcggcatgggcgatgtcactcagccccttcccggtccgcccgcttccctccttcatgatttccattaaagtctgttgttttgtgactgc

SEQ ID NO: 589941 - DNA, 950 bp, Homo sapiens
tggactggccaatttcatttcaatgacctgggtggggatgttggtttaatccaggagagtagtttatccagacaagaccataggaagaaagaaaagaaaaaaagaaaatcatttatcccacgtgaaagcttttaaaaccattttgccagttcatgtcactatttaatatcggattgtgacccaaagagtctttctacatatctctggtatggctactgaatacagccagatttatatttggaagagtgctgggttggttttaggtttgggctttaaaaacaatgcaaaaaaaaaagcgcttaaaacaaaccaaaacaaaaaagcgcgatgtgggatagtgctcttcaattaacacttcccctttaaaactgtagtttgcgaaagtgggcagtaggaggggtaagcctccttcgtgccctccttgttgctccccgttgtgggcccacccaatcccttctcagagccaacacaggtggctgtggttggtcacgaacacggtgtgctaataccgggcctcccattgtgcacgttgaacctcgtgggcttcatttttggcaaaatccatttccaaaaagtctccaggtatgcccgtgtaaagttgtccccacgagtggcctcattaccttggtttccacccgtgaggtgagtgacgctggacacaggccccattttttagccagcggtctcaccgggggcgatggaaaacaaagaagccaagtgtccttgccagctgcccaggattagaaaggccctgtgtgaaaatcttacagtttggggttcgcaccaataaacccgtgcaaggggggggtccaacccatgtcctggaatggctctgaagagagaattgtaaccccccaggtgttgaaaagaatttctcctcaaggcccagaagatattcctaggaaaacacgtggaaatggttatcccctcctattgggcccacataaaac

SEQ ID NO: 589942 - DNA, 338 bp, Homo sapiens
cacagcagctcacatgggactcagtgacaatgtcagcaacacaccatggaaggagaacaaacccgaaaaaaactatatattaccatactaatcctactacaactattcctaattatccccttcaccgccagcgaactaatcctattctatatcctattcgaagcaacactagtacccacactaattatcatcacacgctgaggaaaccaaacagaacgactcaatgcaggactttatttcctattctacaccctagcaggatccctaccactgctagtagcactagtttatatcctaaataccacaggctcactaaacttccctgttcggtttatact

SEQ ID NO: 589943 - DNA, 5244 bp, Homo sapiens
tctcccgggagccactcccctgggcgcctctccagcccctgggctggaagcaccagcaaccctggggatggggcagaccctcacagcccggggtctggagccggtgtcggagctcacatgggcccatgacctctccagacatttggcaaaatcaaggcccttagaccagggacagacccaagcccaggccctcccagaggtcataggacgcaaccctttgtgcccttgggctatggaagaggtttgggaacggctttggggtggaagatggccaaaggagcagcttggccaggtgaggatgaggcagggcagacacaggccagtggggcgtgccatgtgccacagatggagaggaccaggagccagtggcccggcaggcacagcccggttggcgtgggccagagcgcccatcactgacccgtgagaactcgactgcccctgccagctctggcactgccccctcccagccgccccgccctagcaccctggggggcaccccgcccaaccgtggcctggtccggcccctcccgccctttgctccagttcccgggcttggcacctatagtgggggtgccgcccgcctgccaggctccggggccgggcccacgggagggtggggcggctgggaagctggcacgctgccccgggggagcctctgtcggcaggcgcccgggtgccgcgggggggagggggaacaaagggctcattctccccgtgcgcagccggtggcatcgccggggcgttggcggaagcccccggggcccgggagggggccggcccaggcgcggccgccgaatcacgggctcctgtttcccgcagggtgctggaggaggaaaccggcggagcagcttccccactctcagttgcgcgtctggcgatggcgatcagaggtcgtgctgcgctctccgccgcgctctacctccattagccgcgctgcgcggtgctgcgccctcgccggtgcctctctcctgggtcccaggatcggcccccaccatccaggcacgacccccttccccggcccctcggcctttcccccaactcggccatctccgacccggggcgcgtgttccccccggcccggcgccttctctccctccgggggcacccgctccctagccccggcccggccctccccgcggcgcagcacggagtctcggcgtcccatggcgcaacctacggcctcggcccagaagctggtgcggccgatccgcgccgtgtgccgcatcctgcagatcccggagtccgacccctccaacctgcggccctagagcgcccccgccgccccgggggaaggagagcgcgagcgcgctgagcagacagagcgggagaacgcgtcctcgcccgccggccgggaggccccggagctggcccatggggagcaggcgcccggtgccggccacgacgaccgccaccgcccgcgccgcgaccggccggtgaagcccagggacccccctctgggagagccccatgagggcaggagagtgatggagagtacgcccagcttcctgaagggcaccccaacctgggagaagacggccccagagaacggcatcgtgagacaggagcccggcagcccgcctcgagatggactgcaccatgggccgctgtgcctgggagagcctgctcccttttggaggggcgtcctgagcaccccagactcctggcttccccctggcttcccccagggccccaaggacatgctcccacttgtggagggcgagggcccccagaatggggagaggaaggtcaactggctgggcagcaaagagggactgcgctggaaggaggccatgcttacccatccgctggcattctgcgggccagcgtgcccacctcgctgtggccccctgatgcctgagcatagtggtggccatctcaagagtgaccctgtggccttccggccctggcactgccctttccttctggagaccaagatcctggagcgagctcccttctgggtgcccacctgcttgccaccctacctagtgtctggcctgcccccagagcatccatgtgactggcccctgaccccgcacccctgggtatactccgggggccagcccaaagtgccctctgccttcagcttaggcagcaagggcttttactacaaggatccgagcattcccaggttggcaaaggagcccttggcagctgcggaacctgggttgtttggcttaaactctggtgggcacctgcagagagccggggaggccgaacgcccttcactgcaccagagggatggagagatgggagctggccggcagcagaatccttgcccgctcttcctggggcagccagacactgtgccctggacctcctggcccgcttgtcccccaggccttgttcatactcttggcaacgtctgggctgggccaggcgatgggaaccttgggtaccagctggggccaccagcaacaccaaggtgcccctctcctgagccgcctgtcacccagcggggctgctgttcatcctacccacccactaaaggtggggatcttggcccttgtgggaagtgccaggagggcctggaggggggtgccagtggagccagcgaacccagcgaggaagtgaacaaggcctctggccccagggcctgtccccccagccaccacaccaagctgaagaagacatggctcacacggcactcggagcagtttgaatgtccacgcggctgccctgaggtcgaggagaggccggttgctcggctccgggccctcaaaagggcaggcagccccgaggtccagggagcaatgggcagtccagcccccaagcggccaccggaccctttcccaggcactgcagaacagggggctgggggttggcaggaggtgcgggacacatcgatagggaacaaggatgtggactcgggacagcatgatgagcagaaaggaccccaagatggccaggccagtctccaggacccgggacttcaggacataccatgcctggctctccctgcaaaactggctcaatgccaaagttgtgcccaggcagctggagagggaggagggcacgcctgccactctcagcaagtgcggagatcgcctctgggaggggagctgcagcaggaggaagacacagccaccaactccagctctgaggaaggcccagggtccggccctgacagccggctcagcacaggcctcgccaagcacctgctcagtggtttgggggaccgactgtgccgcctgctgcggagggagcgggaggccctggcttgggcccagcgggaaggccaagggccagccgtgacagaggacagcccaggcattccacgctgctgcagccgttgccaccatggactcttcaacacccactggcgatgtccccgctgcagccaccggctgtgtgtggcctgtggtcgtgtggcaggcactgggcgggccagggagaaagcaggctttcaggagcagtccgcggaggagtgcacgcaggaggccgggcacgctgcctgttccctgatgctgacccagtttgtctccagccaggctttggcagagctgagcactgcaatgcaccaggtctgggtcaagtttgatatccgggggcactgcccctgccaagctgatgcccgggtatgggcccccggggatgcaggccagcagaaggaatcaacacagaaaacgcccccaactccacaaccttcctgcaatggcgacacccacaggaccaagagcatcaaagaggagacccccgattccgctgagaccccagcagaggaccgtgctggccgagggcccctgccttgtccttctctctgcgaactgctggcttctaccgcggtcaaactctgcttgggccatgagcgaatacacatggccttcgcccccgtcactccggccctgcccagtgatgaccgcatcaccaacatcctggacagcattatcgcacaggtggtggaacggaagatccaggagaaagccctggggccggggcttcgagctggcccgggtctgcgcaagggcctgggcctgcccctctctccagtgcggccccggctgcctcccccaggggctttgctgtggctgcaggagccccagccttgccctcggcgtggcttccacctcttccaggagcactggaggcagggccagcctgtgttggtgtcagggatccaaaggacattgcagggcaacctgtgggggacagaagctcttggggcacttggaggccaggtgcaggcgctgagccccctcggacctccccagcccagcagcctgggcagcacaacattctgggagggcttctcctggcctgagcttcgcccaaagtcagacgagggctctgtcctcctgctgcaccgagctttgggggatgaggacaccagcagggtggagaacctagctgccagtctgccacttccggagtactgcgccctccatggaaaactcaacctggcttcctacctcccaccaggtgcagggcctggtgagcacagtcagcgtcactcagcacttcctctcccctgagacctctgccctctctgctcagctctgccaccagggacccagccttccccctgactgccacctgctttatgcccagatggactgggctgtgttccaagcagtgaaggtggccgtggggacattacaggaggccaaatagagggatgctaggtgtctgggatcggggtggggacaggtagaccaggtgctcagcccaggcacaacttcagcaggggatggcgctaggggacttggggatttctggtcaaccccacaagcaccactctgggcacaagcagggcactctgttcccctcccccttaagccaacaaccacagtgccaccaagctcacacctgtccttctcaggctggcatctcccccaccctgtgccccttttaatggtaccaggcccgcactgggggcaattgacttcctccaatccccactcctccgagacccaggagacaaacagcccttccttggggaaacttgggaatcattctggcttaaacaacacctcctcctgctgctcactcccgctgagcccactctactgccccagctccgtttctaccaccgcatcctcactgggctcactgcaggcatgctgaacaaggggcctccaaccttctgccctcctgccaaaagatctggggagtgtgaggagagggtggcatcaggagctgctcaggcttggcggagggagcggcatgggcgatgtcactcagccccttcccggtccgcccgcttccctccttcatgatttccattaaagtctgttgttttgtgactgc

SEQ ID NO: 589944 - DNA, 404 bp, Homo sapiens
ggcacgcgaggagagagagcgcgagatagacactgccgccttctgtgtcgtggggcatactctctgttgtcagacctcgtgctgcctcgtgccctgtgtccctgtgtgtggatccccaaggagaggctgtccacaagacagatacactccacacatgatcaggatcacaccaacctctaacaagagcacccccaacctggctgagttcggctctaggctataccggcaggtggcacacacagtccaacacggccaatatctctttctccccagagagcattggttcaggctttgcaatgctctccctggggaccaagggtgacactcacaaagaaatcccggagggcccgaatttcaacctcacggagattcccgaggctctacacgaaggctctcagctccct

SEQ ID NO: 589945 - DNA, 6791 bp, Homo sapiens
tctcccgggagccactcccctgggcgcctctccagcccctgggctggaagcaccagcaaccctggggatggggcagaccctcacagcccggggtctggagccggtgtcggagctcacatgggcccatgacctctccagacatttggcaaaatcaaggcccttagaccagggacagacccaagcccaggccctcccagaggtcataggacgcaaccctttgtgcccttgggctatggaagaggtttgggaacggctttggggtggaagatggccaaaggagcagcttggccaggtgaggatgaggcagggcagacacaggccagtggggcgtgccatgtgccacagatggagaggaccaggagccagtggcccggcaggcacagcccggttggcgtgggccagagcgcccatcactgacccgtgagaactcgactgcccctgccagctctggcactgccccctcccagccgccccgccctagcaccctggggggcaccccgcccaaccgtggcctggtccggcccctcccgccctttgctccagttcccgggcttggcacctatagtgggggtgccgcccgcctgccaggctccggggccgggcccacgggagggtggggcggctgggaagctggcacgctgccccgggggagcctctgtcggcaggcgcccgggtgccgcgggggggagggggaacaaagggctcattctccccgtgcgcagccggtggcatcgccggggcgttggcggaagcccccggggcccgggagggggccggcccaggcgcggccgccgaatcacgggctcctgtttcccgcagggtgctggaggaggaaaccggcggagcagcttccccactctcagttgcgcgtctggcgatggcgatcagaggtcgtgctgcgctctccgccgcgctctacctccattagccgcgctgcgcggtgctgcgccctcgccggtgcctctctcctgggtcccaggatcggcccccaccatccaggcacgacccccttccccggcccctcggcctttcccccaactcggccatctccgacccggggcgcgtgttccccccggcccggcgccttctctccctccgggggcacccgctccctagccccggcccggccctccccgcggcgcagcacggagtctcggcgtcccatggcgcaacctacggcctcggcccagaagctggtgcggccgatccgcgccgtgtgccgcatcctgcagatcccggagtccgacccctccaacctgcggccctagagcgcccccgccgccccgggggaaggagagcgcgagcgcgctgagcagacagagcgggagaacgcgtcctcgcccgccggccgggaggccccggagctggcccatggggagcaggcgcccggtgccggccacgacgaccgccaccgcccgcgccgcgaccggccggtgaagcccagggacccccctctgggagagccccatgagggcaggagagtgatggagagtacgcccagcttcctgaagggcaccccaacctgggagaagacggccccagagaacggcatcgtgagacaggagcccggcagcccgcctcgagatggactgcaccatgggccgctgtgcctgggagagcctgctcccttttggaggggcgtcctgagcaccccagactcctggcttccccctggcttcccccagggccccaaggacatgctcccacttgtggagggcgagggcccccagaatggggagaggaaggtcaactggctgggcagcaaagagggactgcgctggaaggaggccatgcttacccatccgctggcattctgcgggccagcgtgcccacctcgctgtggccccctgatgcctgagcatagtggtggccatctcaagagtgaccctgtggccttccggccctggcactgccctttccttctggagaccaagatcctggagcgagctcccttctgggtgcccacctgcttgccaccctacctagtgtctggcctgcccccagagcatccatgtgactggcccctgaccccgcacccctgggtatactccgggggccagcccaaagtgccctctgccttcagcttaggcagcaagggcttttactacaaggatccgagcattcccaggttggcaaaggagcccttggcagctgcggaacctgggttgtttggcttaaactctggtgggcacctgcagagagccggggaggccgaacgcccttcactgcaccagagggatggagagatgggagctggccggcagcagaatccttgcccgctcttcctggggcagccagacactgtgccctggacctcctggcccgcttgtcccccaggccttgttcatactcttggcaacgtctgggctgggccaggcgatgggaaccttgggtaccagctggggccaccagcaacaccaaggtgcccctctcctgagccgcctgtcacccagcggggctgctgttcatcctacccacccactaaaggtggggatcttggcccttgtgggaagtgccaggagggcctggaggggggtgccagtggagccagcgaacccagcgaggaagtgaacaaggcctctggccccagggcctgtccccccagccaccacaccaagctgaagaagacatggctcacacggcactcggagcagtttgaatgtccacgcggctgccctgaggtcgaggagaggccggttgctcggctccgggccctcaaaagggcaggcagccccgaggtccagggagcaatgggcagtccagcccccaagcggccaccggaccctttcccaggcactgcagaacagggggctgggggttggcaggaggtgcgggacacatcgatagggaacaaggatgtggactcgggacagcatgatgagcagaaaggaccccaagatggccaggccagtctccaggacccgggacttcaggacataccatgcctggctctccctgcaaaactggctcaatgccaaagttgtgcccaggcagctggagagggaggagggcacgcctgccactctcagcaagtgcggagatcgcctctgggaggggagctgcagcaggaggaagacacagccaccaactccagctctgaggaaggcccagggtccggccctgacagccggctcagcacaggcctcgccaagcacctgctcagtggtttgggggaccgactgtgccgcctgctgcggagggagcgggaggccctggcttgggcccagcgggaaggccaagggccagccgtgacagaggacagcccaggcattccacgctgctgcagccgttgccaccatggactcttcaacacccactggcgatgtccccgctgcagccaccggctgtgtgtggcctgtggtcgtgtggcaggcactgggcgggccagggagaaagcaggctttcaggagcagtccgcggaggagtgcacgcaggaggccgggcacgctgcctgttccctgatgctgacccagtttgtctccagccaggctttggcagagctgagcactgcaatgcaccaggtctgggtcaagtttgatatccgggggcactgcccctgccaagctgatgcccgggtatgggcccccggggatgcaggccagcagaaggaatcaacacagaaaacgcccccaactccacaaccttcctgcaatggcgacacccacaggaccaagagcatcaaagaggagacccccgattccgctgagaccccagcagaggaccgtgctggccgagggcccctgccttgtccttctctctgcgaactgctggcttctaccgcggtcaaactctgcttgggccatgagcgaatacacatggccttcgcccccgtcactccggccctgcccagtgatgaccgcatcaccaacatcctggacagcattatcgcacaggtggtggaacggaagatccaggagaaagccctggggccggggcttcgagctggcccgggtctgcgcaagggcctgggcctgcccctctctccagtgcggccccggctgcctcccccaggggctttgctgtggctgcaggagccccagccttgccctcggcgtggcttccacctcttccaggagcactggaggcagggccagcctgtgttggtgtcagggatccaaaggacattgcagggcaacctgtgggggacagaagctcttggggcacttggaggccaggtgcaggcgctgagccccctcggacctccccagcccagcagcctgggcagcacaacattctgggagggcttctcctggcctgagcttcgcccaaagtcagacgagggctctgtcctcctgctgcaccgagctttgggggatgaggacaccagcagggtggagaacctagctgccagtctgccacttccggagtactgcgccctccatggaaaactcaacctggcttcctacctcccaccgggccttgccctgcgtccactggagccccagctctgggcagcctatggtgtgagcccgcaccggggacacctggggaccaagaacctctgtgtggaggtggccgacctggtcagcatcctggtgcatgccgacacaccactgcctgcctggcaccgggcacagaaagacttcctttcaggcctggacggggaggggctctggtctccgggcagccaggtcagcactgtgtggcacgtgttccgggcacaggacgcccagcgcatccgccgctttctccagatggtgtgcccggccggggcaggcgccctggagcctggcgccccaggcagctgctacctggatgcagggctgcggcggcgcctgcgggaggagtggggcgtgagctgctggaccctgctccaggcccccggagaggccgtgctggtgcctgcaggggctccccaccaggtgcagggcctggtgagcacagtcagcgtcactcagcacttcctctcccctgagacctctgccctctctgctcagctctgccaccagggacccagccttccccctgactgccacctgctttatgcccagatggactgggctgtgttccaagcagtgaaggtggccgtggggacattacaggaggccaaatagagggatgctaggtgtctgggatcggggtggggacaggtagaccaggtgctcagcccaggcacaacttcagcaggggatggcgctaggggacttggggatttctggtcaaccccacaagcaccactctgggcacaagcagggcactctgttcccctcccccttaagccaacaaccacagtgccaccaagctcacacctgtccttctcaggctggcatctcccccaccctgtgccccttttaatggtaccaggcccgcactgggggcaattgacttcctccaatccccactcctccgagacccaggagacaaacagcccttccttggggaaacttgggaatcattctggcttaaacaacacctcctcctgctgctcactcccgctgagcccactctactgccccagctccgtttctaccaccgcatcctcactgggctcactgcaggcatgctgaacaaggggcctccaaccttctgccctcctgccaaaagatctggggagtgtgaggagagggtggcatcaggagctgctcaggcttggcggagggagcggcatgggcgatgtcactcagccccttcccggtccgcccgcttccctccttcatgatttccattaaagtctgttgttttgtgactgctgccagtgtggttggccctgcccctgcaggccacatggtccagggagggagggggacatggaaatctgccttagagacaaatggagtagggcagcccggagctggggcccaagggacaggacaccactgcctgctcttcgtctggggcctggggccttgcctcccactgaggagactttgggtggggtggggggctgtcccccaaagatgctcctgagtgcaagagcaggcaaggcagagtcctggggcacagccacgaggtgacctccctgtgcagagactcccgagccctactccacccagcaagctccagtccgccccatctctcccgtctaccctgacctggagatccagaagtatggcccagaagagcccttgccccgcctgtctgcccttggtggcagtggccatggccgacgccaggcccagccaccctgggactgagcctgactgcttcagacagccgacccctccttgtccccgctccacgcccgcagcctcctggtggcgctccgccctctcccgcttcctttgtgtatctcagccctacaaagaaaaacactcccactcttgtcatacctaattgttcctgctgtggtttggggaattttttttattaaataaagttttttattataagggtaaaaaaaaaaaaaaaaaaaaaaaaaaaaaaaaaaaaaaaaaaaaaaaaaaaaaaaaaaaaaaaaaaaaaaaagggggcgggcgcgcccaaaaaaatcacatcgccgcgggcgggggcaccacatgaagcccacccccccctcatctttcgtgtaaggagggggccaccacataaggagtacgctaaataaaacgcacagaacaggcgggcgccgcggtacaaaccagacccggcggcggagggaacaacagcccacaccgcggcgccatcttgggaggagagacaaccccattcgcccgcgggggggaacgtcacggggcacccaccccccagcgaaaaaaggccgccacagggaaacaacacatctcgggggctcagggtgacccccaccgtctattcgcccgcgacaatagctccacgcaccataactcagaaatctgcgacggcgtataaaacgc

SEQ ID NO: 589946 - DNA, 175 bp, Homo sapiens
aaaagaagagagcgagtgctgtctattctcctccacctctgatgaatattgctgtagtggttggatatttagagaacgttatcatggagtacgagttccagattcttacagagaaatttcatggacaagtgctacctggagtttgaagacacggaagagaataaactcacctaca

SEQ ID NO: 589947 - DNA, 6726 bp, Homo sapiens
tctcccgggagccactcccctgggcgcctctccagcccctgggctggaagcaccagcaaccctggggatggggcagaccctcacagcccggggtctggagccggtgtcggagctcacatgggcccatgacctctccagacatttggcaaaatcaaggcccttagaccagggacagacccaagcccaggccctcccagaggtcataggacgcaaccctttgtgcccttgggctatggaagaggtttgggaacggctttggggtggaagatggccaaaggagcagcttggccaggtgaggatgaggcagggcagacacaggccagtggggcgtgccatgtgccacagatggagaggaccaggagccagtggcccggcaggcacagcccggttggcgtgggccagagcgcccatcactgacccgtgagaactcgactgcccctgccagctctggcactgccccctcccagccgccccgccctagcaccctggggggcaccccgcccaaccgtggcctggtccggcccctcccgccctttgctccagttcccgggcttggcacctatagtgggggtgccgcccgcctgccaggctccggggccgggcccacgggagggtggggcggctgggaagctggcacgctgccccgggggagcctctgtcggcaggcgcccgggtgccgcgggggggagggggaacaaagggctcattctccccgtgcgcagccggtggcatcgccggggcgttggcggaagcccccggggcccgggagggggccggcccaggcgcggccgccgaatcacgggctcctgtttcccgcagggtgctggaggaggaaaccggcggagcagcttccccactctcagttgcgcgtctggcgatggcgatcagaggtcgtgctgcgctctccgccgcgctctacctccattagccgcgctgcgcggtgctgcgccctcgccggtgcctctctcctgggtcccaggatcggcccccaccatccaggcacgacccccttccccggcccctcggcctttcccccaactcggccatctccgacccggggcgcgtgttccccccggcccggcgccttctctccctccgggggcacccgctccctagccccggcccggccctccccgcggcgcagcacggagtctcggcgtcccatggcgcaacctacggcctcggcccagaagctggtgcggccgatccgcgccgtgtgccgcatcctgcagatcccggagtccgacccctccaacctgcggccctagagcgcccccgccgccccgggggaaggagagcgcgagcgcgctgagcagacagagcgggagaacgcgtcctcgcccgccggccgggaggccccggagctggcccatggggagcaggcgcccggtgccggccacgacgaccgccaccgcccgcgccgcgaccggccggtgaagcccagggacccccctctgggagagccccatgagggcaggagagtgatggagagtacgcccagcttcctgaagggcaccccaacctgggagaagacggccccagagaacggcatcgtgagacaggagcccggcagcccgcctcgagatggactgcaccatgggccgctgtgcctgggagagcctgctcccttttggaggggcgtcctgagcaccccagactcctggcttccccctggcttcccccagggccccaaggacatgctcccacttgtggagggcgagggcccccagaatggggagaggaaggtcaactggctgggcagcaaagagggactgcgctggaaggaggccatgcttacccatccgctggcattctgcgggccagcgtgcccacctcgctgtggccccctgatgcctgagcatagtggtggccatctcaagagtgaccctgtggccttccggccctggcactgccctttccttctggagaccaagatcctggagcgagctcccttctgggtgcccacctgcttgccaccctacctagtgtctggcctgcccccagagcatccatgtgactggcccctgaccccgcacccctgggtatactccgggggccagcccaaagtgccctctgccttcagcttaggcagcaagggcttttactacaaggatccgagcattcccaggttggcaaaggagcccttggcagctgcggaacctgggttgtttggcttaaactctggtgggcacctgcagagagccggggaggccgaacgcccttcactgcaccagagggatggagagatgggagctggccggcagcagaatccttgcccgctcttcctggggcagccagacactgtgccctggacctcctggcccgcttgtcccccaggccttgttcatactcttggcaacgtctgggctgggccaggcgatgggaaccttgggtaccagctggggccaccagcaacaccaaggtgcccctctcctgagccgcctgtcacccagcggggctgctgttcatcctacccacccactaaaggtggggatcttggcccttgtgggaagtgccaggagggcctggaggggggtgccagtggagccagcgaacccagcgaggaagtgaacaaggcctctggccccagggcctgtccccccagccaccacaccaagctgaagaagacatggctcacacggcactcggagcagtttgaatgtccacgcggctgccctgaggtcgaggagaggccggttgctcggctccgggccctcaaaagggcaggcagccccgaggtccagggagcaatgggcagtccagcccccaagcggccaccggaccctttcccaggcactgcagaacagggggctgggggttggcaggaggtgcgggacacatcgatagggaacaaggatgtggactcgggacagcatgatgagcagaaaggaccccaagatggccaggccagtctccaggacccgggacttcaggacataccatgcctggctctccctgcaaaactggctcaatgccaaagttgtgcccaggcagctggagagggaggagggcacgcctgccactctcagcaagtgcggagatcgcctctgggaggggagctgcagcaggaggaagacacagccaccaactccagctctgaggaaggcccagggtccggccctgacagccggctcagcacaggcctcgccaagcacctgctcagtggtttgggggaccgactgtgccgcctgctgcggagggagcgggaggccctggcttgggcccagcgggaaggccaagggccagccgtgacagaggacagcccaggcattccacgctgctgcagccgttgccaccatggactcttcaacacccactggcgatgtccccgctgcagccaccggctgtgtgtggcctgtggtcgtgtggcaggcactgggcgggccagggagaaagcaggctttcaggagcagtccgcggaggagtgcacgcaggaggccgggcacgctgcctgttccctgatgctgacccagtttgtctccagccaggctttggcagagctgagcactgcaatgcaccaggtctgggtcaagtttgatatccgggggcactgcccctgccaagctgatgcccgggtatgggcccccggggatgcaggccagcagaaggaatcaacacagaaaacgcccccaactccacaaccttcctgcaatggcgacacccacaggaccaagagcatcaaagaggagacccccgattccgctgagaccccagcagaggaccgtgctggccgagggcccctgccttgtccttctctctgcgaactgctggcttctaccgcggtcaaactctgcttgggccatgagcgaatacacatggccttcgcccccgtcactccggccctgcccagtgatgaccgcatcaccaacatcctggacagcattatcgcacaggtggtggaacggaagatccaggagaaagccctggggccggggcttcgagctggcccgggtctgcgcaagggcctgggcctgcccctctctccagtgcggccccggctgcctcccccaggggctttgctgtggctgcaggagccccagccttgccctcggcgtggcttccacctcttccaggagcactggaggcagggccagcctgtgttggtgtcagggatccaaaggacattgcagggcaacctgtgggggacagaagctcttggggcacttggaggccaggtgcaggcgctgagccccctcggacctccccagcccagcagcctgggcagcacaacattctgggagggcttctcctggcctgagcttcgcccaaagtcagacgagggctctgtcctcctgctgcaccgagctttgggggatgaggacaccagcagggtggagaacctagctgccagtctgccacttccggagtactgcgccctccatggaaaactcaacctggcttcctacctcccaccgggccttgccctgcgtccactggagccccagctctgggcagcctatggtgtgagcccgcaccggggacacctggggaccaagaacctctgtgtggaggtggccgacctggtcagcatcctggtgcatgccgacacaccactgcctgcctggcaccgggcacagaaagacttcctttcaggcctggacggggaggggctctggtctccgggcagccaggtcagcactgtgtggcacgtgttccgggcacaggacgcccagcgcatccgccgctttctccagatggtgtgcccggccggggcaggcgccctggagcctggcgccccaggcagctgctacctggatgcagggctgcggcggcgcctgcgggaggagtggggcgtgagctgctggaccctgctccaggcccccggagaggccgtgctggtgcctgcaggggctccccaccaggtgcagggcctggtgagcacagtcagcgtcactcagcacttcctctcccctgagacctctgccctctctgctcagctctgccaccagggacccagccttccccctgactgccacctgctttatgcccagatggactgggctgtgttccaagcagtgaaggtggccgtggggacattacaggaggccaaatagagggatgctaggtgtctgggatcggggtggggacaggtagaccaggtgctcagcccaggcacaacttcagcaggggatggcgctaggggacttggggatttctggtcaaccccacaagcaccactctgggcacaagcagggcactctgttcccctcccccttaagccaacaaccacagtgccaccaagctcacacctgtccttctcaggctggcatctcccccaccctgtgccccttttaatggtaccaggcccgcactgggggcaattgacttcctccaatccccactcctccgagacccaggagacaaacagcccttccttggggaaacttgggaatcattctggcttaaacaacacctcctcctgctgctcactcccgctgagcccactctactgccccagctccgtttctaccaccgcatcctcactgggctcactgcaggcatgctgaacaaggggcctccaaccttctgccctcctgccaaaagatctggggagtgtgaggagagggtggcatcaggagctgctcaggcttggcggagggagcggcatgggcgatgtcactcagccccttcccggtccgcccgcttccctccttcatgatttccattaaagtctgttgttttgtgactgctgccagtgtggttggccctgcccctgcaggccacatggtccagggagggagggggacatggaaatctgctcttcgtctggggcctggggccttgcctcccactgaggagactttgggtggggtggggggctgtcccccaaagatgctcctgagtgcaagagcaggcaaggcagagtcctggggcacagccacgaggtgacctccctgtgcagagactcccgagccctactccacccagcaagctccagtccgccccatctctcccgtctaccctgacctggagatccagaagtatggcccagaagagcccttgccccgcctgtctgcccttggtggcagtggccatggccgacgccaggcccagccaccctgggactgagcctgactgcttcagacagccgacccctccttgtccccgctccacgcccgcagcctcctggtggcgctccgccctctcccgcttcctttgtgtatctcagccctacaaagaaaaacactcccactcttgtcatacctaattgttcctgctgtggtttggggaattttttttattaaataaagttttttattataagggtaaaaaaaaaaaaaaaaaaaaaaaaaaaaaaaaaaaaaaaaaaaaaaaaaaaaaaaaaaaaaaaaaaaaaaaagggggcgggcgcgcccaaaaaaatcacatcgccgcgggcgggggcaccacatgaagcccacccccccctcatctttcgtgtaaggagggggccaccacataaggagtacgctaaataaaacgcacagaacaggcgggcgccgcggtacaaaccagacccggcggcggagggaacaacagcccacaccgcggcgccatcttgggaggagagacaaccccattcgcccgcgggggggaacgtcacggggcacccaccccccagcgaaaaaaggccgccacagggaaacaacacatctcgggggctcagggtgacccccaccgtctattcgcccgcgacaatagctccacgcaccataactcagaaatctgcgacggcgtataaaacgc

SEQ ID NO: 589948 - DNA, 852 bp, Homo sapiens
ggaactcggtggtggtcacttgcgcagaccagactgtcgctcgtacgtcgtgcgcctcgctgtaggattttcctccgacgaacatgtcgtgaacaggaccgcgaataatggcgtgaggatcgagagaacttcgataaaggttcgaaactgatacgaaagacagagcacgacgacagaagaggaatatccatctggccattccagaagtaataccgagtatgaacggaggagaaaggttaaagacagcggcgaaactcgatacactgtagggccgtctgacgcccgttcaaattatgcaactgctacatttcccagcatatgccatcgccccgttcgtctattttttctacctgtcttctattcagactgcctgttacaccgttttgttcaatgattgcacaccaggagccgtatggacgtcaaacagttttacagagatgatcatggttgccttcggcaccggtatttcagcatttccagagagtggaaaccttaaatctgacaaatcgggaatgcggtccagactgcctcgtggccctttggtccgcatatccttggtgcctactctaattgcatccgggctatgaggcacagggggacatgggaacgtacggaatcacttgggcgagtgggttgggtgtggaaaaggggaaaggggacaggtcgagggggatgggcacatggaataggtagagagagtagagggaagctgtaagcaggttggaaaaattcttaagcaggcttaggagcacccgtaggggttggggaccgcaaaagaggtttggttcccttggccagggggccgtggttgaaaatggctaggtttctattttccatggaggctggccaatg

SEQ ID NO: 589949 - DNA, 5574 bp, Homo sapiens
tctcccgggagccactcccctgggcgcctctccagcccctgggctggaagcaccagcaaccctggggatggggcagaccctcacagcccggggtctggagccggtgtcggagctcacatgggcccatgacctctccagacatttggcaaaatcaaggcccttagaccagggacagacccaagcccaggccctcccagaggtcataggacgcaaccctttgtgcccttgggctatggaagaggtttgggaacggctttggggtggaagatggccaaaggagcagcttggccaggtgaggatgaggcagggcagacacaggccagtggggcgtgccatgtgccacagatggagaggaccaggagccagtggcccggcaggcacagcccggttggcgtgggccagagcgcccatcactgacccgtgagaactcgactgcccctgccagctctggcactgccccctcccagccgccccgccctagcaccctggggggcaccccgcccaaccgtggcctggtccggcccctcccgccctttgctccagttcccgggcttggcacctatagtgggggtgccgcccgcctgccaggctccggggccgggcccacgggagggtggggcggctgggaagctggcacgctgccccgggggagcctctgtcggcaggcgcccgggtgccgcgggggggagggggaacaaagggctcattctccccgtgcgcagccggtggcatcgccggggcgttggcggaagcccccggggcccgggagggggccggcccaggcgcggccgccgaatcacgggctcctgtttcccgcagggtgctggaggaggaaaccggcggagcagcttccccactctcagttgcgcgtctggcgatggcgatcagaggtcgtgctgcgctctccgccgcgctctacctccattagccgcgctgcgcggtgctgcgccctcgccggtgcctctctcctgggtcccaggatcggcccccaccatccaggcacgacccccttccccggcccctcggcctttcccccaactcggccatctccgacccggggcgcgtgttccccccggcccggcgccttctctccctccgggggcacccgctccctagccccggcccggccctccccgcggcgcagcacggagtctcggcgtcccatggcgcaacctacggcctcggcccagaagctggtgcggccgatccgcgccgtgtgccgcatcctgcagatcccggagtccgacccctccaacctgcggccctagagcgcccccgccgccccgggggaaggagagcgcgagcgcgctgagcagacagagcgggagaacgcgtcctcgcccgccggccgggaggccccggagctggcccatggggagcaggcgcccggtgccggccacgacgaccgccaccgcccgcgccgcgaccggccggtgaagcccagggacccccctctgggagagccccatgagggcaggagagtgatggagagtacgcccagcttcctgaagggcaccccaacctgggagaagacggccccagagaacggcatcgtgagacaggagcccggcagcccgcctcgagatggactgcaccatgggccgctgtgcctgggagagcctgctcccttttggaggggcgtcctgagcaccccagactcctggcttccccctggcttcccccagggccccaaggacatgctcccacttgtggagggcgagggcccccagaatggggagaggaaggtcaactggctgggcagcaaagagggactgcgctggaaggaggccatgcttacccatccgctggcattctgcgggccagcgtgcccacctcgctgtggccccctgatgcctgagcatagtggtggccatctcaagagtgaccctgtggccttccggccctggcactgccctttccttctggagaccaagatcctggagcgagctcccttctgggtgcccacctgcttgccaccctacctagtgtctggcctgcccccagagcatccatgtgactggcccctgaccccgcacccctgggtatactccgggggccagcccaaagtgccctctgccttcagcttaggcagcaagggcttttactacaaggatccgagcattcccaggttggcaaaggagcccttggcagctgcggaacctgggttgtttggcttaaactctggtgggcacctgcagagagccggggaggccgaacgcccttcactgcaccagagggatggagagatgggagctggccggcagcagaatccttgcccgctcttcctggggcagccagacactgtgccctggacctcctggcccgcttgtcccccaggccttgttcatactcttggcaacgtctgggctgggccaggcgatgggaaccttgggtaccagctggggccaccagcaacaccaaggtgcccctctcctgagccgcctgtcacccagcggggctgctgttcatcctacccacccactaaaggtggggatcttggcccttgtgggaagtgccaggagggcctggaggggggtgccagtggagccagcgaacccagcgaggaagtgaacaaggcctctggccccagggcctgtccccccagccaccacaccaagctgaagaagacatggctcacacggcactcggagcagtttgaatgtccacgcggctgccctgaggtcgaggagaggccggttgctcggctccgggccctcaaaagggcaggcagccccgaggtccagggagcaatgggcagtccagcccccaagcggccaccggaccctttcccaggcactgcagaacagggggctgggggttggcaggaggtgcgggacacatcgatagggaacaaggatgtggactcgggacagcatgatgagcagaaaggaccccaagatggccaggccagtctccaggacccgggacttcaggacataccatgcctggctctccctgcaaaactggctcaatgccaaagttgtgcccaggcagctggagagggaggagggcacgcctgccactctcagcaagtgcggagatcgcctctgggaggggagctgcagcaggaggaagacacagccaccaactccagctctgaggaaggcccagggtccggccctgacagccggctcagcacaggcctcgccaagcacctgctcagtggtttgggggaccgactgtgccgcctgctgcggagggagcgggaggccctggcttgggcccagcgggaaggccaagggccagccgtgacagaggacagcccaggcattccacgctgctgcagccgttgccaccatggactcttcaacacccactggcgatgtccccgctgcagccaccggctgtgtgtggcctgtggtcgtgtggcaggcactgggcgggccagggagaaagcaggctttcaggagcagtccgcggaggagtgcacgcaggaggccgggcacgctgcctgttccctgatgctgacccagtttgtctccagccaggaaggaatcaacacagaaaacgcccccaactccacaaccttcctgcaatggcgacacccacaggaccaagagcatcaaagaggagacccccgattccgctgagaccccagcagaggaccgtgctggccgagggcccctgccttgtccttctctctgcgaactgctggcttctaccgcggtcaaactctgcttgggccatgagcgaatacacatggccttcgcccccgtcactccggccctgcccagtgatgaccgcatcaccaacatcctggacagcattatcgcacaggtggtggaacggaagatccaggagaaagccctggggccggggcttcgagctggcccgggtctgcgcaagggcctgggcctgcccctctctccagtgcggccccggctgcctcccccaggggctttgctgtggctgcaggagccccagccttgccctcggcgtggcttccacctcttccaggagcactggaggcagggccagcctgtgttggtgtcagggatccaaaggacattgcagggcaacctgtgggggacagaagctcttggggcacttggaggccaggtgcaggcgctgagccccctcggacctccccagcccagcagcctgggcagcacaacattctgggagggcttctcctggcctgagcttcgcccaaagtcagacgagggctctgtcctcctgctgcaccgagctttgggggatgaggacaccagcagggtggagaacctagctgccagtctgccacttccggagtactgcgccctccatggaaaactcaacctggcttcctacctcccaccgggccttgccctgcgtccactggagccccagctctgggcagcctatggtgtgagcccgcaccggggacacctggggaccaagaacctctgtgtggaggtggccgacctggtcagcatcctggtgcatgccgacacaccactgcctgcctggcaccgggcacagaaagacttcctttcaggcctggacggggaggggctctggtctccgggcagccaggtcagcactgtgtggcacgtgttccgggcacaggacgcccagcgcatccgccgctttctccagatggtgtgcccggccggggcaggcgccctggagcctggcgccccaggcagctgctacctggatgcagggctgcggcggcgcctgcgggaggagtggggcgtgagctgctggaccctgctccaggcccccggagaggccgtgctggtgcctgcaggggctccccaccaggtgcagggcctggtgagcacagtcagcgtcactcagcacttcctctcccctgagacctctgccctctctgctcagctctgccaccagggacccagccttccccctgactgccacctgctttatgcccagatggactgggctgtgttccaagcagtgaaggtggccgtggggacattacaggaggccaaatagagggatgctaggtgtctgggatcggggtggggacaggtagaccaggtgctcagcccaggcacaacttcagcaggggatggcgctaggggacttggggatttctggtcaaccccacaagcaccactctgggcacaagcagggcactctgttcccctcccccttaagccaacaaccacagtgccaccaagctcacacctgtccttctcaggctggcatctcccccaccctgtgccccttttaatggtaccaggcccgcactgggggcaattgacttcctccaatccccactcctccgagacccaggagacaaacagcccttccttggggaaacttgggaatcattctggcttaaacaacacctcctcctgctgctcactcccgctgagcccactctactgccccagctccgtttctaccaccgcatcctcactgggctcactgcaggcatgctgaacaaggggcctccaaccttctgccctcctgccaaaagatctggggagtgtgaggagagggtggcatcaggagctgctcaggcttggcggagggagcggcatgggcgatgtcactcagccccttcccggtccgcccgcttccctccttcatgatttccattaaagtctgttgttttgtgactgc

SEQ ID NO: 589950 - DNA, 6621 bp, Homo sapiens
tctcccgggagccactcccctgggcgcctctccagcccctgggctggaagcaccagcaaccctggggatggggcagaccctcacagcccggggtctggagccggtgtcggagctcacatgggcccatgacctctccagacatttggcaaaatcaaggcccttagaccagggacagacccaagcccaggccctcccagaggtcataggacgcaaccctttgtgcccttgggctatggaagaggtttgggaacggctttggggtggaagatggccaaaggagcagcttggccaggtgaggatgaggcagggcagacacaggccagtggggcgtgccatgtgccacagatggagaggaccaggagccagtggcccggcaggcacagcccggttggcgtgggccagagcgcccatcactgacccgtgagaactcgactgcccctgccagctctggcactgccccctcccagccgccccgccctagcaccctggggggcaccccgcccaaccgtggcctggtccggcccctcccgccctttgctccagttcccgggcttggcacctatagtgggggtgccgcccgcctgccaggctccggggccgggcccacgggagggtggggcggctgggaagctggcacgctgccccgggggagcctctgtcggcaggcgcccgggtgccgcgggggggagggggaacaaagggctcattctccccgtgcgcagccggtggcatcgccggggcgttggcggaagcccccggggcccgggagggggccggcccaggcgcggccgccgaatcacgggctcctgtttcccgcagggtgctggaggaggaaaccggcggagcagcttccccactctcagttgcgcgtctggcgatggcgatcagaggtcgtgctgcgctctccgccgcgctctacctccattagccgcgctgcgcggtgctgcgccctcgccggtgcctctctcctgggtcccaggatcggcccccaccatccaggcacgacccccttccccggcccctcggcctttcccccaactcggccatctccgacccggggcgcgtgttccccccggcccggcgccttctctccctccgggggcacccgctccctagccccggcccggccctccccgcggcgcagcacggagtctcggcgtcccatggcgcaacctacggcctcggcccagaagctggtgcggccgatccgcgccgtgtgccgcatcctgcagatcccggagtccgacccctccaacctgcggccctagagcgcccccgccgccccgggggaaggagagcgcgagcgcgctgagcagacagagcgggagaacgcgtcctcgcccgccggccgggaggccccggagctggcccatggggagcaggcgcccggtgccggccacgacgaccgccaccgcccgcgccgcgaccggccggtgaagcccagggacccccctctgggagagccccatgagggcaggagagtgatggagagtacgcccagcttcctgaagggcaccccaacctgggagaagacggccccagagaacggcatcgtgagacaggagcccggcagcccgcctcgagatggactgcaccatgggccgctgtgcctgggagagcctgctcccttttggaggggcgtcctgagcaccccagactcctggcttccccctggcttcccccagggccccaaggacatgctcccacttgtggagggcgagggcccccagaatggggagaggaaggtcaactggctgggcagcaaagagggactgcgctggaaggaggccatgcttacccatccgctggcattctgcgggccagcgtgcccacctcgctgtggccccctgatgcctgagcatagtggtggccatctcaagagtgaccctgtggccttccggccctggcactgccctttccttctggagaccaagatcctggagcgagctcccttctgggtgcccacctgcttgccaccctacctagtgtctggcctgcccccagagcatccatgtgactggcccctgaccccgcacccctgggtatactccgggggccagcccaaagtgccctctgccttcagcttaggcagcaagggcttttactacaaggatccgagcattcccaggttggcaaaggagcccttggcagctgcggaacctgggttgtttggcttaaactctggtgggcacctgcagagagccggggaggccgaacgcccttcactgcaccagagggatggagagatgggagctggccggcagcagaatccttgcccgctcttcctggggcagccagacactgtgccctggacctcctggcccgcttgtcccccaggccttgttcatactcttggcaacgtctgggctgggccaggcgatgggaaccttgggtaccagctggggccaccagcaacaccaaggtgcccctctcctgagccgcctgtcacccagcggggctgctgttcatcctacccacccactaaaggtggggatcttggcccttgtgggaagtgccaggagggcctggaggggggtgccagtggagccagcgaacccagcgaggaagtgaacaaggcctctggccccagggcctgtccccccagccaccacaccaagctgaagaagacatggctcacacggcactcggagcagtttgaatgtccacgcggctgccctgaggtcgaggagaggccggttgctcggctccgggccctcaaaagggcaggcagccccgaggtccagggagcaatgggcagtccagcccccaagcggccaccggaccctttcccaggcactgcagaacagggggctgggggttggcaggaggtgcgggacacatcgatagggaacaaggatgtggactcgggacagcatgatgagcagaaaggaccccaagatggccaggccagtctccaggacccgggacttcaggacataccatgcctggctctccctgcaaaactggctcaatgccaaagttgtgcccaggcagctggagagggaggagggcacgcctgccactctcagcaagtgcggagatcgcctctgggaggggagctgcagcaggaggaagacacagccaccaactccagctctgaggaaggcccagggtccggccctgacagccggctcagcacaggcctcgccaagcacctgctcagtggtttgggggaccgactgtgccgcctgctgcggagggagcgggaggccctggcttgggcccagcgggaaggccaagggccagccgtgacagaggacagcccaggcattccacgctgctgcagccgttgccaccatggactcttcaacacccactggcgatgtccccgctgcagccaccggctgtgtgtggcctgtggtcgtgtggcaggcactgggcgggccagggagaaagcaggctttcaggagcagtccgcggaggagtgcacgcaggaggccgggcacgctgcctgttccctgatgctgacccagtttgtctccagccaggctttggcagagctgagcactgcaatgcaccaggtctgggtcaagtttgatatccgggggcactgcccctgccaagctgatgcccgggtatgggcccccggggatgcaggccagcagaaggaatcaacacagaaaacgcccccaactccacaaccttcctgcaatggcgacacccacaggaccaagagcatcaaagaggagacccccgattccgctgagaccccagcagaggaccgtgctggccgagggcccctgccttgtccttctctctgcgaactgctggcttctaccgcggtcaaactctgcttgggccatgagcgaatacacatggccttcgcccccgtcactccggccctgcccagtgatgaccgcatcaccaacatcctggacagcattatcgcacaggtggtggaacggaagatccaggagaaagccctggggccggggcttcgagctggcccgggtctgcgcaagggcctgggcctgcccctctctccagtgcggccccggctgcctcccccaggggctttgctgtggctgcaggagccccagccttgccctcggcgtggcttccacctcttccaggagcactggaggcagggccagcctgtgttggtgtcagggatccaaaggacattgcagggcaacctgtgggggacagaagctcttggggcacttggaggccaggtgcaggcgctgagccccctcggacctccccagcccagcagcctgggcagcacaacattctgggagggcttctcctggcctgagcttcgcccaaagtcagacgagggctctgtcctcctgctgcaccgagctttgggggatgaggacaccagcagggtggagaacctagctgccagtctgccacttccggagtactgcgccctccatggaaaactcaacctggcttcctacctcccaccgggccttgccctgcgtccactggagccccagctctgggcagcctatggtgtgagcccgcaccggggacacctggggaccaagaacctctgtgtggaggtggccgacctggtcagcatcctggtgcatgccgacacaccactgcctgcctggcaccgggcacagaaagacttcctttcaggcctggacggggaggggctctggtctccgggcagccaggtcagcactgtgtggcacgtgttccgggcacaggacgcccagcgcatccgccgctttctccagatggtgtgcccggccggggcaggcgccctggagcctggcgccccaggcagctgctacctggatgcagggctgcggcggcgcctgcgggaggagtggggcgtgagctgctggaccctgctccaggcccccggagaggccgtgctggtgcctgcaggggctccccaccaggtgcagggcctggtgagcacagtcagcgtcactcagcacttcctctcccctgagacctctgccctctctgctcagctctgccaccagggacccagccttccccctgactgccacctgctttatgcccagatggactgggctgtgttccaagcagtgaaggtggccgtggggacattacaggaggccaaatagagggatgctaggtgtctgggatcggggtggggacaggtagaccaggtgctcagcccaggcacaacttcagcaggggatggcgctaggggacttggggatttctggtcccaatccccactcctccgagacccaggagacaaacagcccttccttggggaaacttgggaatcattctggcttaaacaacacctcctcctgctgctcactcccgctgagcccactctactgccccagctccgtttctaccaccgcatcctcactgggctcactgcaggcatgctgaacaaggggcctccaaccttctgccctcctgccaaaagatctggggagtgtgaggagagggtggcatcaggagctgctcaggcttggcggagggagcggcatgggcgatgtcactcagccccttcccggtccgcccgcttccctccttcatgatttccattaaagtctgttgttttgtgactgctgccagtgtggttggccctgcccctgcaggccacatggtccagggagggagggggacatggaaatctgccttagagacaaatggagtagggcagcccggagctggggcccaagggacaggacaccactgcctgctcttcgtctggggcctggggccttgcctcccactgaggagactttgggtggggtggggggctgtcccccaaagatgctcctgagtgcaagagcaggcaaggcagagtcctggggcacagccacgaggtgacctccctgtgcagagactcccgagccctactccacccagcaagctccagtccgccccatctctcccgtctaccctgacctggagatccagaagtatggcccagaagagcccttgccccgcctgtctgcccttggtggcagtggccatggccgacgccaggcccagccaccctgggactgagcctgactgcttcagacagccgacccctccttgtccccgctccacgcccgcagcctcctggtggcgctccgccctctcccgcttcctttgtgtatctcagccctacaaagaaaaacactcccactcttgtcatacctaattgttcctgctgtggtttggggaattttttttattaaataaagttttttattataagggtaaaaaaaaaaaaaaaaaaaaaaaaaaaaaaaaaaaaaaaaaaaaaaaaaaaaaaaaaaaaaaaaaaaaaaaagggggcgggcgcgcccaaaaaaatcacatcgccgcgggcgggggcaccacatgaagcccacccccccctcatctttcgtgtaaggagggggccaccacataaggagtacgctaaataaaacgcacagaacaggcgggcgccgcggtacaaaccagacccggcggcggagggaacaacagcccacaccgcggcgccatcttgggaggagagacaaccccattcgcccgcgggggggaacgtcacggggcacccaccccccagcgaaaaaaggccgccacagggaaacaacacatctcgggggctcagggtgacccccaccgtctattcgcccgcgacaatagctccacgcaccataactcagaaatctgcgacggcgtataaaacgc

SEQ ID NO: 589951 - DNA, 854 bp, Homo sapiens
ctcaaatgatccacctaccttggcctcccaaagtgctgggattacaggtgtgagccaccgcatctggccagagtattccttttaagtagggtgggggacagcgggtgggcccaggaatgtagttgaaaatgctttgtcctctctctttttcctagatggactgggctgtgttccaagcagtgaaggtggccgtggggacattacaggaggccaaatagagggatgctaggtgtctgggatcggggtggggacaggtagaccaggtgctcagcccaggcacaacttcagcaggggatggcgctaggggacttggggatttctggtcaaccccacaagcaccactctgggcacaagcagggcactctgttcccctcccccttaagccaacaaccacagtgccaccaagctcacacctgtccttctcaggctggcatctcccccaccctgtgccccttttaatggtaccaggcccgcactgggggcaattgacttcctccaatccccactcctccgagacccaggagacaaacagcccttccttggggaaacttgggaatcattctggcttaaacaacacctcctcctgctgctcactcccgctgagcccactctactgccccagctccgtttctaccaccgcatcctcactgggctcactgcaggcatgctgaacaaggggcctccaaccttctgccctcctgccaaaagatctggggagtgtgaggagagggtggcatcaggagctgctcaggcttggcggagggagcggcatgggcgatgtcactcagccccttcccggtccgcccgcttccctccttcatgatttccattaaagtctgttgttttgtgactgc

SEQ ID NO: 589952 - DNA, 1550 bp, Homo sapiens
ttcaggtatagctctacatctttgatatcctgacagacccggattctcccactaagaaacgatccacaagatacagagaatggcatctattatccatgagtgtgatctactccattgaacgcgcgtccaaatgaccactagatccacgtgttacgacgatacttcttcgcgaacttatggtcgcgagcatctatggccttccgcaaggggtcacaagagccatccgagccggcgtagtgatcctggtcatgtgatatcaccgaagccatggacaagagcctgattagaagttagtagacagaggcccattaccatctaaagaaccgagatctaggtagatacaaccgtagatcaagattcaaacggttgtgctgatccatttcccgtaatagaacgttatagatgtctcaagagagaccccaggttgagcttgtggaactgtagtttaccaagcgacccgaagtaggcgcattagatctacttgttgcctcaatacctcgtcatcagatgactatgctggtactcgggagaaaatgctaagcgagagcgatatcacgtcatttgtggaggcatcgctttgcacacctagatcccttagggaagggtcccccgcaagaagccccattagatttaccacccccagcttttccacgttagatttagcctaataggtaattaacattgaagcaatattcatcccctgctttaccagtagtacaccactcgcctccgtttggtgcgccaagttggggggcgttgaaacagtaaaacttttggtaaacgcctaaggattcgacacaagttgaggtctaagcggtacggaaggaggatagtaacgttataataatctacgttggcccatattgtacgccagtagaaggtcgctttctctcagtttaaacatattatttacagcgctcgaacaataccaaggtattccttggcaattttcaactggtactctgatggcaaattcacaagacattgttgttttcgacaagcagttttcccaggaattaaattggagcaggcggatgtgctagactaatacaatcgcgagcgttaaaccccttttggattggaccttccgcagaggggttctcaaggtcccaataaaaattcacaaggttgtaacaacattccgtttggtagacgaacaggtaaaagggccaaaggccccgcaaaacggaaaacagctgcgctacacagtacacaatgtacaacggatacacacaccttgggatgcgggtggtgcggaccacaagactgcaggcgaaagccaaaggcggatagaataccaaggggaggaaacgctcagggaaaggcccacacaccgtgcaaacttcccaaatcacggacgaagtccgatttttatacgacggggggcgacggggcgctctaataacagcgagcccagctgtgagggagacgcacgcaagcacgatagcaacaacacggtgggccgtcaagcgctgaacactacgccgagcacagcagcgaccaagaatatctggccgcccagaaaagagagagagggcgcccacctcaca

SEQ ID NO: 589953 - DNA, 187 bp, Homo sapiens
agatttgaataaagtgatgaagttgcattacccccctcacgcaaagattctttacttagcttgtttttagattttcttctataatatattttatttatatcccatctagaattcagctaggtgctgctgctgctctgtttcctttgatgacgctttgaaataaaggcaggagtacaagcaaaaaaaa

SEQ ID NO: 589954 - DNA, 242 bp, Homo sapiens
gactctagagatcccgggaggaagagcgaccctcacagtaacatgattacttagcaccatgttacagcttccctacagatattcagtacaggtaagtgtgctcgtacagtgtttgcaggcccgggagcaataagctataccatcatctaggattgtccaagctacaacttcaagcagaagagagaggagttgtgtctatcaaagtgagtgtgtgctaccccgttacctggctataaaggaag

SEQ ID NO: 589955 - DNA, 3053 bp, Homo sapiens
ccgctactctggccctcagggttgtgtagtttccggggccacggcacctgggcacaccaggtggcgtcgcgcctttgctttcctgagccttctgagtaaggtaatgtggtgtccgtggggcgacgcctgcgcacaagaccgcgtcgggcctcacttttcccaggccttctgggtaatgtagtttccgggatcggcacccggcctgtgccagcttgcagagctcaccaggtgcagacccctgcggccagggcgaggacggatctgagcagctgggcagcaggtgccaccgcctgtgggacccagagggcttgaggacatctgcaatgctccagaagcccaagagcgtgaagctgcgggccctgcgcagcccgaggaagttcggcgtggctggccggagctgccaggaggtgctgcgcaagggctgtctccgcttccagctccctgagcgcggttcccggctgtgcctgtacgaggatggcacggagctgacggaagattacttccccagtgttcccgacaacgccgagctggtgctgctcaccttgggccaggcctggcagggctagatgtgagcgacatcaggcgcttcctcagtgcatttcacgagccacaggtggggctcatccaggccgcccagcagctgctgtgtgatgagcaggccccacagaggcagaggctgctggctgacctcctgcacaacgtcagccagaacatcgcggccgagacccgggctgaggacccgccgtggtttgaaggcttggagtcccgatttcagagcaagtctggctatctgagatacagctgtgagagccggatccggagttacctgagggaggtgagctcctacccctccacggtgggtgcggaggctcaggaggaattcctgcgggtcctcggctccatgtgccagaggctccggtccatgcagtacaatggcagctacttcgacagaggagccaagggcggcagccgcctctgcacaccggaaggctggttctcctgccagggtccctttgacatggacagctgcttatcaagacactccatcaacccctacagtaacagggagagcaggatcctcttcagcacctggaacctggatcacataatagaaaagaaacgcaccatcattcctacactggtggaagcaattaaggaacaagatggaagagaagtggactgggagtatttttatggcctgctttttacctcagagaacctaaaactagtgcacattgtctgccataagaaaaccacccacaagctcaactgtgacccaagcagaatctacaaaccccagacaaggttgaagcggaagcagcctgtgcggaaacgccagtgacacgtacacaccacgtcctggtctttgtttgaggcctgacgtgggcatcattttaacaggtgccttttttgtttttttgtttttcgtttttttggtcactccagtagctcctggaaaaaaccttaaaaaatgtttcctccaaatctgatttcattacatttctgaattgttgggtttttttttgttgttttgttttgttttgtagatggagtttcacttttgttgcccaggctggagtgtagtggcgcgatctcggctcagcctcccgagtagctgggattacaggcatgtgccaccacgcccggctaatgtttgtatttttagtagagacggggtttcaccatgttggtcaggctggtctcaaactcctgacctcaggtgatccgcccacctcagcctcccaaagtgctgggatgacaggtgtgagccactgcgcccagcctgaatcatttcttataccttctgacagcccaacttccagaggacagctctggggtactcgttggatgtctgtgagtacctggtcatacgggtcagtagggataagaattgtctctgggctgaggaattcttctgttctctggtttcaccagcgttgggtttgctcatgtaatgtggtcaccatactcaaatggtgtcatggctgaagttggccaccttgcttgagggacaagttgtttatgtatcagctctctgctgggtctccctttccatggcaaatgggcagctccatcctcttgatcttctaaatgcccaaaagaggtgtcatgctttgggggtacgatgtttatactccgtaaagaacatacaaggacattcactgctgatttttttttttgtttgtttgagacagggtctcactctgtcgctcaggctggagtgcagtgatgcaatcttggctcactgcaacctccgcctctcaggttcaagtggttctcctgcctcagcctcccaagtagctgggattacaggcacctaccaccagggccagctaatttttgtatgtttagtagtaacggggtttcaccatgttggccaggctgttctcgaactcctgacctcaggtgatctgcccgcctcggtctcccaaagtgctgggattacaggcatgagccactgcacctgacctgctgaattgtttataatggcaagaaataggaaaccccccaatgtctgttgaacagctatcacgttgaaccacgtgaaactgctgttttctaggccaaaaatggtgagcgatcatttatttcatgattcaacctgatacatttacatagtgcaaaactgtgtcacagtttcaggcttttatgaggaaagcgtttctgtgtagaaactggaagctgttcagggcatcggcagctgaaccctgctccgttggtcagcgttactatcatctcggatcatatggagctcatgtcagccgtgtgggtggcgggtgcacagagacggtctggaaggaaacacgcggatctgaacagcagtaatcctgggggatacgggggttgggctagattacagagggctcattttctacgtcatgtattttatgatacttgaattttttgaaatgggcatttattttataacatgttaaaatgtactttttaaattaagtcattttgtaatatttgaatttttacatttgttgtacaatcaggaaaagcaataaagatttttcaaaaataaaaaaatggccttcttgggcctcaac

SEQ ID NO: 589956 - DNA, 3218 bp, Homo sapiens
ccgctactctggccctcagggttgtgtagtttccggggccacggcacctgggcacaccaggtggcgtcgcgcctttgctttcctgagccttctgagtaaggtaatgtggtgtccgtggggcgacgcctgcgcacaagaccgcgtcgggcctcacttttcccaggccttctgggtaatgtagtttccgggatcggcacccggcctgtgccagcttgcagagctcaccaggtgcagacccctgcggccagggcgaggacggatctgagcagctgggcagcaggtgccaccgcctgtgggacccagagggcttgaggacatctgcaatgctccagaagcccaagagcgtgaagctgcgggccctgcgcagcccgaggaagttcggcgtggctggccggagctgccaggaggtgctgcgcaagggctgtctccgcttccagctccctgagcgcggttcccggctgtgcctgtacgaggatggcacggagctgacggaagattacttccccagtgttcccgacaacgccgagctggtgctgctcaccttgggccaggcctggcagggctctgttggtgtcagggcaaggacaaagacccgggacacctcaagtctgagtcctggtgattgccaggccctggggaatgggggaagatgtggtcagaggctcttcttgtgaccggggcagtgatgtgtcttctgctggaccggcaccttttgtttgtcccattggtagatgtgagcgacatcaggcgcttcctcagtgcatttcacgagccacaggtggggctcatccaggccgcccagcagctgctgtgtgatgagcaggccccacagaggcagaggctgctggctgacctcctgcacaacgtcagccagaacatcgcggccgagacccgggctgaggacccgccgtggtttgaaggcttggagtcccgatttcagagcaagtctggctatctgagatacagctgtgagagccggatccggagttacctgagggaggtgagctcctacccctccacggtgggtgcggaggctcaggaggaattcctgcgggtcctcggctccatgtgccagaggctccggtccatgcagtacaatggcagctacttcgacagaggagccaagggcggcagccgcctctgcacaccggaaggctggttctcctgccagggtccctttgacatggacagctgcttatcaagacactccatcaacccctacagtaacagggagagcaggatcctcttcagcacctggaacctggatcacataatagaaaagaaacgcaccatcattcctacactggtggaagcaattaaggaacaagatggaagagaagtggactgggagtatttttatggcctgctttttacctcagagaacctaaaactagtgcacattgtctgccataagaaaaccacccacaagctcaactgtgacccaagcagaatctacaaaccccagacaaggttgaagcggaagcagcctgtgcggaaacgccagtgacacgtacacaccacgtcctggtctttgtttgaggcctgacgtgggcatcattttaacaggtgccttttttgtttttttgtttttcgtttttttggtcactccagtagctcctggaaaaaaccttaaaaaatgtttcctccaaatctgatttcattacatttctgaattgttgggtttttttttgttgttttgttttgttttgtagatggagtttcacttttgttgcccaggctggagtgtagtggcgcgatctcggctcagcctcccgagtagctgggattacaggcatgtgccaccacgcccggctaatgtttgtatttttagtagagacggggtttcaccatgttggtcaggctggtctcaaactcctgacctcaggtgatccgcccacctcagcctcccaaagtgctgggatgacaggtgtgagccactgcgcccagcctgaatcatttcttataccttctgacagcccaacttccagaggacagctctggggtactcgttggatgtctgtgagtacctggtcatacgggtcagtagggataagaattgtctctgggctgaggaattcttctgttctctggtttcaccagcgttgggtttgctcatgtaatgtggtcaccatactcaaatggtgtcatggctgaagttggccaccttgcttgagggacaagttgtttatgtatcagctctctgctgggtctccctttccatggcaaatgggcagctccatcctcttgatcttctaaatgcccaaaagaggtgtcatgctttgggggtacgatgtttatactccgtaaagaacatacaaggacattcactgctgatttttttttttgtttgtttgagacagggtctcactctgtcgctcaggctggagtgcagtgatgcaatcttggctcactgcaacctccgcctctcaggttcaagtggttctcctgcctcagcctcccaagtagctgggattacaggcacctaccaccagggccagctaatttttgtatgtttagtagtaacggggtttcaccatgttggccaggctgttctcgaactcctgacctcaggtgatctgcccgcctcggtctcccaaagtgctgggattacaggcatgagccactgcacctgacctgctgaattgtttataatggcaagaaataggaaaccccccaatgtctgttgaacagctatcacgttgaaccacgtgaaactgctgttttctaggccaaaaatggtgagcgatcatttatttcatgattcaacctgatacatttacatagtgcaaaactgtgtcacagtttcaggcttttatgaggaaagcgtttctgtgtagaaactggaagctgttcagggcatcggcagctgaaccctgctccgttggtcagcgttactatcatctcggatcatatggagctcatgtcagccgtgtgggtggcgggtgcacagagacggtctggaaggaaacacgcggatctgaacagcagtaatcctgggggatacgggggttgggctagattacagagggctcattttctacgtcatgtattttatgatacttgaattttttgaaatgggcatttattttataacatgttaaaatgtactttttaaattaagtcattttgtaatatttgaatttttacatttgttgtacaatcaggaaaagcaataaagatttttcaaaaataaaaaaatggccttcttgggcctcaac

SEQ ID NO: 589957 - DNA, 133 bp, Homo sapiens
agacggtggtacctctgtaattcagcactttgggaggcgagcaggcggtcatgaggtcagcatcgagacatctggccacatgtgaaactcatctctattaaaatacaaaattagtgagtgtggtagccgtgcg

SEQ ID NO: 589958 - DNA, 123 bp, Homo sapiens
gtcgtacttgacctccttagtactgggatacaggtgcatgcaacatgtcagactaatttttaagttttccctagagatggggtcttgctgtgttgcccaggctggtcttcagggcccgagagt

SEQ ID NO: 589959 - DNA, 230 bp, Homo sapiens
ccggacgtgtacaatggggtagggatcctcacctcgatctatctgagccagcagatgagggtttaacgttggacttgatgaccaccttgaactccagtttggtgcgtcccacttctcgcactagacgggatcacccggaagggcagcatgctgtccttggttgtgcgatacctcataagctcaaactctccatctggcgggatacaagctgatgccaagttagcgtgtga

SEQ ID NO: 589960 - DNA, 3137 bp, Homo sapiens
ccgctactctggccctcagggttgtgtagtttccggggccacggcacctgggcacaccaggtggcgtcgcgcctttgctttcctgagccttctgagtaaggtaatgtggtgtccgtggggcgacgcctgcgcacaagaccgcgtcgggcctcacttttcccaggccttctgggtaatgtagtttccgggatcggcacccggcctgtgccagcttgcagagctcaccaggtgcagacccctgcggccagggcgaggacggatctgagcagctgggcagcaggtgccaccgcctgtgggacccagagggcttgaggacatctgcaatgctccagaagcccaagagcgtgaagctgcgggccctgcgcagcccgaggaagttcggcgtggctggccggagctgccaggaggtgctgcgcaagggctgtctccgcttccagctccctgagcgcggttcccggctgtgcctgtacgaggatggcacggagctgacggaagattacttccccagtgttcccgacaacgccgagctggtgctgctcaccttgggccaggcctggcagggctggttttgccatgtttcccaggatagtctcacactcctgggctcaagctgtcctcctgccttggtctcctaaagtgctgggattaagatgtgagcgacatcaggcgcttcctcagtgcatttcacgagccacaggtggggctcatccaggccgcccagcagctgctgtgtgatgagcaggccccacagaggcagaggctgctggctgacctcctgcacaacgtcagccagaacatcgcggccgagacccgggctgaggacccgccgtggtttgaaggcttggagtcccgatttcagagcaagtctggctatctgagatacagctgtgagagccggatccggagttacctgagggaggtgagctcctacccctccacggtgggtgcggaggctcaggaggaattcctgcgggtcctcggctccatgtgccagaggctccggtccatgcagtacaatggcagctacttcgacagaggagccaagggcggcagccgcctctgcacaccggaaggctggttctcctgccagggtccctttgacatggacagctgcttatcaagacactccatcaacccctacagtaacagggagagcaggatcctcttcagcacctggaacctggatcacataatagaaaagaaacgcaccatcattcctacactggtggaagcaattaaggaacaagatggaagagaagtggactgggagtatttttatggcctgctttttacctcagagaacctaaaactagtgcacattgtctgccataagaaaaccacccacaagctcaactgtgacccaagcagaatctacaaaccccagacaaggttgaagcggaagcagcctgtgcggaaacgccagtgacacgtacacaccacgtcctggtctttgtttgaggcctgacgtgggcatcattttaacaggtgccttttttgtttttttgtttttcgtttttttggtcactccagtagctcctggaaaaaaccttaaaaaatgtttcctccaaatctgatttcattacatttctgaattgttgggtttttttttgttgttttgttttgttttgtagatggagtttcacttttgttgcccaggctggagtgtagtggcgcgatctcggctcagcctcccgagtagctgggattacaggcatgtgccaccacgcccggctaatgtttgtatttttagtagagacggggtttcaccatgttggtcaggctggtctcaaactcctgacctcaggtgatccgcccacctcagcctcccaaagtgctgggatgacaggtgtgagccactgcgcccagcctgaatcatttcttataccttctgacagcccaacttccagaggacagctctggggtactcgttggatgtctgtgagtacctggtcatacgggtcagtagggataagaattgtctctgggctgaggaattcttctgttctctggtttcaccagcgttgggtttgctcatgtaatgtggtcaccatactcaaatggtgtcatggctgaagttggccaccttgcttgagggacaagttgtttatgtatcagctctctgctgggtctccctttccatggcaaatgggcagctccatcctcttgatcttctaaatgcccaaaagaggtgtcatgctttgggggtacgatgtttatactccgtaaagaacatacaaggacattcactgctgatttttttttttgtttgtttgagacagggtctcactctgtcgctcaggctggagtgcagtgatgcaatcttggctcactgcaacctccgcctctcaggttcaagtggttctcctgcctcagcctcccaagtagctgggattacaggcacctaccaccagggccagctaatttttgtatgtttagtagtaacggggtttcaccatgttggccaggctgttctcgaactcctgacctcaggtgatctgcccgcctcggtctcccaaagtgctgggattacaggcatgagccactgcacctgacctgctgaattgtttataatggcaagaaataggaaaccccccaatgtctgttgaacagctatcacgttgaaccacgtgaaactgctgttttctaggccaaaaatggtgagcgatcatttatttcatgattcaacctgatacatttacatagtgcaaaactgtgtcacagtttcaggcttttatgaggaaagcgtttctgtgtagaaactggaagctgttcagggcatcggcagctgaaccctgctccgttggtcagcgttactatcatctcggatcatatggagctcatgtcagccgtgtgggtggcgggtgcacagagacggtctggaaggaaacacgcggatctgaacagcagtaatcctgggggatacgggggttgggctagattacagagggctcattttctacgtcatgtattttatgatacttgaattttttgaaatgggcatttattttataacatgttaaaatgtactttttaaattaagtcattttgtaatatttgaatttttacatttgttgtacaatcaggaaaagcaataaagatttttcaaaaataaaaaaatggccttcttgggcctcaac

SEQ ID NO: 589961 - DNA, 3176 bp, Homo sapiens
ccgctactctggccctcagggttgtgtagtttccggggccacggcacctgggcacaccaggtggcgtcgcgcctttgctttcctgagccttctgagtaaggtaatgtggtgtccgtggggcgacgcctgcgcacaagaccgcgtcgggcctcacttttcccaggccttctgggtaatgtagtttccgggatcggcacccggcctgtgccagcttgcagagctcaccaggtgcagacccctgcggccagggcgaggacggatctgagcagctgggcagcaggtgccaccgcctgtgggacccagagggcttgaggacatctgcaatgctccagaagcccaagagcgtgaagctgcgggccctgcgcagcccgaggaagttcggcgtggctggccggagctgccaggaggtgctgcgcaagggctgtctccgcttccagctccctgagcgcggttcccggctgtgcctgtacgaggatggcacggagctgacggaagattacttccccagtgttcccgacaacgccgagctggtgctgctcaccttgggccaggcctggcagggctagatgtgagcgacatcaggcgcttcctcagtgcatttcacgagccacaggtggggctcatccaggccgcccagcagctgctgtgtgatgagcaggccccacagaggcagaggctgctggctgacctcctgcacaacgtcagccagaacatcgcggccgagacccgggctgaggacccgccgtggtttgaaggcttggagtcccgatttcagagcaagtctggctatctgagatacagctgtgagagccggatccggagttacctgagggaggtgagctcctacccctccacggtgggtgcggaggctcaggaggaattcctgcgggtcctcggctccatgtgccagaggctccggtccatgcagtacaatggcagctacttcgacagaggagccaagggcggcagccgcctctgcacaccggaaggctggttctcctgccagggtccctttgacatggacagctgcttatcaagacactccatcaacccctacagtaacagggagagcaggatcctcttcagcacctggaacctggatcacatagatggagtcttgctctgtggcccaggctaaagtgcagtggcaggatcatggctcactgaagcctgaactcctggcctcaagcgatcctcctgcctcagcctcctgagtcgctgggactacagaatagaaaagaaacgcaccatcattcctacactggtggaagcaattaaggaacaagatggaagagaagtggactgggagtatttttatggcctgctttttacctcagagaacctaaaactagtgcacattgtctgccataagaaaaccacccacaagctcaactgtgacccaagcagaatctacaaaccccagacaaggttgaagcggaagcagcctgtgcggaaacgccagtgacacgtacacaccacgtcctggtctttgtttgaggcctgacgtgggcatcattttaacaggtgccttttttgtttttttgtttttcgtttttttggtcactccagtagctcctggaaaaaaccttaaaaaatgtttcctccaaatctgatttcattacatttctgaattgttgggtttttttttgttgttttgttttgttttgtagatggagtttcacttttgttgcccaggctggagtgtagtggcgcgatctcggctcagcctcccgagtagctgggattacaggcatgtgccaccacgcccggctaatgtttgtatttttagtagagacggggtttcaccatgttggtcaggctggtctcaaactcctgacctcaggtgatccgcccacctcagcctcccaaagtgctgggatgacaggtgtgagccactgcgcccagcctgaatcatttcttataccttctgacagcccaacttccagaggacagctctggggtactcgttggatgtctgtgagtacctggtcatacgggtcagtagggataagaattgtctctgggctgaggaattcttctgttctctggtttcaccagcgttgggtttgctcatgtaatgtggtcaccatactcaaatggtgtcatggctgaagttggccaccttgcttgagggacaagttgtttatgtatcagctctctgctgggtctccctttccatggcaaatgggcagctccatcctcttgatcttctaaatgcccaaaagaggtgtcatgctttgggggtacgatgtttatactccgtaaagaacatacaaggacattcactgctgatttttttttttgtttgtttgagacagggtctcactctgtcgctcaggctggagtgcagtgatgcaatcttggctcactgcaacctccgcctctcaggttcaagtggttctcctgcctcagcctcccaagtagctgggattacaggcacctaccaccagggccagctaatttttgtatgtttagtagtaacggggtttcaccatgttggccaggctgttctcgaactcctgacctcaggtgatctgcccgcctcggtctcccaaagtgctgggattacaggcatgagccactgcacctgacctgctgaattgtttataatggcaagaaataggaaaccccccaatgtctgttgaacagctatcacgttgaaccacgtgaaactgctgttttctaggccaaaaatggtgagcgatcatttatttcatgattcaacctgatacatttacatagtgcaaaactgtgtcacagtttcaggcttttatgaggaaagcgtttctgtgtagaaactggaagctgttcagggcatcggcagctgaaccctgctccgttggtcagcgttactatcatctcggatcatatggagctcatgtcagccgtgtgggtggcgggtgcacagagacggtctggaaggaaacacgcggatctgaacagcagtaatcctgggggatacgggggttgggctagattacagagggctcattttctacgtcatgtattttatgatacttgaattttttgaaatgggcatttattttataacatgttaaaatgtactttttaaattaagtcattttgtaatatttgaatttttacatttgttgtacaatcaggaaaagcaataaagatttttcaaaaataaaaaaatggccttcttgggcctcaac

SEQ ID NO: 589962 - DNA, 774 bp, Homo sapiens
tgtatacgtagataccgccacaacacacgaaagagacaaaagacgagaaaaaaaaaaacctagaaatagaaaagaaacgcaccatcattcctacactggtggaagcaattaaggaacaagatggaagagaagtggactgggagtatttttatggcctgctttttacctcagagaacctaaaactagtgcacattgtctgccataagaaaaccacccacaagctcaactgtgacccaagcagaatctacaaaccccagacaaggttgaagcggaagcagcctgtgcggaaacgccagtgacacgtacacaccacgtcctggtctttgtttgaggcctgacgtgggcatcattttaacagtttcaggcttttatgaggaaagcgtttctgtgtagaaactggaagctgttcagggcatcggcagctgaaccctgctccgttggtcagcgttactatcatctcggatcatatggagctcatgtcagccgtgtgggtggcgggtgcacagagacggtctggaaggaaacacgcggatctgaacagcagtaatcctgggggatacgggggttgggctagattacagagggctcattttctacgtcatgtattttatgatacttgaattttttgaaatgggcatttattttataacatgttaaaatgtactttttaaattaagtcattttgtaatatttgaatttttacatttgttgtacaatcaggaaaagcaataaagatttttcaaaaataaaaaaatggccttcttgggcctcaac

SEQ ID NO: 589963 - DNA, 949 bp, Homo sapiens
ccgctactctggccctcagggttgtgtagtttccggggccacggcacctgggcacaccaggtggcgtcgcgcctttgctttcctgagccttctgagtaaggtaatgtggtgtccgtggggcgacgcctgcgcacaagaccgcgtcgggcctcacttttcccaggccttctgggtaatgtagtttccgggatcggcacccggcctgtgccagcttgcagagctcaccaggtgcagacccctgcggccagggcgaggacggatctgagcagctgggcagcaggtgccaccgcctgtgggacccagagggcttgaggacatctgcaatgctccagaagcccaagagcgtgaagctgcgggccctgcgcagcccgaggaagttcggcgtggctggccggagctgccaggaggtgctgcgcaagggctgtctccgcttccagctccctgagcgcggttcccggctgtgcctgtacgaggatggcacggagctgacggaagattacttccccagtgttcccgacaacgccgagctggtgctgctcaccttgggccaggcctggcagggctgtgagtggcaaggactttggagagatgtgagcgacatcaggcgcttcctcagtgcatttcacgagccacaggtggggctcatccaggccgcccagcagctgctgtgtgatgagcaggccccacagaggcagaggctgctggctgacctcctgcacaacgtcagccagaacatcgcggccgagacccgggctgaggacccgccgtggtttgaaggcttggagtgcaggtggcgtgaatcttgggttcaacggaatctctgccgtccctgaccctctggcttcccaggcttaagggaatttctctggctcagctccggaatgggtgggattaccgggtggagattccgaatccaaacagtctggggtatctggaaaaccgtgaaacg

SEQ ID NO: 589964 - DNA, 348 bp, Homo sapiens
ggtaagagaagggagagtgtgctgaagaagcccttcttttgatgtgtgctgaccagaacgctcttgagcccaggcatatgttgagcattaacactctgtgacagagctgcagacccctggcttgaggctcatctcagcaatgctggcacacctcttgtctttcagagatggtaggttacttcattctttgtgacacgagtcaagtgggtcagtgtccctctggccccttgcattcccaaccacatttgactgtggcattggatatgtgagctgttggcaattataggaaccttcaaggattctcgctgcatatcttgacatatcttgagagattgcatgtgttgtggg

SEQ ID NO: 589965 - DNA, 1817 bp, Homo sapiens
ccgctactctggccctcagggttgtgtagtttccggggccacggcacctgggcacaccaggtggcgtcgcgcctttgctttcctgagccttctgagtaaggtaatgtggtgtccgtggggcgacgcctgcgcacaagaccgcgtcgggcctcacttttcccaggccttctgggtaatgtagtttccgggatcggcacccggcctgtgccagcttgcagagctcaccaggtgcagacccctgcggccagggcgaggacggatctgagcagctgggcagcaggtgccaccgcctgtgggacccagagggcttgaggacatctgcaatgctccagaagcccaagagcgtgaagctgcgggccctgcgcagcccgaggaagttcggcgtggctggccggagctgccaggaggtgctgcgcaagggctgtctccgcttccagctccctgagcgcggttcccggctgtgcctgtacgaggatggcacggagctgacggaagattacttccccagtgttcccgacaacgccgagctggtgctgctcaccttgggccaggcctggcagggctagatgtgagcgacatcaggcgcttcctcagtgcatttcacgagccacaggtggggctcatccaggccgcccagcagctgctgtgtgatgagcaggccccacagaggcagaggctgctggctgacctcctgcacaacgtcagccagaacatcgcggccgagacccgggctgaggacccgccgtggtttgaaggcttggagtcccgatttcagagcaagtctggctatctgagatacagctgtgagagccggatccggagttacctgagggaggtgagctcctacccctccacggtgggtgcggaggctcaggaggaattcctgcgggtcctcggctccatgtgccagaggctccggtccatgcagtacaatggcagctacttcgacagaggagccaagggcggcagccgcctctgcacaccggaaggctggttctcctgccagggtccctttgacatggacagctgcttatcaagacactccatcaacccctacagtaacagggagagcaggatcctcttcagcacctggaacctggatcacataatagaaaagaaacgcaccatcattcctacactggtggaagcaattaaggaacaagatggaagagaagtggactgggagtatttttatggcctgctttttacctcagagaacctaaaactagtgcacattgtctgccataagaaaaccacccacaagctcaactgtgacccaagcagaatctacaaaccccagacaaggttgaagcggaagcagcctgtgcggaaacgccagtgacacgtacacaccacgtcctggtctttgtttgaggcctgacgtgggcatcattttaacagtttcaggcttttatgaggaaagcgtttctgtgtagaaactggaagctgttcagggcatcggcagctgaaccctgctccgttggtcagcgttactatcatctcggatcatatggagctcatgtcagccgtgtgggtggcgggtgcacagagacggtctggaaggaaacacgcggatctgaacagcagtaatcctgggggatacgggggttgggctagattacagagggctcattttctacgtcatgtattttatgatacttgaattttttgaaatgggcatttattttataacatgttaaaatgtactttttaaattaagtcattttgtaatatttgaatttttacatttgttgtacaatcaggaaaagcaataaagatttttcaaaaataaaaaaatggccttcttgggcctcaac

SEQ ID NO: 589966 - DNA, 3099 bp, Homo sapiens
ccgctactctggccctcagggttgtgtagtttccggggccacggcacctgggcacaccaggtggcgtcgcgcctttgctttcctgagccttctgagtaaggtaatgtggtgtccgtggggcgacgcctgcgcacaagaccgcgtcgggcctcacttttcccaggccttctgggtaatgtagtttccgggatcggcacccggcctgtgccagcttgcagagctcaccaggtgcagacccctgcggccagggcgaggacggatctgagcagctgggcagcaggtgccaccgcctgtgggacccagagggcttgaggacatctgcaatgctccagaagcccaagagcgtgaagctgcgggccctgcgcagcccgaggaagttcggcgtggctggccggagctgccaggaggtgctgcgcaagggctgtctccgcttccagctccctgagcgcggttcccggctgtgcctgtacgaggatggcacggagctgacggaagattacttccccagtgttcccgacaacgccgagctggtgctgctcaccttgggccaggcctggcagggcttgatgtgtcttctgctggaccggcaccttttgtttgtcccattggtagatgtgagcgacatcaggcgcttcctcagtgcatttcacgagccacaggtggggctcatccaggccgcccagcagctgctgtgtgatgagcaggccccacagaggcagaggctgctggctgacctcctgcacaacgtcagccagaacatcgcggccgagacccgggctgaggacccgccgtggtttgaaggcttggagtcccgatttcagagcaagtctggctatctgagatacagctgtgagagccggatccggagttacctgagggaggtgagctcctacccctccacggtgggtgcggaggctcaggaggaattcctgcgggtcctcggctccatgtgccagaggctccggtccatgcagtacaatggcagctacttcgacagaggagccaagggcggcagccgcctctgcacaccggaaggctggttctcctgccagggtccctttgacatggacagctgcttatcaagacactccatcaacccctacagtaacagggagagcaggatcctcttcagcacctggaacctggatcacataatagaaaagaaacgcaccatcattcctacactggtggaagcaattaaggaacaagatggaagagaagtggactgggagtatttttatggcctgctttttacctcagagaacctaaaactagtgcacattgtctgccataagaaaaccacccacaagctcaactgtgacccaagcagaatctacaaaccccagacaaggttgaagcggaagcagcctgtgcggaaacgccagtgacacgtacacaccacgtcctggtctttgtttgaggcctgacgtgggcatcattttaacaggtgccttttttgtttttttgtttttcgtttttttggtcactccagtagctcctggaaaaaaccttaaaaaatgtttcctccaaatctgatttcattacatttctgaattgttgggtttttttttgttgttttgttttgttttgtagatggagtttcacttttgttgcccaggctggagtgtagtggcgcgatctcggctcagcctcccgagtagctgggattacaggcatgtgccaccacgcccggctaatgtttgtatttttagtagagacggggtttcaccatgttggtcaggctggtctcaaactcctgacctcaggtgatccgcccacctcagcctcccaaagtgctgggatgacaggtgtgagccactgcgcccagcctgaatcatttcttataccttctgacagcccaacttccagaggacagctctggggtactcgttggatgtctgtgagtacctggtcatacgggtcagtagggataagaattgtctctgggctgaggaattcttctgttctctggtttcaccagcgttgggtttgctcatgtaatgtggtcaccatactcaaatggtgtcatggctgaagttggccaccttgcttgagggacaagttgtttatgtatcagctctctgctgggtctccctttccatggcaaatgggcagctccatcctcttgatcttctaaatgcccaaaagaggtgtcatgctttgggggtacgatgtttatactccgtaaagaacatacaaggacattcactgctgatttttttttttgtttgtttgagacagggtctcactctgtcgctcaggctggagtgcagtgatgcaatcttggctcactgcaacctccgcctctcaggttcaagtggttctcctgcctcagcctcccaagtagctgggattacaggcacctaccaccagggccagctaatttttgtatgtttagtagtaacggggtttcaccatgttggccaggctgttctcgaactcctgacctcaggtgatctgcccgcctcggtctcccaaagtgctgggattacaggcatgagccactgcacctgacctgctgaattgtttataatggcaagaaataggaaaccccccaatgtctgttgaacagctatcacgttgaaccacgtgaaactgctgttttctaggccaaaaatggtgagcgatcatttatttcatgattcaacctgatacatttacatagtgcaaaactgtgtcacagtttcaggcttttatgaggaaagcgtttctgtgtagaaactggaagctgttcagggcatcggcagctgaaccctgctccgttggtcagcgttactatcatctcggatcatatggagctcatgtcagccgtgtgggtggcgggtgcacagagacggtctggaaggaaacacgcggatctgaacagcagtaatcctgggggatacgggggttgggctagattacagagggctcattttctacgtcatgtattttatgatacttgaattttttgaaatgggcatttattttataacatgttaaaatgtactttttaaattaagtcattttgtaatatttgaatttttacatttgttgtacaatcaggaaaagcaataaagatttttcaaaaataaaaaaatggccttcttgggcctcaac

SEQ ID NO: 589967 - DNA, 672 bp, Homo sapiens
gaaatatccagtagatggtgtctagggtattaacataccgtcagcttcccgtgtatcctcggtgtgttacatcgacattattccgttagtggacgtatccctagctgtacactatctgaaccgattgatcctatttttagagctcaggaggaatccactataagacactcagaatgggtaatttctctttcaccttcgtcccatatgtgtctcgtgactgggacaacacaaattttttttcttgtgatgcagtctcactctgtcgcccaggctggagtgcagcggcgcaatctccattcactgcaaactctgcctccctggttcaagtgattctcctgcctcagcctcccgagtagctgggattacaggtgcgcgccaccacgcctggctaatttttttgtatttttagtagagacggggtttcaccatgttggtgcgtgagccactgtgcccggccaggagtaggattctcgggctcccagatgactcctttttgtcagaggtggtgtttccaggaggcccttggtcttgaacctggagactgttgggtcagccgtgctctgcaagagcaggcccgttctacagtgctagtgtcttgggcggttcccaggcacaggcggttctgttctttcatcttgccatgccgatacttctgtgcgtccacacctttcc

SEQ ID NO: 589968 - DNA, 3075 bp, Homo sapiens
ccgctactctggccctcagggttgtgtagtttccggggccacggcacctgggcacaccaggtggcgtcgcgcctttgctttcctgagccttctgagtaaggtaatgtggtgtccgtggggcgacgcctgcgcacaagaccgcgtcgggcctcacttttcccaggccttctgggtaatgtagtttccgggatcggcacccggcctgtgccagcttgcagagctcaccaggtgcagacccctgcggccagggcgaggacggatctgagcagctgggcagcaggtgccaccgcctgtgggacccagagggcttgaggacatctgcaatgctccagaagcccaagagcgtgaagctgcgggccctgcgcagcccgaggaagttcggcgtggctggccggagctgccaggaggtgctgcgcaagggctgtctccgcttccagctccctgagcgcggttcccggctgtgcctgtacgaggatggcacggagctgacggaagattacttccccagtgttcccgacaacgccgagctggtgctgctcaccttgggccaggcctggcagggctgtgagtggcaaggactttggagagatgtgagcgacatcaggcgcttcctcagtgcatttcacgagccacaggtggggctcatccaggccgcccagcagctgctgtgtgatgagcaggccccacagaggcagaggctgctggctgacctcctgcacaacgtcagccagaacatcgcggccgagacccgggctgaggacccgccgtggtttgaaggcttggagtcccgatttcagagcaagtctggctatctgagatacagctgtgagagccggatccggagttacctgagggaggtgagctcctacccctccacggtgggtgcggaggctcaggaggaattcctgcgggtcctcggctccatgtgccagaggctccggtccatgcagtacaatggcagctacttcgacagaggagccaagggcggcagccgcctctgcacaccggaaggctggttctcctgccagggtccctttgacatggacagctgcttatcaagacactccatcaacccctacagtaacagggagagcaggatcctcttcagcacctggaacctggatcacataatagaaaagaaacgcaccatcattcctacactggtggaagcaattaaggaacaagatggaagagaagtggactgggagtatttttatggcctgctttttacctcagagaacctaaaactagtgcacattgtctgccataagaaaaccacccacaagctcaactgtgacccaagcagaatctacaaaccccagacaaggttgaagcggaagcagcctgtgcggaaacgccagtgacacgtacacaccacgtcctggtctttgtttgaggcctgacgtgggcatcattttaacaggtgccttttttgtttttttgtttttcgtttttttggtcactccagtagctcctggaaaaaaccttaaaaaatgtttcctccaaatctgatttcattacatttctgaattgttgggtttttttttgttgttttgttttgttttgtagatggagtttcacttttgttgcccaggctggagtgtagtggcgcgatctcggctcagcctcccgagtagctgggattacaggcatgtgccaccacgcccggctaatgtttgtatttttagtagagacggggtttcaccatgttggtcaggctggtctcaaactcctgacctcaggtgatccgcccacctcagcctcccaaagtgctgggatgacaggtgtgagccactgcgcccagcctgaatcatttcttataccttctgacagcccaacttccagaggacagctctggggtactcgttggatgtctgtgagtacctggtcatacgggtcagtagggataagaattgtctctgggctgaggaattcttctgttctctggtttcaccagcgttgggtttgctcatgtaatgtggtcaccatactcaaatggtgtcatggctgaagttggccaccttgcttgagggacaagttgtttatgtatcagctctctgctgggtctccctttccatggcaaatgggcagctccatcctcttgatcttctaaatgcccaaaagaggtgtcatgctttgggggtacgatgtttatactccgtaaagaacatacaaggacattcactgctgatttttttttttgtttgtttgagacagggtctcactctgtcgctcaggctggagtgcagtgatgcaatcttggctcactgcaacctccgcctctcaggttcaagtggttctcctgcctcagcctcccaagtagctgggattacaggcacctaccaccagggccagctaatttttgtatgtttagtagtaacggggtttcaccatgttggccaggctgttctcgaactcctgacctcaggtgatctgcccgcctcggtctcccaaagtgctgggattacaggcatgagccactgcacctgacctgctgaattgtttataatggcaagaaataggaaaccccccaatgtctgttgaacagctatcacgttgaaccacgtgaaactgctgttttctaggccaaaaatggtgagcgatcatttatttcatgattcaacctgatacatttacatagtgcaaaactgtgtcacagtttcaggcttttatgaggaaagcgtttctgtgtagaaactggaagctgttcagggcatcggcagctgaaccctgctccgttggtcagcgttactatcatctcggatcatatggagctcatgtcagccgtgtgggtggcgggtgcacagagacggtctggaaggaaacacgcggatctgaacagcagtaatcctgggggatacgggggttgggctagattacagagggctcattttctacgtcatgtattttatgatacttgaattttttgaaatgggcatttattttataacatgttaaaatgtactttttaaattaagtcattttgtaatatttgaatttttacatttgttgtacaatcaggaaaagcaataaagatttttcaaaaataaaaaaatggccttcttgggcctcaac

SEQ ID NO: 589969 - DNA, 1333 bp, Homo sapiens
  misc_feature (1333)..(1333): n is a, c, g, or t
gcgtgatgtctcacagaaagttctccgtctcccagatatggtggtccctcgggcttcctgtcctcggaagcgcagcagcaggcatcgtgggaaggtgaagagcttccctaaggatgacccgtccaagaccggtccaccttacaggcttcctgggatacaagggtgtccatgagtcacatcgtgcggtgaagtctgatcacggcctggagtatccagtggtgaacaacgaaggaggtggtggcgaggctgtgaccattgtagaaacaacaaccatggtggtagtgggcacattgtgaggctaccgtggcataacccctcggtaggcctcctggaaccttccatagcacttgtctgttgcctgcagccaccatcaagttgcatagaattgctcagcaaggctggtttccttatagcagccaatctcggcgatcaaggtcttacacgaagaaagggcccttctacgccagacgttgactttgcaaacggtaacttgggccaggcgagtccacgggactgggcccaagcaaaggcaacgctagcggaggaaatgtgaagctatgcatgcgaggccaatgtacacggacaggattagctggccccaaaagctgcgataccccggtggttacaattgtgtcccaacagtacgctcctagtaattgctgtcgctgtcactctcacgatcattgtcaggcctgagtcagcagcaccagtgctcgctgagcgcttgccatttgtgcacgcaagtcctagagcttgtacacggcggcaggggcaaccatggatgcgtccccggaagcaaaagaccttcggggaacttgggaggcgcccagccggttagagagggcccttatggaggcctcgcacccaatgggttagccaccttggcttgaaaaagccccaacagaattggatttctcgcgtggcgccaaggggcactctgtcacggaccttggaattccgcacccgttttctattctgcgctggggtttggacccccaaagcgggggccacaataacgtggcctaacccaaaaaggtgcggggttccaccccgaaaaaggtccatggttgttggggacaactaaccatataaggaaaaggactttggcacccgcccctggcaggagaggaatccgcaaaaggccgggagaggaggccaccttggactggccgaaacggggttgggaggcccgctaggatacttatgggggggggcaaatttgggggaaattgctcgtggggcctaccaggattggtttagcgacccatttacccgtcgagttggatggcgcgcacaccggagcacacgacattggcggtcagcacgcagtagn

SEQ ID NO: 589970 - DNA, 237 bp, Homo sapiens
atactccaacatcgaacggactgatcgtggagtgtctatacttaaaagatggtttatgtgtgtcgagactgttataaacccattcgctgcagaatcaagcccacttttaggcttaggaccaggttctaactatctaaaaatattgactgataacaaaaagtgttctaaatgtggctattctgatccatagttgttttttaaagaaaaaaaatgtatggatcagtccgttcgcatgtt

SEQ ID NO: 589971 - DNA, 2610 bp, Homo sapiens
gggtaacaaagtgagacctcatctctaaaaacatttaaaaagtgagccaggtgtggtagtgcgtccctgtggtcttagccacttggaagtctgaggcaggaggattccctgagcccaggaggttaaggctgtagtaagctgtgttcgtgccactgtactccagcctggaggacagagcaagaccctgtcaaaaagatgaagcagtatgaccctcatattctgccctgcttggcacctgggctgggcaggacacagacccagaggcccctggcctgccctgtggacttgggggtcttctcgttttccttgcaggcttggagtcccgatttcagagcaagtctggctatctgagatacagctgtgagagccggatccggagttacctgagggaggtgagctcctacccctccacggtgggtgcggaggctcaggaggaattcctgcgggtcctcggctccatgtgccagaggctccggtccatgcagtacaatggcagctacttcgacagaggagccaagggcggcagccgcctctgcacaccggaaggctggttctcctgccagggtccctttgacatggacagctgcttatcaagacactccatcaacccctacagtaacagggagagcaggatcctcttcagcacctggaacctggatcacataatagaaaagaaacgcaccatcattcctacactggtggaagcaattaaggaacaagatggaagagaagtggactgggagtatttttatggcctgctttttacctcagagaacctaaaactagtgcacattgtctgccataagaaaaccacccacaagctcaactgtgacccaagcagaatctacaaaccccagacaaggttgaagcggaagcagcctgtgcggaaacgccagtgacacgtacacaccacgtcctggtctttgtttgaggcctgacgtgggcatcattttaacaggtgccttttttgtttttttgtttttcgtttttttggtcactccagtagctcctggaaaaaaccttaaaaaatgtttcctccaaatctgatttcattacatttctgaattgttgggtttttttttgttgttttgttttgttttgtagatggagtttcacttttgttgcccaggctggagtgtagtggcgcgatctcggctcagcctcccgagtagctgggattacaggcatgtgccaccacgcccggctaatgtttgtatttttagtagagacggggtttcaccatgttggtcaggctggtctcaaactcctgacctcaggtgatccgcccacctcagcctcccaaagtgctgggatgacaggtgtgagccactgcgcccagcctgaatcatttcttataccttctgacagcccaacttccagaggacagctctggggtactcgttggatgtctgtgagtacctggtcatacgggtcagtagggataagaattgtctctgggctgaggaattcttctgttctctggtttcaccagcgttgggtttgctcatgtaatgtggtcaccatactcaaatggtgtcatggctgaagttggccaccttgcttgagggacaagttgtttatgtatcagctctctgctgggtctccctttccatggcaaatgggcagctccatcctcttgatcttctaaatgcccaaaagaggtgtcatgctttgggggtacgatgtttatactccgtaaagaacatacaaggacattcactgctgatttttttttttgtttgtttgagacagggtctcactctgtcgctcaggctggagtgcagtgatgcaatcttggctcactgcaacctccgcctctcaggttcaagtggttctcctgcctcagcctcccaagtagctgggattacaggcacctaccaccagggccagctaatttttgtatgtttagtagtaacggggtttcaccatgttggccaggctgttctcgaactcctgacctcaggtgatctgcccgcctcggtctcccaaagtgctgggattacaggcatgagccactgcacctgacctgctgaattgtttataatggcaagaaataggaaaccccccaatgtctgttgaacagctatcacgttgaaccacgtgaaactgctgttttctaggccaaaaatggtgagcgatcatttatttcatgattcaacctgatacatttacatagtgcaaaactgtgtcacagtttcaggcttttatgaggaaagcgtttctgtgtagaaactggaagctgttcagggcatcggcagctgaaccctgctccgttggtcagcgttactatcatctcggatcatatggagctcatgtcagccgtgtgggtggcgggtgcacagagacggtctggaaggaaacacgcggatctgaacagcagtaatcctgggggatacgggggttgggctagattacagagggctcattttctacgtcatgtattttatgatacttgaattttttgaaatgggcatttattttataacatgttaaaatgtactttttaaattaagtcattttgtaatatttgaatttttacatttgttgtacaatcaggaaaagcaataaagatttttcaaaaataaaaaaatggccttcttgggcctcaac

SEQ ID NO: 589972 - DNA, 199 bp, Homo sapiens
cctgtctaaaactcaggtgaaagacactatagattgttctggacaatacattccaagaatactgggcttatgggtgggttggtgttttgtttcgttttgtttagttttcaagtcatgtctttatccccatattatggagaatgtgccacttggctaataatgtgttctcaaaactacaagttcagtgatgggtaccgag

SEQ ID NO: 589973 - DNA, 462 bp, Homo sapiens
agtaagtgagtcagaggcaagcggggtgggaaatggggaggaaagggagactggcggggtgagggcagaagcagagtgggtatccggaaagaaggcattaggggaaaaatgatggtgagagagttttcatccactttggcggttccctccagtgtgggttgagcttgccaggggggggtacacggtagattgtgcttcctcttggcgtgtggtcaccaggctctccttaatcggtagatacccccaactttctcccagctggtggccacttgatatttccaaagccagttctttacttctcacattataagtgggcaaggcagtggccttagagcggtgacggtccttttcctttaaggaacttccgggtgacttggcaggttccattaggagtcttgggcctctggaggaaggggttaggtgtggtttggtacccagaattatcacggggggatcctctag

SEQ ID NO: 589974 - DNA, 100 bp, Homo sapiens
  misc_feature (3)..(3): n is a, c, g, or t
aantatacatcagtgtgtatatcttaaatatacatagtacatttatttaaattaaattttgcttactatgtacaagacatggtaaagtactcaagaaaaa

SEQ ID NO: 589975 - DNA, 397 bp, Homo sapiens
ttgtctgcctctgaggcaataacaatcaacgcgagaggcacacgagaaggagcaggctgaccctgtgcccagagtgttctttagagcgcgctaaaaacctcaacatatacaatctgcagagtctcactttaaatggaggcacaagcctggtataaaggatccacgcagggggccaggctggctgtagtgctggcctagaacttgaacctatgagccagacaactcttgttagaggatttggtagggtggagaggggaagccttcaggaaacctgggcttgaaacttaaacagcaagcaagcaagttgaaagcagtggtgttaggaatgggccatgtgcctgtatgtcttgcatgggggggaaggaagactggacatagtaataacacatgagcaact

SEQ ID NO: 589976 - DNA, 244 bp, Homo sapiens
tgggaggccggggcaggcagatcgaagaggtcaacagatcacgatcatctggccaacatggtgaacacccatctccaccaaaacattacacacaaatgagcttggcgtggtggcatgtgccctgcagtcgctagctaactcaggaggctgcggcaggaagcatggcttgagaccaggaggtggcaggttgcagtgaactcaagatcgagccgactgcgacctccaatttgatgcagagagcgag

SEQ ID NO: 589977 - DNA, 603 bp, Homo sapiens
gctatgtctcgagcgttagagaaagtcctaagatattttataaaatcgattacaaatgcttcgtaaagttcagtcttcaggcatctgaaaaagggttaagtataccatctaaataatccccactactaaataatctccaaggcaggatctaggtactgcaaagaccaagttcacagatcaccgaaaggaacccttaactcacaaacagtccctaaacctgtggtgtaaaacagtggttccaaaattcagctgcatttcagtatggtctgagaagcttctaaaaaatagattctcgtggccgggcatggtagctcacacctgtaatcccagcacttggggaggccgaggctggcggatcacttaaggtcaggagttcgagaccaggccaacatgtgaaaccttgtctctattaaaaatacaaaaattagtcggtcatggtggcgtgtgactgtaatcccagttatttgggaggctgaggcaggagaatcgcttaaacctgggaggcggaggttgcagtgagccaagtccagcctaggagacagagcgagactcagtctcagaaaaaaaagggctttttcacgaaccatgatggatgattaacct

SEQ ID NO: 589978 - DNA, 870 bp, Homo sapiens
gctatgtctcgagcgttagagaaagtcctaagatattttataaaatcgattacaaatgcttcgtaaagttcagtcttcaggcatctgaaaaagggttaagtataccatctaaataatccccactactaaataatctccaaggcaggatctaggtactgcaaagaccaagttcacagatcaccgaaaggaacccttaactcacaaacagtccctaaacctgtggtgtaaaacagtggttccaaaattcagctgcatttcagtatggtctgagaagcttctaaaaaatagattctcgtggccgggcatggtagctcacacctgtaatcccagcacttggggaggccgaggctggcggatcacttaaggtcaggagttcgagaccaggccaacatgtgaaaccttgtctctattaaaaattataataatttgggccgggcatggtggctcacacctgtaatcccagcactttgggaggtcgaggtcggtggatcacttgaggtcaagagttcaagaccagcctgacccacatggagaaactccgtctctccttaagataccaaatcagccgggcgtggtggtgcatgcctgttatccccgctatgcaggaggctgaggcaggagaatcacttgaatcccggagccagaggttgcggtgagcccagatcgtgcccttgcactccagcctgggtgacagagggagactctgtctccaaaaaaaaagtgtaactccagcttttgtcagccagcctgtaatacccatagtttcccttgcccagaaaacattgctacctaatacagaggatatcaccccatgcgcttccactgaaggagcacaggtaggggacgatggaccataacgatcgacacata

SEQ ID NO: 589979 - DNA, 808 bp, Homo sapiens
tttctttgcactaaccttcaggaaccacgctcactgactctcaggactgctactggacaaaactaactctttgctattactacttgctcagatacgcacaaacgggacacatatgcagccacctccctagcagcctccatgacacgcttcccagcaacattctctggtttaacaaactggccttaccccctatcaacaaacacaaagaacacccgcgcgcaccaacacgggctacacccattgccccaattcacttctctctctgcacactcacgcagaattaaccacttcactctatctctcatctggcgcgctgcactggccctggattgctttactctgggcaaccggatatccatccttctaactttccctttaactggctaatttcgccccgcacctgacttaacagacaacatgccccatctcttgaactggttacaaaccccattcttcgcccctatcaacctttgtaacacatggcaacgtttgcccatgttaatacgtttcctgctttcgacaaaactaacgaagacaactccccacggatgcaccaccacgccttgcactccaactgggagaatactacctggtttacaacccccgaaatcacccccacccactggtttgtgcaccccatggtaatccgaccacaacaaggctaaaggaaccacttcaaaagaaagcgttctccaggcttcaacacgttttgcaaacacaccactttgacgccaagtgttatgggcaccttggactcagcacccttcaccacactacaatctcaattatttacccctgcgcccttgag

SEQ ID NO: 589980 - DNA, 860 bp, Homo sapiens
ctgaaagaagcactaaatacggaaagaaaaaactggtaccagccactgcaaaaacacaccaaaatataaagaccaatgacactatgaagaaactgcatcaactaatgggcaaaataacaaaatagcatcacgacaacaggatcaaattcacacataataataataaccttaaatgtaaatgggctaaaagccccaattaaaagacttggactggcaaatggataacgagtcaagactcatcagtgtgctgtattcaggagacctatcttatgtgcaaagacacacataggttcaatataaagggatgaaggaatatttaccaagcaaatgtaaagcaaaaaaaaggcagggattgcaatcctagtctctgacaaaacagacttgaaaccaacaaagatcaaaaaagacaaaaaagggcactgcataatggtaaagggaactattcaacaggaagagctaactattctaaatatatatgcacccaatacaggagcacccagatgcataaaacaagttcttacagacctacaaagggaattacactcccggtgtaaataaccagtatggagattttaacacccccatgtcagtattagatcactgaagacagaaaattagcaggtatccaggactgaactttggtctggatcaaggactagtagatggctaaaggaatctttacaaattaatagaatatccttctctcagtgcacatggctttttcaatcacactatggaggcacccttcttgcatgcactgacgacaaagtttggccgggaataaatgggaaaacccagccgttggaaaacgccgaggggaaaaaaaggaagctgcgagacagcatggcaagaacttgcaa

SEQ ID NO: 589981 - DNA, 838 bp, Homo sapiens
gagaaggaagaagaagagggggaggagaaagagatagaagaagagtcccacgaactggctgggtatacagaaatgtccagaggccggagagcgtttcagatcacatgtaccggatggaagttatgggtatggtgatcaagagatgaacgtcgttaacaagagaccgatgtgtacgacctatgcaccgtggttcgatgatatgggagaatggatctgtgtgtgggagatatagaaagaagataatatcttcaaagagagaagaaataggtgagaagaagaaagagagaagggatgagataatgaaatcgatttggatctgtgacatcctgtagacttaacgggctcagtagccagcaaggattttgcgccttcaataggaggctagtgaagcagatatacccagctcctaccagaggacctcagaaaggagctctatgaagcttgggggaagagtacgagacccaagtctagtgcagaagccaaattgtgaagcagctagaacaatgtgaagagtgattcttcaagcatctgaatatgaagaccttgaactacaaacctgggagactgcaagacttctatgattccggcaggaggaaaattcaagtcaccctgagataaggtccagcttgtttctgaactgtgaggagaaagaagcatagcatagctgcaagtggcagtgagcaaatcctgagaaatctttaaattgtgggtctgttacaaacgttttttccatttcatgggtgggtttggcatgggggctgtggattccctaaggagtggttggtcatgttgattagagaagggagatggggtcaaaagcagaaagagggtaagggga

SEQ ID NO: 589982 - DNA, 804 bp, Homo sapiens
taagagtaacccctcttttctccaaaggagtgcttgtggagatcggatctttctccagcaatggggggaaagaaggctttttctctgaattcgcttagtgtaagccagcggcgtatattttttaggcgccttcttcgacaacctagtagttactatctcattcgtataaatcttatattatactttaagctcacactgcttaagaataccttaattccttaaagtgaaatacttccattgcaaacggggtttcctcgattcggagctatattttccacttccaccgtcatttctaactcttaaaaccaactcaggttccatacatggtgatgttcaagaagatcaagatattttgaggtggatctatttaacgacgcctgaaaaggtgtaaggcagaagagagagaaggtgagctggacagggtgatagtggaggtgtgtgaagtatatcgatgtaaaagaggataaggatcactgggttgcggagatggctaaaagatgcttaggatgcacgggatccacagcagtgacaaaaacgacctatccgggagttacctgcgcctatgaacagaccagccaccttactgaaaagaacagccaaacaggttgaccaactgagcatggtgcctcgtgaagacctgtgaacacaaatatgacatacaaggttggagtttagacacctcctccacgggcctctggggcaacatattacaccggacaacatcgcgcggagaagactcaccggagtcgcagagatatcatcgaccgcacagaagcaacacaagataaaaaaaaacaaacaaaa

SEQ ID NO: 589983 - DNA, 740 bp, Homo sapiens
  misc_feature (36)..(36): n is a, c, g, or t
  misc_feature (78)..(79): n is a, c, g, or t
  misc_feature (87)..(87): n is a, c, g, or t
  misc_feature (96)..(96): n is a, c, g, or t
  misc_feature (111)..(111): n is a, c, g, or t
  misc_feature (119)..(119): n is a, c, g, or t
  misc_feature (135)..(135): n is a, c, g, or t
  misc_feature (158)..(158): n is a, c, g, or t
  misc_feature (192)..(192): n is a, c, g, or t
  misc_feature (202)..(204): n is a, c, g, or t
  misc_feature (227)..(227): n is a, c, g, or t
  misc_feature (234)..(235): n is a, c, g, or t
  misc_feature (251)..(251): n is a, c, g, or t
  misc_feature (255)..(255): n is a, c, g, or t
  misc_feature (286)..(286): n is a, c, g, or t
  misc_feature (304)..(304): n is a, c, g, or t
  misc_feature (314)..(314): n is a, c, g, or t
  misc_feature (364)..(364): n is a, c, g, or t
  misc_feature (371)..(371): n is a, c, g, or t
  misc_feature (472)..(472): n is a, c, g, or t
  misc_feature (480)..(480): n is a, c, g, or t
  misc_feature (543)..(543): n is a, c, g, or t
  misc_feature (545)..(546): n is a, c, g, or t
  misc_feature (729)..(729): n is a, c, g, or t
gtaatcttttaaagttctcttaactctaggaattanagttggacagcatgttatcttgaccagaaacttctaaaaatnngctttgantgtcttaantaggcaatgtcactnttccaaancagcatgaatcctggnctccagtccacacctctgccggncagacgtccatcccagtcataccatgactggcangccaccactnnncccatgtcctcagtcttcctcangtcttcnntgtgtgtttgttactnattngtcctctgttacatctcgtcttccttcaggncttcagtgtgtgtttgtnactgagtggncctctgtgacatctcgtcttcctcaggccttcagtgtgtgtttgtcactnagtgganctctgtgacatctcgtcttcctcaggccttcagtgtgtgtttgtcactgagtggacctctgtgacatctcgtcttcctcaggccttcagtgtgtgtttgtnactgagtngtacctctgtgacacctaggcttctgtgacacttaggttaagcttattagaagttgaaaaagntnnatgaagttttttagcccagaaaatagatgacttcattgagagttaactcactgtgtaataggacacattttaataaacaaatgatcagcattttacacaatccattttcttcagaaaatctagagcaagggataacttcattatttgcataacatttcagcattgcagtttgaaaacagctgnactttcagatg

SEQ ID NO: 589984 - DNA, 857 bp, Homo sapiens
agcggagggcttcgtgcggtggggctcgctcgcgcggcagcggtggccgaggcctcttggttctgcggcacgtgacggtcgggccgcctccgcctctctctttactgcggcgcggggcaaggtgtgcgggcgggaaggggcacgggcacccccgcggtccccgggaggctagagatcatggaagggaagtggttgctgtgtatgttactggtgcttggaactgctattgttgaggctcatgatggacatgatgatgatgtgattgatattgaggatgaccttgacgatgtcattgaagaggtagaagactcaaaaccagataccactgctcctccttcatctcccaaggttacttacaaagctccagttccaacaggggaagtatattttgctgattcttttgacagaggaactctgtcagggtggattttatccaaagccaagaaagacgataccgatgatgaaattgccaaatatgatggaaagtgggaggtagaggaaatgaaggagtcaaagcttccaggtgataaaggacttgtgttgatgtctcgggccaagcatcatgccatctctgctaaactgaacaagcccttcctgtttgacaccaagcctctcattgttcagtatgaggttaatttccaaaatggaatagaatgtggtggtgcctatgtgaaactgctttctaaaacaccagaactcaacctggtatgtaattcccatttctggaatgtggctggacacccactattaccttgtaagaattttgtaattgggccgggtgtggtggctcacgcctgtaatcctagctcccagcactttgggaagccaaggcaggcggatcacgcttcaggtatgga

SEQ ID NO: 589985 - DNA, 1454 bp, Homo sapiens
agcggagggcttcgtgcggtggggctcgctcgcgcggcagcggtggccgaggcctcttggttctgcggcacgtgacggtcgggccgcctccgcctctctctttactgcggcgcggggcaaggtgtgcgggcgggaaggggcacgggcacccccgcggtccccgggaggctagagatcatggaagggaagtggttgctgtgtatgttactggtgcttggaactgctattgttgaggctcatgatggacatgatgatgatgtgattgatattgaggatgaccttgacgatgtcattgaagaggtagaagactcaaaaccagataccactgctcctccttcatctcccaaggttacttacaaagctccagttccaacaggggaagtatattttgctgattcttttgacagaggaactctgtcagggtggattttatccaaagccaagaaagacgataccgatgatgaaattgccaaatatgatggaaagtgggaggtagaggaaatgaaggagtcaaagcttccaggtgataaaggacttgtgttgatgtctcgggccaagcatcatgccatctctgctaaactgaacaagcccttcctgtttgacaccaagcctctcattgttcagtaagtgaaatgcttgttggataaaagctttctgcaaagggtaatcttagaagacattatgtaacttttactctatgttaaaaaattatgagattatataagtggtggtagggatttttgggtgaatttaaacaccttgtaattaatagtttttcctggctaatgcattattttgaaagaaactggttacttattttcctgactctaaataacttgtagattttgcagaacaaatttaccggaaatctgcattaatagtttttgtaattaattaattacaaaactagtaattaatagtttttcctgcctaatgcattattttgaaagaaactggttactcattttcctgactctaaataacttgtagattttgcagaacaaatttactggaaatctgcattaatgttcaatttaattttatttatttttgtggcatttgataactattcaaaaacaatagaagatggaatcctttgtaagggtaaacatttgacctatgataaaacgtgactaagatgagggagagaggaaatacattaagagagtttcgatctttcaaaatgccatacagttttctgcttttctctctgatattaggtatgaggttaatttccaaaatggaatagaatgtggtggtgcctatgtgaaactgctttctaaaacaccagaactcaacctggtatgtaattcccatttctggaatgtggctggacacccactattaccttgtaagaattttgtaattgggccgggtgtggtggctcacgcctgtaatcctagctcccagcactttgggaagccaaggcaggcggatcacgcttcaggtatgga

SEQ ID NO: 589986 - DNA, 170 bp, Homo sapiens
tctccatgtacctaacaggtagcttccacattactgtaccaagaacagattagaaaaagcaagatggttatcccgatttagtagcctccctttggttcctcacctcatcagacaacaaacagaatgttaacagtctttcctgtgatgtatttccttctttcacctcactt

SEQ ID NO: 589987 - DNA, 288 bp, Homo sapiens
  misc_feature (93)..(93): n is a, c, g, or t
  misc_feature (164)..(164): n is a, c, g, or t
  misc_feature (200)..(200): n is a, c, g, or t
  misc_feature (230)..(230): n is a, c, g, or t
  misc_feature (262)..(262): n is a, c, g, or t
  misc_feature (264)..(264): n is a, c, g, or t
  misc_feature (287)..(287): n is a, c, g, or t
cttgactataggcgcaaacgggaaagtttgaatactcccttcgctcgttctgttatcctttctgttaagtcaatgcccgatgtttccacgggnttgaatcataacgttctcgtctttagtaacctaactcctttggaattctccctagtcctactcgcagcatnccccataaaattgtggttggtagagatacatcattncttgttccagttaatccatagcaaccgttntcgcgactccgccgactgggaccgtgccagtntngacgacgggtacctctagtagtnt

SEQ ID NO: 589988 - DNA, 179 bp, Homo sapiens
ttatcccgtgctgtagtcgctatgccgatcgagtgtcgcactaagttctggcatcatatggtgactcccgggagcgggggaccacaggttgcctaaggaggggtgaacctggcccaggtcggaaacagagatgatcataactcccgtgctgatcaataatgggacacgaatgtacagga

SEQ ID NO: 589989 - DNA, 1181 bp, Homo sapiens
agcggagggcttcgtgcggtggggctcgctcgcgcggcagcggtggccgaggcctcttggttctgcggcacgtgacggtcgggccgcctccgcctctctctttactgcggcgcggggcaaggtgtgcgggcgggaaggggcacgggcacccccgcggtccccgggaggctagagatcatggaagggaagtggttgctgtgtatgttactggtgcttggaactgctattgttgaggctcatgatggacatgatgatgatgtgattgatattgaggatgaccttgacgatgtcattgaagaggtagaagactcaaaaccagataccactgctcctccttcatctcccaaggttacttacaaataaactgcacttcatcttccgacacaaaaaccccaaaacgggtatctatgaagaaaaacatgctaagaggccagatgcagatctgaagacctattttactgataagaaaacacatctttacacactaatcttgaatccagataatagttttgaaatactggttgaccaatctgtggtgaatagtggaaatctgctcaatgacatgactcctcctgtaaatccttcacgtgaaattgaggacccagaagaccggaagcccgaggattgggatgaaagaccaaaaatcccagatccagaagctgtcaagccagatgactgggatgaagatgcccctgctaagattccagatgaagaggccacaaaacccgaaggctggttagatgatgagcctgagtacgtacctgatccagacgcagagaaacctgaggattgggatgaagacatggatggagaatgggaggctcctcagattgccaaccctagatgtgagtcagctcctggatgtggtgtctggcagcgacctgtgattgacaaccccaattataaaggcaaatggaagcctcctatgattgacaatcccagttaccagggaatctggaaacccaggaaaataccaaatccagatttctttgaagatctggaacctttcagaatgactccttttagtgctactggttcggagactggtggtccatgaacctctgacatttcttttgacaactttatcatttgtgctgaatcgaaagaataatcgatgatgggccaatgatggattggggcctgagcaaagttcttgattcggctgctgatccaaggcgtgt

SEQ ID NO: 589990 - DNA, 722 bp, Homo sapiens
agcgggggtcctcgctggcaaaagctgcggagggcgggaccaaccaggacaggacggtgactgtcgtggaatcaccaagaagcagggcaagagtggaaataacagcttccagatacgaaggacgaagactagtagaatcaggagcaaaatttccgtcaggaatacatacagccttgtggctgtcccgtctacagtatctgctagaatacaagtacctagtctctcagcccatagtgaagaaagacgaactggctaaagattcttcagggtttagcgcaagcgatacatagcagaacttcaaaaaggctaccgatccttaaagagatgttcctcctgctgatcaagagaagcttctggtatccagaagtgacgtcagtgttgcgtcctcgttcgacttagtcactgatccaggtaagtgacctaaagctggacaggaagtaaaacgagctgctttaaagttgacaatggtacgactatagtcacccataatcggacatgtgatcaccgagcctatttaacccagaagtagtccatatgtatgcagttaacatgtttctgaacattaccagcttccgtccaatcctacgggagcggaattatgacccggaggaccgatgaaccgacgtgagaagcaggtcaggtctcatctacatgattgattatgaatctcttgcttgaagattgtaagagtgtccagacttccaacctaatatagcgaagaa

SEQ ID NO: 589991 - DNA, 187 bp, Homo sapiens
gagtgtcttcaagaaggagatgttatttcacttgtgacttcctgccaagtgaatgagtatacaattataagcaaactaacacagttcagttgattaagttagaatctgtgaccacctaatgtagctcagggtatggtggatactagatataaacaagagtagggaagtcttcggcacgcatcaggga

SEQ ID NO: 589992 - DNA, 470 bp, Homo sapiens
ggggggctgagactggacctgggtctgcctgacctcagaggtggctctcaggatgggtgacggggggcttgtgtctgtaaatagccatgatactaactttcttcccatctgtgcaacggggccccccaggcactaggaggtcctcccctctcctctccacacccgtgctgccccctcggtgggtgggggggtggagtggacgtactgggagccggcccggggaaagcaccccatgcccatccaagaagatagcggatgacgtgttcagacagccatagaggagtcgggggtcgacacggcccagcaatcgtcaccagaaaggcaaagacaaaagacagacacacacaaaacgcaaacgtaaaccaagaacaaaacaaaccgaacaacaagcaaagacaccaggaacaccacagaacgcaaaagaacaaacgaacaagagaccaaaccaacaaaagaaagaaacaatcagc

SEQ ID NO: 589993 - DNA, 1115 bp, Homo sapiens
cgggatggaccagcgactgagagagccagaggcagagaggtgagggtgaccatatcctggactgtgagaggaatgggactctgggcctgtagctgccaagcaggtggcaggtgctccagtgctgtgatcttgcaccctctgacccctgacattgacctcctaccctgacccctgcctgacctaagccatgtctgaacaggaggctcaagccccaggtggcctgggggctgtcccctggacatgctggcagagcaggtggagctgtggtggtcccagcagtccgcggctgctcggcggctctgcttcgtcgtggcctgtgggcctcgtggcagtgcttgtggcgctgggcggcgtggcacttgcttgtctaaccaccttgcagccgctcaggtgaatggccggctagcacacgtggcaactgtgctctgtttgctggctctgctggttctggtgaaccaggcttgatgagctcgggctgtgccagggaccttgaactggcatccggccagggcccatccattgttggcccttgctttgcgcacgtgctcgcctcggtgccgtatgggccccgttcgattggctgcctgcctcacgttgtgctcctcggttgcctcgcttgggctcaccctggggccttgaatcccttggccccgagggctttgagctctcgtgcgtggttcccccttttgacgccgcttgggctcacagggcagcccacgcacatctgcgcgcacaagcccaaattaggcacttagatccctacggctagaggtgccaatttctgggctctccataggggacttatgccccattatgagacggagccattccccggcacagttagtatagggccgtttggcccccttacgtgttcagtggctcccctattcggcttcttgggggtcgttagacgtactgctctcagagatgggtattgagagggggagctacggattagagaacgcccgggtgcaaccacaactcgttttctggggcctccggccgagttctgccagcattcacctctcgaggctaccgttcggagcgcccccgcacagcctccccgccgctttacccgctgcgcgacctgagccacgggtcgtctggggtcctcc

SEQ ID NO: 589994 - DNA, 422 bp, Homo sapiens
cgcaatcaccacgagatcttcatcttcaaccaccagcagagcgcctgatgggaatgctgtataaggtagtttactgaatgtgcgctaaacacatgcaccactggcctgcaggccctcactgcacttccatttgtatgcatcgctgttttattcgtcattttaggatggcgttaatcaaatctccacctttatgtttgtcttctgtaatgcgtcaaagctagaatgaaatcaaactcttgttatgcttttaaaaaggaaaccgttcaagatcgtgaactactgtgctgtccaagattgtatgtcttatttcgatgtttagtttcgtttttcactttaaaaagcgcctacgcctttcgtttgtgttcaggaattagaatgatgtaagatcaagcgctatacaatcctcctaataggactatatt

SEQ ID NO: 589995 - DNA, 901 bp, Homo sapiens
ctttcaaaacaacgcggggaaatataaaaccgaaccgtgttagttatcccccaaatccatttccaagttcattatccgcgcttgtgaattacaaaccttagctgtggtttctctttttaccgtgtgtaacaagattgccttgggttaaaatcggacgcgggaccaatctcggacgtgaatgtcaatcggaaatggcaacttcaggaggaaccgtttccctttgttggtgctataaattggtttcatccgctcaaggtgacatggggcttccttttaggaaaaccttccaccgtgagggccttgcaaaggtgtgaatttcccttcactctactcgtgtagggcctctttcacccacaaaaggtgcgctaacacgagtctattatgcccaattgagatgctacccccactttctctgagccttaattgttggctgatgatttgtctgtctctataatcgtgttacctacccttcactcctgagctgcactgcctacccttccctcataggcatgcttcttcagtaatcatatttcatatttgccatgtctattggcatgcatgtagattcttgaaaatatatagaattgattttgtgtgcattttgttattgttacacactgttcactgctgttctagtagaacaatctgcaattaaactgtaacttgtgcattatcaatcttgcactctcttctttatgttatctggtaatcattttgtgagagaagtctaactttcactaaggcaggttacttgatagacaagcaaactctgccctgtcttccttcacctgctgagagggatcaagcaaacccccaaatcatgatatgcttccacgtacaattcatttcaatattcctttacttcatatacattacgcctgaggacttccatttctaaacg

SEQ ID NO: 589996 - DNA, 469 bp, Homo sapiens
gctatttatctgccaacacagcactatattgggtattattaatgttgatgtatggttaaatcttatctcttttttatacacaatacttcatgtacctatgaaataaaacaggtaagggcatatgtcccagtgcaaacacgagtgagtcacacctgttcaattagaacagcaccatcccactgattgtcgctgcagtccacggcgttactaagcctgcggcaaccacgtagtgccccaggaggcgctaccaggctcttcgggccacaggcctctcctccactgcattgttggcggcagggcggggtaaggtcgcagggctcccatagattggttggggcaagcttcaagggcacattggggcagaggccctccgaaggtcccctccttcagtaggggatgtcattcttgatagtacctggactcatgttgtaaggtcccggctccctggttgcttgaatgaaggcaggct

SEQ ID NO: 589997 - DNA, 529 bp, Homo sapiens
  misc_feature (54)..(54): n is a, c, g, or t
  misc_feature (81)..(81): n is a, c, g, or t
  misc_feature (92)..(92): n is a, c, g, or t
  misc_feature (116)..(116): n is a, c, g, or t
  misc_feature (118)..(118): n is a, c, g, or t
  misc_feature (137)..(137): n is a, c, g, or t
  misc_feature (139)..(139): n is a, c, g, or t
  misc_feature (158)..(158): n is a, c, g, or t
  misc_feature (172)..(173): n is a, c, g, or t
  misc_feature (230)..(230): n is a, c, g, or t
gacggggctgagttccgtggccagatgcccattacgcctggtgaccgagcggcnccttctcaaaattaaattaaaatactngactaactgcncaaaaaaaaagtcattaaaattcntnttttggagccgggcacgtntntcacgcctgtatcccgcantttgggaggcccanntaggtggatcatgaggtcaagagatcgagacctcctggccaactggtgaaacctgtntcactaaaaacacaaaaacattagctgggcgtggcagcgcatgctggtaatcccgcatttgggaggccgaggcggcagatcacttgaggtcaggagttcaagaccagcctggccaacatggcgaaaccctatctctactaaaattaaaaaatcagctgggcatggtggcacatgcctgtaatcccagctactcgggaggctaaggcacaagaattgcttgaacctgggaggcagaggtgacagcgagccaagatcgtgccactgcactatagcctgggtaacagagcgagactctgtct

SEQ ID NO: 589998 - DNA, 685 bp, Homo sapiens
tggagagaagggtgtggtgtcccccggcgggtcgggatttccccctctcgtggtagagcatttctctcacacacacggaggggccccttctcggttaatttcccctcgctgcgcgatctagcctggggagagaaccaccccaatgatattctctctctctaacgacaggtcgcacagagtgttgatgtagttctgagggaatatgttccccgacacacccccccagtcagagaggccagccgtcgcacgacactcgggaacacacacagggggcgcgcagcacactgcggatcggtgggagaatacacgcatagagagagatatctctccaatttgtgtgctcacaacgacacatagtggggaagaccccgcctgtgggggcccccccacaaagagacggagaatattatgaggggcgtacgaaattgtgcgtctatgtataagaacagaagacagaggcttcccacgaagcaactgtggcgcgcacacgacaataaagaacgagcggcgtgtaccccggtaaacaacacgcgcttggtttgccgcacgcctcctgtggacacacccgggggcccggtccgccgccggcgagggacccccgcgcggaaataaccccccacgaagtgacaccttgttgaccgcaccacaaaacaaagcagtctccccccgcccaaacaaagaacag

SEQ ID NO: 589999 - DNA, 766 bp, Homo sapiens
ggctcactagtaccagggtgcaatcttgggtcatgcagcctccacctcccaggtacaagtgattctcgcacctcaggctcctgagtagctgggattacaggtgtgcgccgactacacccagctaatttgtgtattttgtactagagacacaggttgtcatcgatggttaggccagggcgtggtctcaaactcggctggacctcaagcgatgccagtccgaccttggccgtgcccaaaggtacgtgggtattacagagcatgagccactggtgcccgagcctgtaagcagatcacacttgttagaaagttgatgatgtcagacgtcatctatcactcatgacaacatccgttattctgtatttgttgtgttgggaagacacgccttctgtgctgctcgtgtgagcccctggggcgtggcagtgtgcaagggggggccaaactctgtgggtccctgcagggaaacctctcacgcatctctccacgggttaccaaacgggatactcttctggctctcaagaccaacaggtagtaagcatgagggactaacaggggcggccacagccctcacgcgctcctacgtttgaatttaggcggttttcctgcgtgaggaagacgggggtgtggccgctgctttctggtgccaggggccgggtcttccgaagtgcctggaccttggtgagtccggcggtcatacgggctccccaagtgggcggggctcttcccgggtgggtgtccccggtgcgcccggggccaatttattccttga

SEQ ID NO: 590000 - DNA, 113 bp, Homo sapiens
caaccctggctggggaggaggagagatgtcccagcagctcatcccccctggctgcccagtgcaaagcatttctccatgctgcaaaggagaagcacagctccttgccagggatt

SEQ ID NO: 590001 - DNA, 310 bp, Homo sapiens
  misc_feature (13)..(13): n is a, c, g, or t
  misc_feature (18)..(18): n is a, c, g, or t
  misc_feature (166)..(166): n is a, c, g, or t
  misc_feature (260)..(260): n is a, c, g, or t
  misc_feature (266)..(266): n is a, c, g, or t
  misc_feature (276)..(276): n is a, c, g, or t
atcttaaagaacnttttnaattgaaatttgaaggcatccgcgaagccttcaatcccccttgctcggccccttccccctatctggctgggcgggaacactggtaaggattgcggtggagccaacaagtcctgcggtcccggtatccagtctgggcaggaaagccaantggccgtgagccagctctcccagggggctgacggacatcttcctggggaccagcatctccttcagctccagctgggcccccttgcgagggagangaggcncctacctggncggccggcgatgtgctgtaaaggggcccgcagac

SEQ ID NO: 590002 - DNA, 225 bp, Homo sapiens
ttaaggagagctcagtggggcttagtctccaggaggtgtcgaacatcattaggccatacgcgtctaaatagagtctaatttcattttggcaacaggggtcagaattacggtggtcttaactagaaattttattttgttctttttctcttttgagacagggtctcgctctgttgcccaggctggagtacagtggcatgatcgtatctcactgcagccttgacttcc

SEQ ID NO: 590003 - DNA, 534 bp, Homo sapiens
taatggtctggagtaatgcagtgtccagtctcctgagttcctgggactctgccagattgggctgagcgtgagttccacattccaaccccagcagcccaagcctgggcatggcgtctgagctggcccggctgtggtggggatggggtccgagggcctaggcgcaccaggctcctgctgtcagctgtccaagtagacaaagaggatgtcctcatctgtgccatagctggttctgggctcctcaaagttactgatgctggtgctgcagattcggtcggcatgggctgggttgttgtagaagatgcagccagtggcccggttgtagccaggcagcatgatgaagtgggcctggtagtcaaggagtgcggcagaagcagtggtggccactgagggtgaagcagcagtacttgacaggggctggagcacaggtcacagtgcagcaaccccgagttcaacagcacgatggccaaatggccctgagccaggtgcgccctgggatgtccttcacactcactgtgcatttctccaccaagcact

SEQ ID NO: 590004 - DNA, 182 bp, Homo sapiens
tttggttttgtagcaaagaaatatttgaaataaatccatatttcaacactgaaattgttgaaaagcgtctcataacaaaaggaaaaaacatggaagttttgttttagtggtcagtataggggaatgaaagcgtctgtagttagccacgtaactatgttgataagtattagaggttaagctta

SEQ ID NO: 590005 - DNA, 399 bp, Homo sapiens
  misc_feature (11)..(11): n is a, c, g, or t
  misc_feature (17)..(17): n is a, c, g, or t
  misc_feature (76)..(76): n is a, c, g, or t
tttgggttgancaaaancgactaaagaaccttcgtggaaaggagaacccaaggaaaggagaagggaaaagagcagnaaaaaggaaatagtgttggtccctcaagagggagactttcttcctcagtggcggagagaagaaagtctccctcttgagggagactttcttcctcagtggcggagagaagaaagtgcatttattgtctttccacatattggaggaatgtcatcttcctaaatgaagtttatttggaggaacacagtcatctccttggtgaaatctaatccggttacattgtggctggtttcttgaacacattctaactgtgcaaaattatcttgccttggccgtgtaatgtgaggtttacctgattctctaatgaaataaatacctaagttata

SEQ ID NO: 590006 - DNA, 388 bp, Homo sapiens
  misc_feature (64)..(64): n is a, c, g, or t
  misc_feature (125)..(126): n is a, c, g, or t
  misc_feature (140)..(140): n is a, c, g, or t
  misc_feature (159)..(159): n is a, c, g, or t
  misc_feature (177)..(177): n is a, c, g, or t
  misc_feature (179)..(179): n is a, c, g, or t
  misc_feature (198)..(198): n is a, c, g, or t
  misc_feature (205)..(205): n is a, c, g, or t
  misc_feature (275)..(275): n is a, c, g, or t
  misc_feature (355)..(355): n is a, c, g, or t
agtccagccgctgcaaagggcatcccccaacgtgatgccgctgggccacggacagcctcccacncgaccaaggacatgttccccgggccctatcctaggaccccagaagaacgggccgccgccgnnaagaagtataatanccgtgtggaagactacganccttacccggatgatggnanggggtatggcgactacccnaagctcnctgaccgctcacagcatgagagagatccatggtatagctgggaccagccgggcctggaggttgaactggnggtgaaccgatgcactgggcacctagacatgttacaacagggaaccgtgtgggatacatcccccacactgtttttttggncatgtcatgtgtttggcagttttttggtttttt

SEQ ID NO: 590007 - DNA, 862 bp, Homo sapiens
gcctatccctccacaacgatgtcaatcctactatgtgctcttgccacacaatcgagaacagcaaaaacgactcagtagcctttcagatcctgtctcagaaagaagagtgggagagcaggactcagcaccaccccaggaaaaacccacctcacctggcaggctatgaaaaaagagcaaaggatgacagtaggcgggtggtgaagagcactcaggacttaagcgatgtgttccatggcatgaagtgggcatcccactccggaacacctgagagatcaaaccgactggtacaagactatgttaaaagatcccacaaactgcaacagagactgatgattcagatctgtactctcccagatactcatcgcaatgacgacacacaatctccccttgctgtgcctcgtcaaaagtgcgctgagctacatgatggtgagaaggtagtcacagaggtcggacacaacataccacttcccagcccgtcttcctcactgaggtcagctcagaaagaaatgactgggcaacccccagaatagaaaaggtagaccacaaggaacatatgcgcggcagaggcccaacggagcacttacgaactcatcagccctggcaaagtctacggtctgacccacgaacacgatgagtcgggatattacggccccacagacagcacgagacaaagcacacaccacgcctgcgagcacgccacgcgccctgacaacaggccccaacacccccccccaccgccacacaggagacagagagcggcacaagcgcaaagaaccggcaacaacgagcgcgccccacacaaaccagccgggacgcggtgccaccaggggcggccgcgccacgggcccgccgcacccccgcg

SEQ ID NO: 590008 - DNA, 888 bp, Homo sapiens
  misc_feature (886)..(886): n is a, c, g, or t
gacatgtagggttttttaaaattatgaagccacaacagttatatttaggaaacaaaattttttttctcttcctggtgttttagattacccaattaaatccagaaccattacattgtaaattatatccataggttttagtttcttgtttttacatttgagacaaggtcttgctctgtcactccagcctgagcgacagagcaagactctgtctcaaaaagaaaaaaaaaaaaaggagagaaaagaagggaagaaagaattgtctttaaactttttttttaaaccaaatttggatttaagtagaggtggctttttcaagtttaagaagttggtttaattggacataatctattggagagatttttacccttttaaatagatgatccagtatccattcattcagaccacttaagtattcatggagacgtgtataatggtgctaaaatactgtcctaggcatggaatggtgggtgtataaacctttgatccaagaccagcctggcaacacaaggagactcgtctaacaaaaaatttaaaaaaaattacctgcacgtggtggcatatgcttgtggtccacctgcggcctcccagagtgtggagatttacggctgagttaaccaaccagctgggtggttttaaatctaacaaatttttctctggtcctctggtttttatacctaaagcctttgtttgaaggcccatcgatgatcctcttatttcaccttcgcattgaatgggtctatgccacattggttctggtcaagcgtcgaatcgatggttggatagcggttccactttgaaaggatatattagagcacaagaaaggtggggctacaaaagcgatatcacttgtcgcagttgtcgtactttgggtgatatatatattggntt

SEQ ID NO: 590009 - DNA, 105 bp, Homo sapiens
agggcaagagtacaagaccagacctaagcaacatagtgagaccccatctctcagaaaatataaaaaaaatcaaccatatggtgacccacaccgtgtagtcccaac

SEQ ID NO: 590010 - DNA, 1176 bp, Homo sapiens
taacctccatcaccgtctcggtctagcaggaacacagctgccctcccttgaccatgaactcacagtagagtggagaggggtggcctcctttacagttccaggtagggggtgattcctggacaggggttcctgagaggagtgggttgccatcccaagaatgcacacagcagaggacgcagaaggcctctagcatggaggaactggaggagaacccatttgtgacagcaacttgctcgcaacttggccctcactgagctaccagctacggcgtgtctgcatttgtgcagctccacatcaaaagctgcggctggaaccttggtctccagggggtgcagcgaacaacaggtccagtgtctcaactagaaacgcggtatttcaacctcttagccatttatccaattacgctgcaccgttcactaaccccttcctctccccttctagctggcgtcagaagaacaccatacacttagccatgaacctgggatacgcaacggcgaggagccttgtaatatctgatccaaggttctccatgccaacaacaggtttcctactacagtcttaccgaaaacattctcaagcctccatttgaagaaccctaactagcgcctttgcgcaggccaaaggcacggcggcatctacctgaggctccacgaagttggaagaccgacgcctgacccaactgctggctgaaaacccccgtactcctacctaacgcattaggcacatcagcccacgcgctgcggaagccaggcggcctgcatagtcccaagcctactggcaggcagcgctcgacgccccagcaccgcacagtgccgggaaacccacggacacggccctccacgggtacgcaccaccgacgctcttgccgactccccgcccacctagacacctccaagcccctggagccaaccacgacgggcgcaccggctcctccacaagcaccagagaccacatagccgctctacactgagggccctcctattgtgcaaacctcgttgccctgttcatccagccaaactggatcccttcaggcttttagctatcactgttgccttccttcgagtctcgccacgtccatcacctccgtcggcctgcccaacggtgctcgcccagtgcctcctcctctgccgctattccgactcgtgggctacaaccgactcctgttatccgcgtcgg

SEQ ID NO: 590011 - DNA, 864 bp, Homo sapiens
tccggcgcaaggccttcctgcactgcatacacgggcgagggcatggacgaagcatggtagttctagccgatggcctggagtagcaacatgaatgatctggtgtccgagtaccagcaagtaccaggatgccacagccgaggaggagggcgagttcgaggacgaggctggggatggagagtggcctacaagccgttcagtcacctgagtgggaaaatgcagggaacgcgacgggtgaagctctgttattcactcaccatgccttgtcggtgtgtgccttgtcccactggtgtgcaccattgcttggtgttccctgtccacatctcatggctgtacgcgacaccaccagttaaagcattttcatcgtgaaaccccaaaaagaagagaagccgggtggagcccggtcccttgggatgtcttcccttgggtggggcgcacgagcttcccaccgctatcccccacgccttctcccgctttggtccctcccctgctggtctcgcctctcattggcccgagtgctcgcggcgcttaatctacggacgcctcaggtccttggagcccgccaggttgtgactacaccgcgtccgccgaggtggcggcaaaggccctgcgacgtgcgacgagtgcgcgcctgctcgcgtggtagcaatgcgagccccgtgtcctgttcgtggaggcggtggacctttcgatgggagcgccactacgcttacagcaagcttttacttgcgtgtactcgctgccgtttcacgcttgtgacaagtgttcagtggtgttccaagtatcctggcgtatcgcggcggattgcaaaggtgttgggttaccggcgtacggtctttggcctttttgtcggggctctctctgtca

SEQ ID NO: 590012 - DNA, 890 bp, Homo sapiens
gcgcaagcgaggcagccatgtcgttatccgcgctgatgattatgagtctgaggcggcttatgacccctacgcttatcccaggcgactatgatatgcacacaggagatccaaagcaggaccttgcttattgaacgtcagtatgaacgagccaaacctgatcaagtgatccctggaggtgatcgaaataatttctagtccaggtattatccaacgaaaacgtggtactcaggattgtgatgtgaccgagaaagtgtcatgagctcacaaggcctagtctgagtctcacagatgatgtcgattggacacatagaggtgctatgaggatccgaggagcatctatcgagcaacgagctgggaccaagcgtgacgtgacacagattccttcaaggaagtcagcaccttgggcccgagggctgaatgccagttgctcgcactaggttggggaatgcatagctgtctgtcctggaattttatacagaagcaattgagtgacctacagtgcacaggtatatgccgaaagtgccagtggggggaccttacctatggaggcagagtgttgggaatccgtgattacaactacatgcaatctcgttcagactacagttcttcaatgcccatggttccttgctcacccttgaattagccaagcaaggggctctggggatagtgatccgatcgagttcatctacgcagtttcagtcattcagtcagtaccggtgtaagactggcaagaagtccgaggaggagattgacttggcttcgtgccaagtccgcaaaatcgtggaatgtccatagtgtcctcaatgtcttcattccctggtagacaaattcaacgatcaacgacaggtggaggtatacaccagcggaggtgacctgagagtgtggctggg

SEQ ID NO: 590013 - DNA, 220 bp, Homo sapiens
tacatatacgaatcgagccggtaccccaggtagactaacgtgtagtgagttgtcgcaggtagacctaactagaagtgtgaaaacgtagcgctttggattataggcgacagcgtatttctaggattagtcagtagaattagaattgtgaagatgataagtgtagagggaaggttaatggttgatattgctagggtggcgcttccaattaggtgcatgagta

SEQ ID NO: 590014 - DNA, 195 bp, Homo sapiens
gtgcgtgcctagaggatcccattacagccatatctacatcaagcaacaagtcattattaccctcactgtcaacccaacataggcatgctcggtcaggaaaggttaaaaaaaagtaagaaggaactcggcaaatcttaccccgcctgtttaccagataacatcacctcgtagcatcaccatgtattagaggggtac

SEQ ID NO: 590015 - DNA, 215 bp, Homo sapiens
cttaaatcttttcggagacgagactggagaggcggagactgtggggcagatgggcggctgctccctacctctgggtggcggccgtggtagctgagtcctcagcgggtggtctgctggacctgctcgcggaggagatgaccttgccatcctggacctcttccgcaatggtacgcaccttacgggtggtcacccggtacttatcttgtacttgagtc

SEQ ID NO: 590016 - DNA, 343 bp, Homo sapiens
gtaaaaggtaattgtcctgctaatgctgtacaaaggctcttggggttcggctcagctcaacatggcttgacatggtgggcacactggcgcccagcaaaagagagagagagccaaagctgtccgttttgcagatggacaggaaggagccaggacccagctcagcttgctcacgcccagagagagaaaaagttaagctgctgaccctgaaggcaagggagagcaggctgcccagctgtgtgtggaagccacgggctcaagcagccaaggcagggcggacagtgtgaaagagctagtgtaagctgttgatgaaagctgttgctgaataaaaccatattcccctgca

SEQ ID NO: 590017 - DNA, 109 bp, Homo sapiens
tcggcacgaggtgtgttgtacattaacacacacacacacacacacacacacacacacacacaacaaatctacatatacaaacaagggtttgggttttagtttttttttt

SEQ ID NO: 590018 - DNA, 193 bp, Homo sapiens
gaatagtataaggtgacgtcgttgatacctgaggatatagcaaagataggggaagtaattactccagaccagaatggctagttgcacgtttctgaaaacatcaacgaagtttccaaaggccctcgtttcccaaagcagacttcacttcatgaatggagcagcattcttctttgccttcacacgcatggaatat

SEQ ID NO: 590019 - DNA, 375 bp, Homo sapiens
gaaattccaagtgttttggaagctctatgccaggaacctgggacaaagaccagccaaattcttttcaaaattttatttatttggctgggcatagtggctcacacttgtaatcccagcactctgggaggccaagtcgggcggatcacttgaggctgggagttcgggaccagctttgctaacatggtgaatccccatctctgctaaaaatgcaaaaattagccaggcctggtggcgcacgcctgtagtctcagctattcgggaggctgaggcatgagaatcacttgaatccaggaggcagagtttgcagctggtgagctgagatcataccactgcactccagcctgggtgacacagcaagactgtttctcaaaacaa

SEQ ID NO: 590020 - DNA, 316 bp, Homo sapiens
  misc_feature (20)..(21): n is a, c, g, or t
  misc_feature (24)..(24): n is a, c, g, or t
  misc_feature (27)..(27): n is a, c, g, or t
  misc_feature (29)..(29): n is a, c, g, or t
  misc_feature (33)..(34): n is a, c, g, or t
  misc_feature (36)..(37): n is a, c, g, or t
  misc_feature (256)..(256): n is a, c, g, or t
acaaaagcgggatctaggcnngcnctncnatcnngnnccaagccgccttggggctgagctttgttccccgagctcagtttccctttgcagagtgcagctcctaggagcgcgttttgtgccgtttcgcagctaggccctaggtgggtccctccctagctggctatgggtgggttgccagggccagtgcacacagggcttcttcctgccaaatcagccttctccgcgaaggagaacacgtttggagttggtttcaagntgcggagaccaccagccaagcagcagtgcccacggagccagaggcattgttcggggcctg

SEQ ID NO: 590021 - DNA, 1442 bp, Homo sapiens
  misc_feature (360)..(360): n is a, c, g, or t
  misc_feature (365)..(365): n is a, c, g, or t
  misc_feature (374)..(374): n is a, c, g, or t
  misc_feature (376)..(376): n is a, c, g, or t
tggaaacagagtctcgctcggtcgcccaggcgggagggcaggggcacgatctcagctcacggcgaaggctccaactcccgggtgttcacgcgcctattctcctggcctcagccttccaatgtaagtctggggactacaggtgtggcccgccacccgtggcccgggctaaattttttgtggtagtatttttaatgtaaagaacggggtgttccaccatgtgtgtacgccggggatagggtcttgagattctcctctggacctctccatggtatccaccacactctacaggctctccacaaaggtggtggggagtattaacagggcgggagacgccatatgggcgccggggacaaaagaccnctttnttttttttnanaaaaaaaaaaaaacaacacaaacaacaatataaccggggaggggtcggccttctctcctcacaaatatattcgctctctctcgagggttcacccaagaaaattttatatacgcgtggtctctccaagatattttctgtggtcggagataggggggggcccccgcaaaaagagggggagctctcgctaaagtggagagagagctccgcgcacaccccgtaggcgcgcgctcacaaaaccgaggcagcctgcggaaaacatcgcggggacaccacaagcgagacccacactttgaggcacacaatcctgggcgaggacacagcgcacaccactctaacctgtcgggaggcgaggctgcgcggggcccaatataagcagcgggcgacacaaacgcgggagcccacagggaaacacacatgtccagaggcgccacacaatcgcagggacaacacgatgatacacacccaccccacaggggggttgaaaaaaaacccggcgtcaaaagcacccacccgcccagggacaacccacccccaaatagtacgacaaagcggacaaaacacatcgtgtcaccccggggggggctacatagatgcgaaaacacgggcggacatacgtgagccccccccccggtgatgaaaaggaccagcaaataacaccaggcggggagaaacaccagggagcaaaaggtcccacagcccccccagaaggaggacaacacagtacagcaaagcccaccaaaacattagggggcgcaccataacccacggggcccctatccgggaggccatcacacaaaggagctatacacaccgcccacacacatttgtagtaaccaagcgagggggagccaacactcccacagagcgagtgagacaaaaaactcgggcggccccatcgacaccagaagaacacacaaaatcgagaggacaggacacaccaacaatgagtctgagaccccccaagaggaaaaagcaaacaggcacaaatatcatagcagcaccagcaaggaaacaaagtggagcaccccacaaaaggcgtaagcacaggagacaaacgcatcgtcgt

SEQ ID NO: 590022 - DNA, 920 bp, Homo sapiens
  misc_feature (24)..(24): n is a, c, g, or t
gacaaccacatctggggcccctcngaaccagtattgtcggctcccctttcaaatatctctgcagtctaaacaaccgggtggttctttatcagacagctctctgtgttccccccgccaacgcgccgagttttcccttgtcgaaaccacccacttttcctggtataaaaccacaatgtccccccaaacttccaaaacaggtcgatgcggttagatgaccccgcacacaattcttctctaaaatggtctctacgcaccttagccacacaaggtgtcccccataaccacccacgcggttgaccctccaacattgcggctccagcaggcaaaacattaaataatcccccctttaacacctgggcgaaagccccaagagcttaacccgaccgtgttttatggcgcccacccccctacttataaacaaccttgccgtaacaccccgctgtctcttaatactgctaaagaacacaaatctgtccaccaacgcgctactctctgagagaaatatatatgacctcgactatttattttaataactataatcgcgattagaactctgtaaattgctatatcgcccccaagaaaattgtcttaatatcgtcgcccaataacacactcgctaagctctcccacaaataatattttgcgcccctccaaaataaataattcccacaacattccattgttccggcactcaatctctgggacagtgagaccattaataatgccactcctcaagaaaattttatcattctcctaatatgagcctaaatcagtaagtgaaacaggatgttgagggtctcaacattcttatttctctacgcccagacatgcgttccactttttcattcctctcaaatcaatcatgttttaaaaaattttccccaaaccccaaagggaacccttttcaccgaacaataaca

SEQ ID NO: 590023 - DNA, 418 bp, Homo sapiens
atagagttgacggacttcaggttatagacctcactgaatgttggagaatctaatgggaacctacgtacagccttctgctatggcataaataggattccgtctatttaatccacgaaattactttgcctcctgatctacatgcttgcctctagtctagggcttagaacaaggcctggttatttgaactggttgtcaatcaaggtccccttcattttcgctttcttggcttccaattcagccagctcttgcagtcgcctcttgctcatgcctttgcgctccagctgtttttcaatcactttggcattctgtgcatatgagtcagcaacttccctagcctcaatctcctcttcctcttcatcaatggtagacacggtgacagaactgaacttgcccatgtctttggtccgtttactctttg

SEQ ID NO: 590024 - DNA, 414 bp, Homo sapiens
taccgcggcccatagcgctcacagccgtaaagacttaagtcgttgaccgaaagcggctttttcacttacctgggcgacagagcaagactccatctcaacaaaaaaaaaaaaaaaaaacctagaagagatggataaattcctggaaagatacaaccctactagcttaaatcaggaagaactagatactctgaacagtccaataacaagcaacaagattgaaatgctaatttaaatattaccaacaaaaaaagtccaggaccggatggattcacagcagaatgtaaccaggcattcaaagaattggtaccaatcctattgacactatttcataggattgagaaagagggaaccctccctaaatcattctacgaagccagcatcaccctaataccaaaaccagaaaaggacataacc

SEQ ID NO: 590025 - DNA, 942 bp, Homo sapiens
ttatgggatcgctggctgcctgagtggcggcagtgctcattgcgcctgtgcgtctgcggttgctcgctgctctgggcgctggcgtgctgtgtgctctacccggctcctggtggcgtgatggtgcgacggcgtgtgtggcgccctgggcggtgcctgtgtgtggccgtggcggagtgagtgagctgctgcactgtgtgtgatgcgtctggtgcctgacctcacctactgcggagttcgtgcatgcagtactgccttcgtcatgtgccctgtcatcctgcatgggactcacggacaactcgaggttccgggccctgtgctcccgctgacaggttgctggcttcgttttggggacagagtggtcctggctgagcacctgccaacacctactcctaccacaaagtggacttgcccttccaggagtatgtggagcagctgctgcacccccaggagcccactccctgggcaatgacaccctgtacttcttcggggacaacaagcttcaccgagtggtgcctctctctttcggcactactccccagccccatttggcctgctgggaaccgctccagcttacagctttggaatcgcaggagctggctcgggggtgcccttccactggcattggagccggggtactcagaagtgatctacgggtcgtaaggtgctgtaacttcccccgaccggttggttggcattgctacggctcaagctttgacaccagcgtcttcatctccagcttcctcggcgtagccaaaacagctggcaggactgccggtcacacgaccagaaacgttcgcactcgtgctcacgggttttattacacgagatagtggcggccatggcctcaggccagccacgctcagctggttttccagcccacacagggggacagatcagggccaggcaaacagcgatgttggaggggaaacaggtcagaagtcg

SEQ ID NO: 590026 - DNA, 825 bp, Homo sapiens
cttaagaaagtgagaggaaattagcaagcattattagtgtttgactactgctatcaagtgaattcaaaggaaacaggtttttatgccatatttaagttacagaaaccaggcatgcttagaatagtttctaaggtgacagagtgagactccatctcaaaaaaaaaaaaaaaaaaaaaaaatagtttctagaaggtttattgggagaattagaaagctaaaaaaacctgtggttattacattttacaatggtgaaattattaatttacactttttatactctcagaaattatttatccagatttagacttcccgtgttatatcttttatataatctctggccattgtgatattaatgccgttgatcctttcaaagtttctttctcacattatttattattgatctctctttttatgaaaaaaatgtagatggctttaattcctggattattatttccagtttccccatctttagggcaaaacatgtggggtattattagatctggatgcgatttccaaaggtagatgaggaaaatccagggcacagagatggtcaacgggttgggtacagacccaatttcaccacaagatattggactttcaccagcgttataagttggatcatcaagggcggggcgggattggtctggctgtagtgtgtcaggaaattttataccctatttacttttccatttttctcaatattaggtcccttgatttgtactgtttagctgcaactttttcccctaattaaattggctgtcctggacccactgcttctgggtggcgaagttttgaccctctccagggtccgttatacagtgtgac

SEQ ID NO: 590027 - DNA, 407 bp, Homo sapiens
attcgtcaaggtgtttccattctagtcttcatttagctttacatattattagtccagcacagggtacacccagactggcagtttcttgtggacggactggcatatcatcacagtccttggaatttaggatgcttcatgtaggatgttcacgatttcattgtccctaaagtgtgtattacacactcctttactgatactgtcaaggatgaaccaactgtgcaggtaggactatttcaacagactaggttctcttccgatctgattactttctcctctgaggagagccgcttataaaatgctttcctcatagtcattgctttatcctctttggtcatcacaggttccatggaaggttcttctatggaaggtcactttgagcaatgggaaaagaatcctcagatgagcta

SEQ ID NO: 590028 - DNA, 113 bp, Homo sapiens
gggctccatacttgttcaacgctttatacttcctcaacgctttatacttcccggctttatacttcctcaacgcttctcatttcatttcccggtatgaagtataaagcgttgag

SEQ ID NO: 590029 - DNA, 162 bp, Homo sapiens
  misc_feature (63)..(64): n is a, c, g, or t
acccactccaccttactaccagacaaccgaagccaaaccatttacccaaataaaggtataggnnatagatattgaaacctggcgcaatagatatagtaccgcaaggatagatgacccattatagccagcataatatagcaagggataaccctataccttctg

SEQ ID NO: 590030 - DNA, 877 bp, Homo sapiens
ggggaaatgcttcttttggttggtgatagctatttaatcatttccttcatattttctcttataaaaatgtatttgatactgtgatatgtccacgaaaagtatcttaattatcctttgtatagtagagctgtccattatggatatttctgctgccagtcacaatctaaattaatttgtggcaaaagatggggtacttaagtttcctgttactgagtaagctctaatctttgtgaccaaagcaaaatgagagcaagtacttttcacactgtgtaaggatggagttatacatgtcatacattgtggaatattatgatcccaagtagtcttttaataatggggatggtatcgtatgtaagattttgataaaattgtgccaatttttacaggaagaaatactctgatcataaagtctatctattagaaatatgtaaaacgtggacttttttaaggtaatatgtgcccaaagttactttgtgtcccaaaggtctaaataaaggagcagtttccgaaaaaaaacaagagaagaaaaaaaaatatttggggggctgctaagaaggttttaaaaacaatttgtggggggggcgccaatatttaaggacactaggccaaaacggcgttcaaagagaaccctggcaagtacaaatgggtgtgggttcccccaataaaaaaccgcggggaacccagtgtcttgtaacaaaccccaatgagctctgaagcaaaaggggcaaacaccgaggccaggaacgataatcgcccggtggttaaacaacagcagacagaagaccacgcacaccacgacagacacaagagacgacgaacacaaaacacacagaaacagcaaatagagaaacacaccaaagacgcaacacaacacacg

SEQ ID NO: 590031 - DNA, 427 bp, Homo sapiens
atatataaataaatagaaagaccccggtttaacgaagagttgataggtgagcaaatagtgaaagtgaatgtctcaccagttctacaaggttggcggagataggaaggcaagaagagtagtagtgatggtgactcagagtgagctaatcaaatgcttaattgtattaaaatgggtgtgactctagtgtgtaggttggacaggtcaggaatcagctgtcatcttagtctagactccactgatacccattaggtcctacactatttctcttgtatacttcgcgaagtcatttgtcccatttttcatataattctcagagggtaccctcataaagacagtaacactgtgactgtagtgcaggtgaggaaatagaggcttaggcggtacgccctggggtcctagcatctagtaagactctagctgagtctag

SEQ ID NO: 590032 - DNA, 481 bp, Homo sapiens
tatacaattaattgggtacagggcattctccttgggggtcccacagggcacgggggaaggaaagatacacttccaggccaggcagaaccaaggaagcctgccaatacccaagctgtccaaactcctaacaaatacgggaacaaaaactacatcccggggtgtgaggacgtggatgacatgctaggaaagagaaagcagaaccttaaagtacaagcccagaaaccggtgcggacaccctataactcatatctcatttccaaaacctaagagctcagagaagacaacaaagcgtgtcaaagttcacaaagtgaatcacaactaaaactcggattccccaaactccaagtagatttcaggttcggtccaggaattttaagtaagtctccggagcttttcaacattagtagggcgggtcctataaaaatatggctgatacaaccattctccaccatcatggcagcaggggcaaacggtgctgggg

SEQ ID NO: 590033 - DNA, 239 bp, Homo sapiens
gctcaccaaagtgctgtgaataacaagagagtgagccactatgccaagacacaatatatagctttatcgcccttcactctctgactattatgagaggacagatcactcagaagtgatagttgctatggaggactcgaaataatacatttctgactggaaaacacatttcatggctagacagtgggcacacggcatggggcattctgggcatgctagatacatgtccacttccgcatctg

SEQ ID NO: 590034 - DNA, 186 bp, Homo sapiens
gccgctcgggtagtgtgtggtgtgtgtgtgtggtgtgtatgtagtgtgtgtgtagtgtaaggctggtcgtattatgtgaggatgtgtgtcatattcataagtgatattggtctgtagttttcttgtgatatatgtctggtttaggtatctgggtgatgccacataaccgagcgtggcaatggggat

SEQ ID NO: 590035 - DNA, 147 bp, Homo sapiens
ataccaacggagaaatacgtcttcataggatacgcaaaagtaactgttgggtacaccttctatcacagatccgaaggcaagaataatttttggcgccgttgtccgggaggcttacgcaaaagtcatataccaagtacctatcacaaa

SEQ ID NO: 590036 - DNA, 401 bp, Homo sapiens
ttatgtgcaacacacactagctaacagcaaatactgaaaagtttactgctacctctgacattctacaagatatgcctggtatcctatcccgacgtgctgataaggaccgaggctgaggctctggtgtggtcaccttacacgcttgtccctgtatctggactggggatggtttgagttcaaactgtgtacatttccattcttaaaattctttataaattaccgaattagcagtttaatgatgtgaccgcgcacattacctgtttcgagtactatgttcatgattccactaaaaggcagagggggagaaagtgacatcttgcacagttctatatatcaggatctatacagggaaggttcaggccacatctcagactctgagcctggcctcctccatagcattt

SEQ ID NO: 590037 - DNA, 897 bp, Homo sapiens
  misc_feature (896)..(896): n is a, c, g, or t
gttaaacataccaataaaggagctcctgctgcagtcacaataagaggtaccaacagatgatactaaagagatgtaatctcagagaaaaaatatccaactgacatggacagagcggaaaaacataaagaagtacttggacccacgaaaaagaagaggctaaagaacatgtcctgggatgaactctcagatcctggtcgtgaatcacagacacctcaggagttagacattcctaatgattagaggtccgatggaaaatatcacaagcgagttccaacactagcaagagaactgcaagcacggttgtcagtatatgagatcacttttgcgcgaatagcttaatgagacagttacagaagttgcatagaagatccttatatgagacagtactcatcagttgtataactctcgttcgatctgtgacgatgcgtgataaagagcaccatgtccagtataaagtattcactcttcgcacctctctgggtgattggccatcgagcacgtgctcgcacaagtagaggcctgcaagcaaatcgaagacgccactcgatgagtcaccgagtgcccgcggaagtccaacactcctcttcaaatagcatgaccggaaattgaggttccacgaatggtggatgatcgacggagggacttgatatgttagaacacagaagcgttctcctggtcatggattgggattcagacggtctgcccacgggcattttcctagagctacgaaaaagagggcggcaatgggtagcaacctcgaatgggttgaaaaccgacagtgccccgaaagtttttccgagaaaaaaaaaggggggccagaaaaaagggagggaaaaaagggagacaggctaacacgagcaatagttcagcaccaaaaagacccacacgcgccccang

SEQ ID NO: 590038 - DNA, 101 bp, Homo sapiens
  misc_feature (5)..(5): n is a, c, g, or t
cagcnatgggtgaatatcctcgcgcaggtcgtccaggttgcccttggcccagcccatcagcggcgcttccagctgcggcttgagttcgccaaccagcgaca

SEQ ID NO: 590039 - DNA, 633 bp, Homo sapiens
gagcggggtgagtctgacgggttcaaaatggcggcggctgcttcagcggctcctcctgtgtgagggaaacaacacccctccccggcagcggcggccggcggcggcggctctcggagcaccattcccagcggcatgggcaccgtggaccggatcatgatctaaccatggagcacgggggacgctccaggagaaggagggagcaaacgcacagaggaggcacacaatcccaccggaaactcccgtcatacatagcgacttggaggaagtagcacgagaggaggatccgatcacaagcagaagacaggaaaacaagaacacagaaggcggcagaacgacaaaagaagagaccaaggggaacacacaaaaaacttgaagcagacaaaagaacagagaccaagacacgagaatacagtgaaacaaccggaaagcacacagaaaagacacaaagagaaaacaagagagaagagacagagagaagacgacaaaaaaaagagaacaacaacaagacacaaaaacagtgaataaacaacaggaaaaacagtgaggacaagaaaccaacaacaaaaacgaataacagaaaccaaagaaaaagaacaaagaaagaaacaagagaaaagaagagaaaaaaaaaag

SEQ ID NO: 590040 - DNA, 1828 bp, Homo sapiens
  misc_feature (1364)..(1364): n is a, c, g, or t
  misc_feature (1527)..(1527): n is a, c, g, or t
ggatccctccgctctggggaggcagcgctggcggcgtgggcttggggccactgaggaaatccatccgcgccgccgccgccgacgccgcgaccgccgccgcctccgccgcggaggaagacagcgccgacccgaggcaccgacaagcgaacccccgccgcagagtcccaccgccacaggcctcgggcccagcggcgagagagctgcctcccaagagagcggcacggggatcacacaagcgagcacgaaatacgacaaaacaaggcaaacgaagcaccacacggcaacgcaaacacgaacaccaggcaccgaaggccacaacacgaaaagaaaaacaagacacacacacaggcaaagacaaaactagcaagacaccacccagacgaacaccacaaacaataaacgacaaaaaccagaaagcagaaacacaagagcaaccaaaacagaggacaaacaaagaaacacagaacaaagaacacaagaaagacagaccgaggacaaggaaagaccacagaagaaagacagaaagaaacagaagagcgaaataacacacataaacagcaaaaaccaataacaaccacgaagacagacgaggagagaaggcgacacggaagccgcgagactaacagcaccacacagaagcaaagaacagaagcaacagacaaaggagagagaagagaacacgaacaccagagcaagaccacaactgcgagagcgccacacaggcaggaaggccgaaccaacgcgaccacagcggaccgctcaacaaaacagacgacagccacaggtaccgcacaagaggcgacgcgcgccgagacggcagatagaacgacgcaccacgggacgcactggaaggaacgacgagcgacgcgcccaagcggcggccagcaagaccgagcaagcgaccgaagcgacggacacagaggacccacagagcaagcgcagaaataaccaagagcaagcagccggatgagcccgacgagaaagcgacacgcacagagcggtcataagaacgaggccggagacagcgccctcagcgcacgccagagcgcaacgaagtgacgcgacagacgagccgtaggcaaggtgccacacggcgagagcgcaccgcgcgcgccaggacagcacgagaccgtcgaggcgcagccaagagcagcacagcacgctaggctcggcaccgagaccgtgcagaaggcggcgaacgcagcagacgcacgcaggagaagagcaggacggcaggcgcgcagcagctagaggacagacgacagtcgctcaacagctgccacgacgtcacgcacgacaggactcaccgcgcacacagctctctgcacgcgcagcccacggctgccagcaccgagcacactgcnagtccgcacagtcagcagacggagagtgagaagcagcacataccagagcgtgcgtaggcatcacagcagagcagctaggcagccagtagcagcgcagctcggaccggatagtcacaggatcgaagactagcaagcagagacgagcatgcgcaagagcctgcanatgcgacgatatcgtgactagctaggcgaaccagcgagtcacgacgcacccacggaacgatagagtctagcgtaccgcgagagagcaagccgacacatgacgacagcacacagacgtagaacgaagcagatgcaagagaagcagaggaagcgcatcgagacagaacgtagacaccagaggcagctgacgacgcatacgagcaacggacgacggagtagcgagcggacgcaagatgcacacgccgcagacgagccgcacacgcgcacgccaccagtccgcagagagcgatcgagcacacgca

SEQ ID NO: 590041 - DNA, 501 bp, Homo sapiens
ttttgccatggaaatcctttaaaaagtgtgactttgaacgatggcaaccccttcaattctgggcaagaaaaaatagtttatgtgttccccggggtggcactggaattcattcccggggggatccggcccatcccaaatgagattttcctcctgacagcagagcaaattgcccaggaagtttttgagcagcatttgtcccaggggagattttaccccccactcagcaccatccgaaaagtgttttttagaattgccaacaaagtttttgggcaggggggaaaaacacaaactgggttctctctaccccaagccctaagaacaaggaggcttttgtaaaatccctggtttacactccagactatgattcctttacactggacaggtacacttggcccaaggaaaccataaatgttcaaacggttttaggcagtttcaaagggtagtatgggggtaaattaagcccaaagtaacccccccaaaaaaaatgggttccaaaatggc

SEQ ID NO: 590042 - DNA, 264 bp, Homo sapiens
cggtgtgtcgtgtccccgggacgtcaccgccccccgtgctgtgtccgtgtccgtgctccgggggtagggggcgcagaatggcgcttccccttctcctgtggctccggggtgtgcatgcgagaatcctctttccacgatgccgatgggcgacgtggcgtgggggcagggggacgatgggggagccctcgccccagactgtcggtcggcctctccgccccaggcgtcagtcagtgatcacgggtaaagagaattgtttcaaaatga

SEQ ID NO: 590043 - DNA, 160 bp, Homo sapiens
atccattttacacggttggcaagaaaaggcttggatattgcgctgggcaaaccagtttttgtagtagaaattgatcctgcaagaaaccgtgttgtactgggcgaacagcaacatttgcaaaggcgcggcatgctggtaaaaaacatcaacctgcaaaaat

SEQ ID NO: 590044 - DNA, 369 bp, Homo sapiens
ctcctgggctctagccattcctcacgcctacagcactccagagtagctgggaagctacaggcacatgccacgtacacccagctaatcagaacatgagtccacagagctaaaatgaaggtgttggcagggctatgttccttctggaagctctagggaagaatccatttccttgtcttttccagcttctagagggtgtcctctttccttggacttgtggccacctactccaacttcaaagccagcagggtagcatcttcccatctccctgctactctctgacctcatgcctgcctcttataaagacccttgtgattccattgggtccactgggataatccaggataatctcagtgggcacacattatggag

SEQ ID NO: 590045 - DNA, 107 bp, Homo sapiens
  misc_feature (77)..(77): n is a, c, g, or t
aaatgcaatgatcagtaccaaaatggctccaaactctgcaaccacccagatacctgctgcgtgagcgaaggtttctngggtggcatcgataaacaccgggtaccgag

SEQ ID NO: 590046 - DNA, 250 bp, Homo sapiens
tctttaattgaaaggctgtgaatcctggaatccactcctaatcattttcacagtagatattctttggcatttttttaataagatcgtcctggggtgtactcagcctgtggtgtggtattcaccagcaccctttttctcacacttaggtctccataagagataaagataaatacattttattttcttcagctaaagtatattcccattagaggtatagagttcttttctagaggtctctggggaatacgga

SEQ ID NO: 590047 - DNA, 158 bp, Homo sapiens
ttgtcctttccaagtatgagtgttgtcctcgctttccaagtatgagtgttgtccccagttgccaagtatgagtgttgtcctcagttgccaagtatgagtgttgtccttgatttccaagtatgagtgttgtcctcgctttcgaagtataaagcgttgag

SEQ ID NO: 590048 - DNA, 100 bp, Homo sapiens
agcgatatatggaggtcagcactggtgctcacgtgtctgacggaactagtacatggtaggcatgcacctgcagtggtgaatacacgtcgaccaggctcca

SEQ ID NO: 590049 - DNA, 226 bp, Homo sapiens
agacaaaaagaataaagataagaagaaaaagaaaggagaaaaggaagaacaagagaaagagaagaaaaaaggacctagcaaagtcactgttaaagctatgctagaagctctggctaagcttaaagaggaagaataaagacagaagatagaagaggaagaacgtataaaacggctagaagaattagaagccaagcgtaaagaagaggagcgattggaacaagaaaaa

SEQ ID NO: 590050 - DNA, 1940 bp, Homo sapiens
gatgcaggaaaaagtgaattgcttggtattcattacttcatgtatatcaagcgacagccagctaaaaccaaaaacccatgtatttaacctttttgtttaggcagttttgtgcttttgctgattttatttttatttatttctggatcactgtgcctaaacaagtgcagtggtgcgtggtaacacacatcagctctacaccagcgggaacacacaacacttggccagacagtgacagtggcctaagacttatgtggtctacaaagtggtcttatcagtgaaacacattttttcaagtgaacacaccatactctcaagagcctatcaaagtgtgtgtctcacagacacacccaccgtgtgtctctaattcaaactatctcacagtgtgtaacaagtgtgggcaccactcacaaacagggtttgctacacgtgcaagatgtgggcactaattatatcaaaaacattcagcatattatcactctctcacagaggctgtttttctccccagtggtctcaccacaacttatcaagactcccatggagcggagtctcgagtagcaacacactttctccctctgcttcaagacgagtgacaacacaagtggtgtcgtcagacaaaattgtattactcgatgtgggcagcaacacgatctcactgaaagttctgccgctgctgatcaatgatttgtccgcccacactactgctgtggggagcacaaagcgcgtcttaacgatgttgtggcagacccattcttatattaagcggcgaagaagggtgctctccgaaacacagccgtaccacaacaagatgtatgttcatagcttcgaatgataagcagccacaaagcagacacaatgattacgccgatcagctcgattaaagagtagtttatattaagacagcgttaacgccggcggaggtatacacacaccaatagttgtgttctcccccaaaggtggtaatatccacgacagcaagttccagttgcatattacacctacttcccccgacgaaaccctcctgttggtaggtacgaccaacacatcacacacgtggcagaggtatcgtccccgataatattttgtatacatcatcctagttggggccagaaaacaaccggcggcgagggaggcgagacagctagcggagctcttcaagcagcgcaccaatacagacacacctgtttggcgtcacagcagtggagttgatttaccagcaaagtatttttaatacaaccacactattcttcgcggggaggcgacaagtataatacgggcgcaacattatctagcaccgtaatcacacccttataagtcagagaaaaaagtcgaccctaacatcaacaacatgatgtatccttattggtagtagcgcccccaacattagacatttttggacaccacaatctagggaggatagaaccgccaccgatatccaacaccgcttggatgtaaccagcaacaccatatgtaggtacggagagcacattcacctcgcaacaacactacttcagacaggattctctacggggaggctcgtctttagtatcaagcacagatccactttactgttcgtggaacgaagctcgtcatatatataatgcatccattggccatcctaacctaaagatcaggaagagaccgcagtaagaaaacctaccaatataacataaaactacgaggacacgacggtgagcgacaaacaacaaaccttacacgcgtcgctcccgggggatcgataaaacaccccaccctaggagcagattgggacacccaacagacccaaactacctacacaacgagtggggcgcgcacacagagtcaccagtggcacaaacaacagcgcgacacaccaacagcactactcggccgcacacactcacatggcagcagatacagagccaactagagtacgatatagctaggaagcactcacacacaaa

SEQ ID NO: 590051 - DNA, 1500 bp, Homo sapiens
gggccgcttccggcgctcggcgttgtctctgtgcgggtcgcaggggaagacgagatcgcgcgacgctggtcatggacaatggctccggcatgtgctgacgcgtggatttcgcgtggcggacgacgactcgcctcgagccgtgggtttcgcttgcatcgttcggagcgccccaggacgacgcagggcggtcgtggtgggcagtgggccagcagaggactccgtaacggtggggacggaccggatggacccaagtacgactaatgcggtgagagactctcatggaccccctgcacccgttactccacgagttggcatgcagtgcgacacgtcgctgcatcacagaactccgtgcgatctgagcattggcaggacaatgactcttgggccgatccaagcagccccttgctagcggagcgatggcgtgctgccatgggcgccctggaacggtacgagcacccatgttgtctggcgtgacactctgagggtccgccccgcgtgtagagctcgccatatggtccaaacgaggagggactaaacgacttgagcatcaggaattactgctttgtgaggacccgtttcaatccacctccctgggccatgggtaaccgttgtgcctatccatgggccgtagcgatgtacccatacataacagcactcatagggggcagccaaccaacattgcgccactttgtcgaatgggaacctcctgcgaagcacggggggtcaaccccaacagcagggtgcccatcttactcgaagggggctagtcgcgtccttcgccccacaaacgcgcaattcctttgtcggtcctggggaccttgggactgggtccgggaaccttgactcccgacgtacgcttcattgacagcattccttccacctggaagacgacggggttaccaggctttcacccacacaacggggccgagccggggacaatccgtcgcggcggaaccatccaccgggcaagaaagcctgggagacttacgtacaggagcctgggaactgtgcggacgtcacgggaagcattgggccacgaccgtccgggacatcccttcactaccttacgtccctggcagaaagaagctcaacgcaagcctggcccgaaagggccacaggtcacgccacccaatgggcgcacgagcggcggatccagggaggcacgcgacgggcgccgggacccaacgccgctatcacccccccgggcggccgtgggaacgctgtggcggcgaaccccagaacgagacacagtttcgagcacttcaacgcctgcgaggtggtgcgcggggacaccccggaagagaaccgtgtacgccacacaagggagcttaccgcggcgcaccacagcgcttacgagatggccgaaagcaacgaacggactcacaccctggacctcacccgcgagaatactacgcggcccacacgaaaatccatgagtgaacggaccacagcgcacgacccacgacgactgaacagagacagacgcccactcgtatcaac

SEQ ID NO: 590052 - DNA, 134 bp, Homo sapiens
ccgagattgcgccactgcactccagcctgggcgacagaacaagactctgtcttaaataaataaataaataaataaataagatgaaaggacttaccaagtttagcccatattcaaggggaagccgggccggggga

SEQ ID NO: 590053 - DNA, 819 bp, Homo sapiens
gcggccgcgttcctccgtcgttctctcgtagtccacggtttggtcttccagtacccgccttcgtctccgagttgcgactcgcgaccgggtccccgggcgaagaggtgcactcggatctgtgctgagaaatggtgcatccggaagaaatggtgatggtggtgatggagccgtgtggaaagaatgcttgtcatagtcttcagcaaggaccagtcccagaggtgtatgttgccacagtgtttgaaaactatgtggcagatatcgaggtggatggaaagcaggagcggtgaaccctggaaagaaaggcagagatatggcaagcagggatggggctttggggtacatggagtgtcagcaaagaccaaagatggagtgagagaggtttggaaatggctacgagagctgtctgcagagctagacgtgggaaaaaaaatctgcgtgcttgtctgtgaaacttgttgagcacagccttatgcggtaatttgaagtgctgtataatctcagggtatgtactgactttatttatttataatttacccagatacaattaggagtatttgtaccagtttagaaggcactatgatttacgatgtcaaccgttgccaacagggcctttgaatgttaaaggcctctttggattccactggcaccagggaatcagggagttaattgtgttttagaaagaacagtgaatttggagtggggagataaaaagtcgggatattgagagggcggggactacggtaccacaatagtgtcgtggcggagatgcacaacaactcgagcgtggtattggtgtaaataatagtgatatagagtgta

SEQ ID NO: 590054 - DNA, 202 bp, Homo sapiens
acggccgtggtggccctggctgcggcgggtggcgcatggcctgggcggcggcggtggcgcggactggctcccggcgccgcggcgcacgagggcgcggtgcttgttcttggttgtgattctttggctatcctcttcctttgacctgccggtgtgcgcgtttgggcttggccgtggtcttccctttacacaccggatatgccca

SEQ ID NO: 590055 - DNA, 443 bp, Homo sapiens
  misc_feature (4)..(4): n is a, c, g, or t
accngcgcctggtttctctcagataagggggaactgtggactgaacttttaccacagtgcttgtttctaaatttcttcccaaggggtctggaggaggtcatgtccatgagcgagcactaatgttcttttctgctgacctcagatttttacacaaagctttgcgtcctggagcaatcgcaaatcagaaaatctttgactccaccttagacctttgggccctgcttcaagatgtcctactttttggctgggcgtggtggctcatgtctgtaatcccagcactttgggaggccaaggcaggtggatcacctgaggtcaggagttcgagaccagcctggccaacatggtgaaaccctgtctactaaaaatacaaaaaattagccaggtgtggtggcacatgcctatagtcccagctactcaggaaagtgaggcaggagaattgcttg

SEQ ID NO: 590056 - DNA, 861 bp, Homo sapiens
ggcctcccgactgtaaacataggggatatgtgttcaccttagcatggacttctgggaggggccaaaggaagggcggtctggacgtttgatggaatagagcagtgtgtattacggcatgcctgtccttgcccagccatgcttgcttctcatggctgtgctccgtgcttaaagaaatcagtccttccttgccgacttagtcctcgaggaagaaggtatcagactacaaggtatcatgtggaacatttcaagatcatcgatatctaaattccagcagggatggggtgaccgaaccagaatggctcgagacatctgattgtctgacctgtccagacgtcatctgggctccctgaaccttgaaatcacaccatggagtgagtggcgagcgtcgcagaagaacttggaaggcaacaagagggaggagaatgcgactcgaagcagaaggaagcgcctaccagaggaaggacgatgacgaagaggaggcagccgggcaacgggcgctgccagaagccccgagaggatcgggtgcgccgcgaagcatggcggaagaatcctggggacaggtgaccgcacatgtggacgtgaatgcccggaacatgtgcggaggaggaggccagaccatcacgagaacactcagtggagggagaactgggcccacttcctgaggagcggaccgagtgaggaaggacgcaagcctagaagccggatgcgaagcgttcgccacaaaaataggcggtgccacgcgaagagtcgggcaaaacacgaggggcggcggacaaaaaagggcgccagcaacagggggacgagcgcagaacacgcacgccacgcaagcagcatcatagaacaccaccaaaagccgcagag

SEQ ID NO: 590057 - DNA, 1271 bp, Homo sapiens
gagttactgacaactcataaggactgaagcgtaagtatcacctctatcgagaatccagcaggtctacatcggctcgcttgaacacaatcctgtcaaagaaagcccaggagaaaggacgcgccatggtattacatacagaacatatgcagcgtatctttgctcggtcacgattgtccggatgttgctgcgaatgtatctctcattcccgctacctgagtgtgcaggattgcccagaattgctacgctacatggtaaacaagcccattctttctcccatgccggagtgactcccaatacttacagtggcatgggctgttgcttctctagaagcatatccgactccagtaatggtccaatcgaaagacgtgatcgtttggtgccgtgaaagcgcacacgtcggtctcgaagagtccgaacttagcgttgtcgttacgctcatatactcgtattattatcctattgggtcgcgaagctcatattggtggaggtcttccaacagtgggcattgtacacctatcaccgagtcgcttgcgcacgattgcagtggataccactgcttcgtttactttttcgcacttagagtgcgttacacaccttcgtattctatcggcaaagtgtagcgtaaggtcttttagaactttgaaccttcgcatcgaatttccgcctggcgcacaactgggcacacaaacattcaaaggtatagtatataccgggacgatttagcttggcgtacaagtagaaagactgaacataaaccggtctttcgcttctctgtccctctcatcccgagttaccgcaatcatctgtggaacttccggctctgcaattgggcattgagtaaccttggcgcatggccctttgtgaacttaggtccttttccccttcgctttgagtccccttaaccgcgtttccccacaatccaggccagggtctttaacgttttcctttgtcgatccccgcggccactcgctcttttccctggccatttcttacgacctttggtgtgcccatgccttgagccaacaagtaagaagggccctttcttattaaacttccaatccaaatgccctgcaaagaattggcttgcgccaacaacacggcgcgccgggaccccaggaaattctatcatctcgggccttcacttcttagcagcgccgacctctgagaacgcaccacgcgcgtcgtcgtaacccccctcgcgcttctgaatgatgacagccctcagagcgcccgcccaatagaggggactacatctatcaagcacgcctagc

SEQ ID NO: 590058 - DNA, 204 bp, Homo sapiens
tggggtgctctagcacgatctttctcgaatactcaggatttcttaggtagcgttctgtgcagtgtgcaactcacaatccttcaatgagctacaaagcttgtcaggtcttgccctcctggtgctcaactcctcctgccccgtgcttctcgttccataggctccaggtacatctaccttcttccaggtctctgaactctgccatgg

SEQ ID NO: 590059 - DNA, 632 bp, Homo sapiens
ttttaaaatattctggtattgattgtaccaatccatacactgacctttttctcttaatttttttcttacagtcaccccaagcaggcacaaaagaaaagacactctgttgctggttctgtacctcaggcccaatatccttaagtgccaaaattgaaaggaagggctataccccaggtatgtaagaggtagattcccacaaaaaacttttcttcacttagcttttgtgtataaatttataatatgactactaaatataaacataatatagtattcttttgtgaaataacaaattgtgcttatccatttgtttttttcacaaagtagaatgtagtttcctttttcaaatagctactgattagttcatttctatgactcaagttatttgcagttcctgggacatcttttcatgtatgttagttgcactttcttactttagctttaagaatcttgacttcttttgttgtttttttctaacagtagatatgtatatatttttccctctctaggtgaatcaattcagatatttgctgagattgagaactgctcttcccgaatggtggtgccaaaggcagccatttaccaaacacaggccttctatgccaaagggaaaatgaaggaagtaaaacagcttg

SEQ ID NO: 590060 - DNA, 524 bp, Homo sapiens
  misc_feature (28)..(28): n is a, c, g, or t
  misc_feature (67)..(67): n is a, c, g, or t
  misc_feature (95)..(95): n is a, c, g, or t
  misc_feature (105)..(105): n is a, c, g, or t
  misc_feature (108)..(108): n is a, c, g, or t
  misc_feature (157)..(157): n is a, c, g, or t
  misc_feature (248)..(248): n is a, c, g, or t
  misc_feature (278)..(278): n is a, c, g, or t
accccgagccagcctcctcgcctggccncccaagtgctgggaacggctgaccacttgcccgatgatngctaccaagtaagcctttctagatttcnagaaagggantcnatagtatgtgtctttataacgactccatttagcgtagagatggtatacntttctgtaagactcagtggtaatattttaggcttacggcgggatggtcttgtaggatctacctactcagctctgctgttggtagtatgaangtgtactgaatgggtgtagctttgttccantaaaactttgactacaaaaatagggagagggccggatttggcccataagctagagtgtgccaatatctgatgcagcataattcactccggatttacttctattgttacatgtatcagcagtttattcttttttattgctgagtagtcttccattgtatggatgacgttttgtttattcatcgattgatggacatttgagttgttttgagcttttggcttttatgaataaagttgttatgaacatgc

SEQ ID NO: 590061 - DNA, 151 bp, Homo sapiens
  misc_feature (74)..(74): n is a, c, g, or t
tcttagtttcttcttggtaaatatcctatgggtggggtaagatttactatatctttagtttaaaattcggcggngtagactcgggcagctgcctctatggtgacgaaacaagctttttttttttttttttttttttttccataaaacgggg

SEQ ID NO: 590062 - DNA, 229 bp, Homo sapiens
gctgcatccgaggtgctggtggacagcgcggaggaggggtccctcgctgcggcggcggagctggccgctcacccgccccaacagagactgcgcaaaaaacagaaactgcacctgatgcggaatgaagctcgtaaattaaatcaccaggaagttgtggaagaagataaaagactaaaattacctgcaaattgggaagccacccaaagctcgtttggagtgggaactaaag

SEQ ID NO: 590063 - DNA, 158 bp, Homo sapiens
ccaagacccatatgactggctgctctaagcccacagagggagaaggcactgggacaatgacccaggcggtttttgtgcgctggcctagaagaagcacttactcctttcacccacattccactggccagcattgagccacaggaccacacctggacata

SEQ ID NO: 590064 - DNA, 817 bp, Homo sapiens
  misc_feature (10)..(10): n is a, c, g, or t
  misc_feature (74)..(74): n is a, c, g, or t
  misc_feature (80)..(80): n is a, c, g, or t
  misc_feature (87)..(87): n is a, c, g, or t
  misc_feature (116)..(116): n is a, c, g, or t
  misc_feature (147)..(147): n is a, c, g, or t
  misc_feature (157)..(157): n is a, c, g, or t
  misc_feature (166)..(166): n is a, c, g, or t
  misc_feature (203)..(203): n is a, c, g, or t
  misc_feature (217)..(217): n is a, c, g, or t
  misc_feature (232)..(232): n is a, c, g, or t
  misc_feature (257)..(257): n is a, c, g, or t
  misc_feature (261)..(261): n is a, c, g, or t
  misc_feature (266)..(266): n is a, c, g, or t
  misc_feature (274)..(274): n is a, c, g, or t
  misc_feature (392)..(392): n is a, c, g, or t
  misc_feature (396)..(396): n is a, c, g, or t
  misc_feature (751)..(751): n is a, c, g, or t
  misc_feature (753)..(753): n is a, c, g, or t
  misc_feature (761)..(761): n is a, c, g, or t
  misc_feature (764)..(765): n is a, c, g, or t
  misc_feature (779)..(779): n is a, c, g, or t
  misc_feature (784)..(785): n is a, c, g, or t
  misc_feature (788)..(788): n is a, c, g, or t
  misc_feature (793)..(793): n is a, c, g, or t
  misc_feature (795)..(795): n is a, c, g, or t
  misc_feature (804)..(804): n is a, c, g, or t
  misc_feature (808)..(808): n is a, c, g, or t
  misc_feature (811)..(811): n is a, c, g, or t
tcatgaatcntgacaaattgagatttgctgatggaagcataagaacatcggaactgcgactcagcatgcagaantcaatntaaaatnatgctgccgtgttccgtgttggaagcttnttgcaagaaggttgtgggaaaatcagcaagntgtatggagncgtaaagcnccggaagacgttcgaccggggaatgggggggaacacnggcctgccggaganccccgacccgcagancctgatgctgtgtgcgcggcagacnatcnacggnggagaggnacggaaggagtcacggggcgcgcatgccagggaagactacaagagtaataagaaacgtgatggtgtttctggcatcaggtgcggattgatgagtacgattactccaagcccatccagnggcnacagaagaagcccttgaggagcactggaggaagcacaccctgtcctatgtggacgttggcactgggaaggtcactctggaatatagacccgtgatcgacaaaactttgaacgaggctgactgtgccaccgctcccgccagccattcgctcctactgatgagacaagatgtggtgatgacagaatcagcttttgtaattatgtataatagctcatgcatgtgtccatgtcataactgtcttcatacgcttctgcactctggggaagaaggagtacattgaagggagattggcacctagtggctgggagcttgccaggaacccagtggccagggagcgtggcacttacctttgtccntngcttcatnctnntgagatgataaaantggcnnagntcttnantaaaatatnaatnaanaaaaaa

SEQ ID NO: 590065 - DNA, 782 bp, Homo sapiens
  misc_feature (10)..(10): n is a, c, g, or t
  misc_feature (74)..(74): n is a, c, g, or t
  misc_feature (80)..(80): n is a, c, g, or t
  misc_feature (87)..(87): n is a, c, g, or t
  misc_feature (116)..(116): n is a, c, g, or t
  misc_feature (147)..(147): n is a, c, g, or t
  misc_feature (157)..(157): n is a, c, g, or t
  misc_feature (166)..(166): n is a, c, g, or t
  misc_feature (203)..(203): n is a, c, g, or t
  misc_feature (217)..(217): n is a, c, g, or t
  misc_feature (232)..(232): n is a, c, g, or t
  misc_feature (257)..(257): n is a, c, g, or t
  misc_feature (261)..(261): n is a, c, g, or t
  misc_feature (266)..(266): n is a, c, g, or t
  misc_feature (274)..(274): n is a, c, g, or t
  misc_feature (357)..(357): n is a, c, g, or t
  misc_feature (361)..(361): n is a, c, g, or t
  misc_feature (716)..(716): n is a, c, g, or t
  misc_feature (718)..(718): n is a, c, g, or t
  misc_feature (726)..(726): n is a, c, g, or t
  misc_feature (729)..(730): n is a, c, g, or t
  misc_feature (744)..(744): n is a, c, g, or t
  misc_feature (749)..(750): n is a, c, g, or t
  misc_feature (753)..(753): n is a, c, g, or t
  misc_feature (758)..(758): n is a, c, g, or t
  misc_feature (760)..(760): n is a, c, g, or t
  misc_feature (769)..(769): n is a, c, g, or t
  misc_feature (773)..(773): n is a, c, g, or t
  misc_feature (776)..(776): n is a, c, g, or t
tcatgaatcntgacaaattgagatttgctgatggaagcataagaacatcggaactgcgactcagcatgcagaantcaatntaaaatnatgctgccgtgttccgtgttggaagcttnttgcaagaaggttgtgggaaaatcagcaagntgtatggagncgtaaagcnccggaagacgttcgaccggggaatgggggggaacacnggcctgccggaganccccgacccgcagancctgatgctgtgtgcgcggcagacnatcnacggnggagaggnacggaaggagtcacggggcgcgcatgccagggaagactacaaggtgcggattgatgagtacgattactccaagcccatccagnggcnacagaagaagcccttgaggagcactggaggaagcacaccctgtcctatgtggacgttggcactgggaaggtcactctggaatatagacccgtgatcgacaaaactttgaacgaggctgactgtgccaccgctcccgccagccattcgctcctactgatgagacaagatgtggtgatgacagaatcagcttttgtaattatgtataatagctcatgcatgtgtccatgtcataactgtcttcatacgcttctgcactctggggaagaaggagtacattgaagggagattggcacctagtggctgggagcttgccaggaacccagtggccagggagcgtggcacttacctttgtccntngcttcatnctnntgagatgataaaantggcnnagntcttnantaaaatatnaatnaanaaaaaa

SEQ ID NO: 590066 - DNA, 619 bp, Homo sapiens
tggaaatggggagtttggctcttctggcccaggtgggagtgcaagggcgcgatctgggctcatggcaacctctgcctcccgggtttaagtgattctccggcctcagcctcccgagttattggggattacaggcgcctgccaccatgcccggtctaatttggctatttttagtaaaaacggggtttctccatgtgggtcaggtgggtctctaactcctgacctcaggtgatccatccgcctcagcctcccaaagttctggggattacaggctgtgagccaccacaccgggccatagttggtctttcttatggtgggatttaatctggctattggtccctaagaactcagaattactggtggatgcttcaaaggggtgtgtggggtcgtcgtgtgtgtgtccagttaatccagaatattcctcccaggaaaatagaagaccccaggaggagtgggggcaacaactctttatctggctacggggcagacagatcttcatgaaaaccacacatgaacctccagaactcgatgtgctccaccagcccggccttagctggtcaaagccacccgtgggaatttcctggtgaagcccccagggaatagctcagctagcaggacacgg

SEQ ID NO: 590067 - DNA, 277 bp, Homo sapiens
tgcaggtcacctaagaagaggtattaatatgggcatattggggagatgggtggggaaagaggaaaagctcgctaactaagaatacacaacctgaaaggagcgcttctaaacaaaggtaaatcactaggacagatctgttagggtttacctttcactcttgtagtagaatgctgatctaacgggagttttgaagtgtggagcagtggggaaaaaaaagaaagaaaatgagaattttaatttcttgaaataaacggcaatttatccatttgcacatacc

SEQ ID NO: 590068 - DNA, 623 bp, Homo sapiens
  misc_feature (132)..(132): n is a, c, g, or t
  misc_feature (559)..(559): n is a, c, g, or t
  misc_feature (600)..(600): n is a, c, g, or t
cggggggggggggaagaaatttttttttttctcccgaaggggggcccccaccacaagggggggtgttggaaagcccccccccccttcaaaaagtatttttttttcccacggggttttctattaaaaaaaacnaaaaaccgccgtttttttttaaatctccctccccccccgaaaaaaaaaaaaaatgttggggggggggggggggagaaaaaaaaaaagaggccccctttttttttttttttttttttgagaagaaaaagccccccctcttttttttataaaaaaaaaaggggcccccgccccccccaaaaaaaaaaggggggggttttttttttttaaaaaaatttgtttttaataaagaagcaaaaaataagggggcttttttctcttcccccaaaaaatacttctttttttttttaaaaggggggggggagaccccccccccccctcttttaaaaaaagaaattttttttgtggtgggggaggtttccccccccggggggggaggttttttttttttgggggggtctcttaaaaaggggtggggcccttttcccgngccccttttttggtatttttttttgggccgttttatttttntggctctggctccactgccagtt

SEQ ID NO: 590069 - DNA, 219 bp, Homo sapiens
cctgtctgcattcaagtcacagagttgaacatgcctttcatagagcaggttggaaacgctcttttgtagtatatggaagtggatgttcggacggttggaggcccatggtgataaagggaatatcttcccctacaagctagaaagaagcatggtgtgaaactggttggtgatgtgtgtactcaactaacagagtggaacctttctttttacagaacagtg

SEQ ID NO: 590070 - DNA, 646 bp, Homo sapiens
ctatggagtttcagtaaatttgtattgctctgactagtgaaacacacacatctatgttgctgaggatatttttctgcagttcaagttgtaataatagctctgtttaagatccgtcagtcacttgaatcttctctaaggctttgtatgttagaagttaatttgctttcttacaaggccacattctatcttgtaactaaacaactgaattttatgtcttagcgtagatggtttattactttctggtttttctttagtaagaatcctataaaaacactagtatttttctctgagtttaaaattcaatacatgcctactgatatggttaggctttgtatccccacctgaatctcgtcttgaattgtaatccccatagcccccataatccccacaggtcaagggagagaccaggtggaggtaattgaatcatgggggcagtttcccctgtgctgttcttgtgatagtgagttctcacgagatttgatggttttataagggattctttcccctttgctcggcacttcttcatgctgccttgcgaagaagctggcttgcttcctctttgtcttccgccatgattgtagatttcctgaggcctcccaagctgtgctgaactgtgagccaattaaacttctttcctttataagta

SEQ ID NO: 590071 - DNA, 509 bp, Homo sapiens
tctagaggatcccagcgctagccagaggtgtcctcaattgaagtctgcttttgcactttgcatgccactggtatactcaatgtctgctgctgtggacaagcagctcgcggaaatcgtagaataagattattatcattaatgacaagggccgtctgagcatggaagacattgaacgtgttctccaggatgctgttaagtacgccgcttgtggatgagaagcgagggtacaaggtgccacccaagtactcacttgcttcccagtgcctctcaacatgaaagcgcctgttgaagatgagaaactttcaaggcatgatcaatcgatgaggcctgacagaagattctggacaagtgtaatgaaattatcaactggcttgataagaatcagactgctgagaaggaagaatttgaacatcaacagaaagagctggagaaagtttgcaaccccatcatcaccaagctgtaccagagtgcaggaggcatgccaggaggaatgcccgggggtaggaggt

SEQ ID NO: 590072 - DNA, 1150 bp, Homo sapiens
  misc_feature (1150)..(1150): n is a, c, g, or t
ggaacaacttgagtgctcagtatatgatgctgcctgggatgacatatctagagttcggactaaccacagaattccgagcaggaggcagcgcgtgtgcgacaccttcactcacagcagcagagggcatcatagggagctcagccatcatcatcaatgatagcaagtagtcagatccacaaggatcagccagtccatgttaatctgggcgaagagttgggcgtgggcggccgagttgagggataatcaatgtatcgctccggaatgagtcattcgttctctggaatgtgcctggcatcaggtgtgtaatcctggcatcaatgtgtgtgctccatgaacgggcacggtgcatgtagcgtgcccattggtgtcagggcccgggatgggtgactgatataagcctatcctggagatggcagtgccttgatttgcataggctatatggggagtgtaatgactatatagaattcgataattttgaaagaagcagcgggagaacggctatcatgggtgggacttgagaaaggatacagcatatcaagcgggcgatgggccacaatctatactctgggcactcttggagttgaatctagcagcgcttgtgcacaaacgcaagttcgatggtggacggaacattctacgaccaacacgttctacgaaacttcttgcatacgccaaggcaattccatgtctttttactccacccgtccaagaactggggacgcatggtgttgatagctgtggttgattgggtaactcgtgcatccaaacgcataggagacgagtgcaattctcgtctctcgcatttcgcaagcgtatcgaattcgcccagctctaagtgggccgaggaacatcgtggggaaacgcaccccaaaaggttcgggaaggggtgcaacgggtggggtcaattcgaaaggttcacataccttgttttagagacacgccttcaagcggggacatgggcgttcacaggaaaccgaatgcaggaggcgttgaggggaatgccccgaagccccccaactggagaaaccaacaaattccgtgtgcgtggcagcgttgaattgctgcaattgaaagggggggaaagggccgaaggtaacccatggctcaagcgtccagaattggccgattcggtgtcgtgtggaagattccn

SEQ ID NO: 590073 - DNA, 340 bp, Homo sapiens
tttttttttttctatctcttttctgttttctttaatcgtcagttttttttttttggagacagggtctcattctgtcttccaggctggagtgcagtggcaggatctcggctcactgcaacctccgctttcccggtagctgggattacaggtgcatgccatcacgcctggctaattttttgtatttttagtagagacaaggtttcatcatgttgaccaggctggtctcaaactcttgacctcgagtgatccatccatctcagcctcccaaagtgttgggattacaggcgtgagccaccgcgcccggccttccctgtcattttcaagcaatcctcaaactccc

SEQ ID NO: 590074 - DNA, 440 bp, Homo sapiens
ttgggaaggcacggcaggtcaggggggtgctgaccgcgcgaccgttgtggcttatgttcgggggcccgagaccgtggggtcctggggaacccaccaccgccaaggggcgtcaacgttgcggctgatccctactcgcgggccctgtcggaattcggcaatctccggtgcgggttcgaggcgccagcccaaggcagatatcgcatcattgccgatgatgctcaccgggtttccagactcttcgagactggcacccaaagctgaccccatatttcctggtccgcaggcaaggcggttctcggcgacgttcccgcgatgccgacgagcatcatcgtggcctgctatgacttgcccgccacgcagcagcacggcagatgcctccccatctggtgaacacacgaggttcacgcagcgatgcatgccgtaagacaagtacacgtata

SEQ ID NO: 590075 - DNA, 162 bp, Homo sapiens
cagatttttctttttcttttggttctagcttgggtaatttgtgtctttcaagaaattggttcatttaatttacattttcaagtttattggcataaagttgttcatagttttataattcttttaatatctgctgaatctataatgatattttggctttcattc

SEQ ID NO: 590076 - DNA, 186 bp, Homo sapiens
gatacgaatcgagctcggtcccaggagagggggaggaaaggacagaaggctgcgggtggtgttatgaagcagaagaagcctctggtgggaagaaaggcagtcagtaccaagaaacgagccccatgtagaaacgaagcctgcagaggaagaaacctcactacagcaggagatagaagccgtgctgca

SEQ ID NO: 590077 - DNA, 949 bp, Homo sapiens
  misc_feature (1)..(1): n is a, c, g, or t
  misc_feature (79)..(79): n is a, c, g, or t
  misc_feature (164)..(164): n is a, c, g, or t
  misc_feature (169)..(169): n is a, c, g, or t
  misc_feature (194)..(194): n is a, c, g, or t
  misc_feature (248)..(248): n is a, c, g, or t
  misc_feature (264)..(264): n is a, c, g, or t
  misc_feature (277)..(277): n is a, c, g, or t
  misc_feature (327)..(327): n is a, c, g, or t
  misc_feature (397)..(397): n is a, c, g, or t
  misc_feature (469)..(469): n is a, c, g, or t
  misc_feature (490)..(490): n is a, c, g, or t
  misc_feature (492)..(492): n is a, c, g, or t
  misc_feature (539)..(539): n is a, c, g, or t
  misc_feature (553)..(553): n is a, c, g, or t
  misc_feature (627)..(627): n is a, c, g, or t
  misc_feature (671)..(671): n is a, c, g, or t
  misc_feature (673)..(674): n is a, c, g, or t
  misc_feature (707)..(707): n is a, c, g, or t
  misc_feature (722)..(722): n is a, c, g, or t
  misc_feature (747)..(747): n is a, c, g, or t
  misc_feature (762)..(762): n is a, c, g, or t
  misc_feature (765)..(766): n is a, c, g, or t
  misc_feature (780)..(780): n is a, c, g, or t
  misc_feature (799)..(799): n is a, c, g, or t
  misc_feature (807)..(807): n is a, c, g, or t
  misc_feature (813)..(813): n is a, c, g, or t
  misc_feature (857)..(857): n is a, c, g, or t
  misc_feature (859)..(859): n is a, c, g, or t
  misc_feature (874)..(874): n is a, c, g, or t
  misc_feature (940)..(940): n is a, c, g, or t
nttaatggattcaaatcttcaggtacccagtctcagttgccgttcagtggggacaagagtcgtgtctgtagggcatggncacaccgcttctgtgctgcatgcagaggggtgcaaggccagggcagctgacctggtcagccaccaggggagcccacgcctctganaacanagtgtccttgaggtcaggaatttgnagtttattttgttattaagatggcgagataatttttcgtccatttagagcctancatttttagatgtatnttaatggcatctnggttgggatggtattcgtgttcatttctcagctgctgaaggatgtgtgtnctaaaacaaaagggctctcagtctgctctcctggctgcatgatagagaagtgttttgtaagacgcttgtnaaaaacccatatcccctggcccctcttgtggagaccctgtttcagtagatgggaatggggctggggtctgtntaacctgtgcccaggagactntnttaccagcttgggaagctcctgcagggaggaaggaatgatccacaanttcccaagcccttnatgctgaggcatctgtctggctggagaaacactaaggttggcattgtgctcacactgggaaatgacctggaggnagtcgggaagaggagtgcaggccggttccaccctctgggtcatntnnccggctggtaagcactggaaatagggaaatagnagaccgaaaggctgngaccccctcacacccaacctgcgtncatggccgaggttgngtnnggagttctggagantctggcttcatggtctttnctcttgtncttctnttcctcaggggtcgctgcccaccaggctcagcagggcgttcttntngtcgccgctggtgtnttccatgaacatgctgctgagggtctggccgtacatcttcttgaagttacatttgataagattaantaatttcgc

SEQ ID NO: 590078 - DNA, 177 bp, Homo sapiens
  misc_feature (98)..(98): n is a, c, g, or t
  misc_feature (158)..(159): n is a, c, g, or t
ggaagaccattctgatcatcctcactgacgccacaggcaagagggtggttttcctgaagcagctggctgtggcttatactcgtgactggacctctggnctcaattgagttcctcaacgaagaccacaccagaaattgtcattgccacctcaaccgaanngatattacaatgtaaaaa

SEQ ID NO: 590079 - DNA, 408 bp, Homo sapiens
cttgtccacacggtaacatccatgtcagtgtatctgattatgtgctcagatctcagcaagctgtggctgcaaaataaggatgcatctagattgtaatgacttggagtcatcacccgcccaaaagagcagaaaattcaggcccccttcccttggttcccttcctcagggtccatgtttgtctattattacttacataattaatagctctaaaggaatgcatcttataactaacatcaaaaattaaaaacacaactcttggagtacctcaagttcaaggtgttggctgttcctagttgtctgatggtcatcctcagcctgtgtgctgaggatccactcatctggtcgtccctgcttggagttatctgcactgggataactggaggtgggaggcagtggaaatttcggttc

SEQ ID NO: 590080 - DNA, 397 bp, Homo sapiens
  misc_feature (101)..(101): n is a, c, g, or t
  misc_feature (189)..(189): n is a, c, g, or t
tgatctgtgtattatgcatttctctggctctacagcgattagaagaacaacagatgtgcttggttcctagaagcaacaaaataggattgaagaaaagaatngcagcaatgaagagaatcggaagtggatgagagaaaatgtacctgaaaatagtcgaccagccacaggtttacccctgccacctcagantttcaatgaaagccagtatcgcggggactatgatgccttctttgaagccagagaaaataatgcagtgtatgccttcttaggcttgacagccccacctggttcaaaggaagcagaagtgcaagcaaagcagcaagcatgaaccttaagcactgtgctttaagcatcctgaaaaatgagtctccattgcttttataaaatagcagaatta

SEQ ID NO: 590081 - DNA, 267 bp, Homo sapiens
  misc_feature (244)..(244): n is a, c, g, or t
ccatcttctcatagcaactcataacctgaaaacttcacgacattttaccaaaactctcctcccagaagagcatcagtgatgagacgtagaaggctaattggttcttcgatgacgggtgctgaaccacagagggcgctggtgagaaggtggtgcctaaagattcagagaatctgagaataatttcatagtcccagacatttcacttaaaggcaattcaggatggttcactgctctgctgcttggnggcgtcatcgaagaaccaattag

SEQ ID NO: 590082 - DNA, 696 bp, Homo sapiens
  misc_feature (211)..(212): n is a, c, g, or t
  misc_feature (316)..(316): n is a, c, g, or t
  misc_feature (650)..(650): n is a, c, g, or t
atttggagagtaaagggtaatttggatctttcaaggcctatctttttaaccccagtcatcctacttccccccaaagattgaattgccctcgggaaatgtggggatggcccgggctttcaaactatccttccctttatggcgctgcaaggtgtgggcaagtcatctttactgaacggaagctcactgcatggcctccgtgtcccactgcaanntgtcagtggtggaccttcctgccgtctaaaaaaactgcccaatattattcatcaaaaaggtggttaagcaggggtcggagggccccctcaagggcattctgggntacacttagcaccaggtggtttcctttgattttaaaaacgacaacccctcctccccctttgacggtgggggtggcattgccctcaacgacccctttgtcaagctcattttttggtatgacaacgaatttgggtacaacaacagggtggtggacctcatggcccccatggccttcaaggagttaaacccctgggcccccagccccagcaaaagcccaaaaggaaaaaaaagaccctcccttttggggagtccctgcccccctcagtccccccccccactgaatttcccctcctcccagttttcatgtaaacccctttaaaaggggaggggcctanggaaccccccctttttatgttccctcaataaagtaccctgtgctca

SEQ ID NO: 590083 - DNA, 324 bp, Homo sapiens
gagacagggtctcactctgtcgcccaggctggagcgcagtggtgggatcacggctcactgcagcctcaacttcccgggctcaagcagtcctcccatcttagcctccctagtagctggatccacaggtgtgcaccaccatgcctggctgatttttctattttttgtagagatgaggttttgccattattgcccaggttggtctcgcaaggggatcctcccatcttggcctcccaaagtgctgcgattataggcatgagccaccatgctcagcccactatggatattaatagctctctagtgatcctgataagcttatgatcaata

SEQ ID NO: 590084 - DNA, 1230 bp, Homo sapiens
agcggaagtccccacccgacccagaagccggctggtttcacctctcaatggctccagccgctgcctctcccagcacatccccctttcgcagatgcgagtcccgcttccacagccctgggctagccccaagagagtgtgccgcctactccgtgcattccgcgctgctgacagcggcctccctcactgcacgcgcccgactgccgcgcggaccacccactgacggctgctcgatccactcgtctcctcttcacccctcagcaacgtctcgcactctgcgctgcgggcgcccgccactctcctgcttacgctgctgcacacccaccggtcctcgcgcccctccgcctgcctccacccctcgcccccgacccccacccgccctgctcttgcgcactcttcgccccgcgccctgccactgcccacccccgccaccccaatcatcaaccaccactcctcccttccccaacccctcaccccccactccaccaacctccgccccactccctcacccaacccccacccaccccaccacaacccccacccccccacaacaaaacaccacataccccacctctccacccaatcattcgcacctctccctcactcctcaacacaagccgagatactatactagagacccacttgagcctcgccaggtcacacgtgctaactacaccgcagagaagacactctgattaaccagcaaatctagaagccaccgcgcacaccctacggaagctaaagctactgccagatccattctccaggacccaattctacttgcttacgccatacgctcatatcttcatcagctctacgagctaaaacgtgacagtacctacagcccggaagtagacttatcttccctccaacattacatatcattctataccccacccttcaccttcatactcacatctctccccatcgcccccacacttccaaacaacccacaaacacaccacatagcccactccccatccccccccacaacacacccaatcatcgcatcttcccccacacacaacaacacgacacaacacataaccatgaccaccctaccccaaactcccctcaccctctcccccacaaacccatcctcccacacccacatacaccacacacacacccagcccctaccacactctcaccatacccacaccgcacaccaccacatcaacaaacaaccaacatccccccaacaaccacatcacccctcaaacacccccataa

SEQ ID NO: 590085 - DNA, 609 bp, Homo sapiens
gcacgaggagagacatgagtcgggtcacatactgtgcatagagctctagagactcggtatatttaaccacttacatgaggcgcgctcaccaaatatataggtcgaatgtgattgggacacaacgcgattgagattcatctattcatggggctttgagtatgaagaagaaaggagattattctgacacacaagggtgacaacctggatatgagcctgaggcgttatactattaacaccattcttttatggttcaagtcgatgaatttaaacctcttgtggaagaacctcagaatttaatcaaacacaaattgtgagctttttgagcacattggagagtgccaatttcagaatgcgctattaggtcggtacacccagaaagtgccccaagtgtcaacttcaactcttgtggagaggtcaagcctatgacaagactatctatatcgggtgctgaaccaatatgtgtgttgcatgagagaacgccagttagtgacacagataccacatgctgtgcagaatactctgggaacacgcgagcatgcgttttagatctggaagtccatgagacatacgcttccacagagagttgctgtgacatttacctttctgcgg

SEQ ID NO: 590086 - DNA, 317 bp, Homo sapiens
cgtcgacagagggccctattcatagtggatcctacggaccacagaggttgtgaacctccggatgctctggaagaatttgccattttcagtaagaagacaagtggtcgttactagctaagatgtgtttgtactttggaagagcatatgctacacccttccttgtagtaagacaccaagtagttaaaacataaggatgtttcagttcatccatttaacagatatgaagagcattttaaagggtgcagcctctggaagtgcatcaaactagaactcatatgccatactagatatgtgttgtcaataaacttatgacgtga

SEQ ID NO: 590087 - DNA, 496 bp, Homo sapiens
cgctccgcctgtaggattactcaagtgatctgcccgcctcgactcccaaagtgctgggattacaggtgtgagccagcgtgcctggcctagaaatggcttgtttgactcagcataatgtcctcaaggttcatccatgttgtagcatgggacaggatttccttcattcccaacgctgaataatattccactggacacttggattgttgagaataatgctgctatgaatgtgggtgtacaaatgaatctctcctcaagaccctgctttcaattcttctggagatatgcccagcagtggagttgctggatcatatgatatcctatgtttcattttttaggaactgccatacagtcttccacagtggctagaccattttatattcccatcatcagtgcacaagagtaccactttctccacattctcgccaacacgtatttggtttttttggataatcctaacaggtgtgaggtagtatcttattgaggtaatccgtgaggg

SEQ ID NO: 590088 - DNA, 154 bp, Homo sapiens
acgactcaggagtctagcctgaaactggggtccagaaagctaggaaagagtcccctcttcctcccatctcaaatcctctctagggaacagagtggccctggctataattttatcacatacattataattagaattaagtcttcttcatgatggt

SEQ ID NO: 590089 - DNA, 290 bp, Homo sapiens
taatatttttttgtaaaaaaaaaaaaaaaaaaaaaggggggggaaaaaaaaaaagggggaaaaaaggttaaaagggggggggggaaagggagcggccacgaaactcaccacgcatagaagaacccgccaacgggggtgcccgcgcgacccctcatcgaggcaaccaaaacaacggtgggcgctatagaaaccccccaccagagaggacacaaatatagaaagggcaaactcagtggatgtgacgaaccgggacacaaaagggggaatctaagaaagaaaaaaaaaaaggg

SEQ ID NO: 590090 - DNA, 1360 bp, Homo sapiens
ggcttcggcggggctagcttgcagcgcggatatctctggccgccaagactccgcctcccgccccgggactgtgcccctgggggctcgcctgtagagccagagtcagcgccgacagcgcctccatgcttcggtagactgggacttgtggcctcgatggacccagcctgtcattcgcgcagctgcgccgaggtaagagcttccaggtatggctcgaccgcatcgactaactgccgcgcgatcctgcgacgtactggctgtcaagaggggactgctgcatatgccagtgtccgggtgcgcgttcgcgtcagcacgtcgcgacccgcgtagagcttgctcgcgcggccccgcttgcctcgcaggatcgccttgccggggccctgctattgagcgagtcccgtcgccgatggactgtacgagcgagcgagtgctgtgtgttgtgctgcaccgtaacgtgtcgctcgacttgttgccgagccagagtgagaccttgccgtgaagagtctcccccagcgggaacgttgcactgggcccccgaacgctcgcgggcgtacattctgacgtgcgaaaggggcagagcccaattcgcctggagagtgaacctaccctttctcggtcgacttcgacgtagcgaccgtcgcaggaactttgggcgtggtccttgtgggagcagctatggcaagtccacctccttgcattgtcataggtcacattccacaaggaggatcggtgttacaacacccaaaggggggagggctttgcggaaggccatgggcaagttctcccggctaattattgcccctaagttgcgacctaaatttgattttggaaccgatcttgtaataagaaagtactcctaagatccaccacgtttggaacaaagatcttccccaatttttaaacattctttcacatgcctacattagttcgttgttagtacccaaacccattggacaaacggcgttccatatggttacccaccctgttcgtagaacgagccggtatgcaaaaagttatgcctagggggcgaagcgcgccgtgccattaggaacaggggcatgcgcatctccgcgcgaatactaggtgggcgattccacgaggggcgggaacggccaattaggggaacgcaagttcaccccttagagataagaccgctaggggcgatcgccatatggcggagagggagaagccacattttggggttgtggtgcgtataccatttgcgcgcaagagcgcatggtggcccggccccctatatggctagattgttgggcccggtttatggaacgtgggccctagaataaagccccccgaagaaagtccccttcgagccccaggaccctgtgtggcagtgttgacttag

SEQ ID NO: 590091 - DNA, 596 bp, Homo sapiens
gtgtacgggttgtttgaaggtaatctctgttactttaccctcctggggtaggaagtcaatcacaagttgggtaaattccccattttggcagtatgtgaaatgacagaaagatcagaaagtcagaaatcccacacacctgctaagtggtggcttatctgtatggctgtgcaaatgaagcacgctgcttccctcattcctgtattcagttttattgcttgtcttgcaaaatggcacatttcaagattaaagccattttgactttgagttactgtctttgaagtataggatttcctatttataaaaacacatactaattgtagaaaaataggataatagaagaaaatatgcagaaaagaaatttatctaaggcctcctacctcaaatccaactgctgtaaatgtataagtgaattggcttccaatacttttatgagctctttaaaaacatatttgagatcatactgtgatatagtgttgtatctatgcatatactcctcaatgttgttagtgtaagcataaggtcttcattactgtttcaatggctatgtgccaggaatctgtacattgccatctcacttatatcagtgaatggtagat

SEQ ID NO: 590092 - DNA, 656 bp, Homo sapiens
  misc_feature (65)..(65): n is a, c, g, or t
  misc_feature (70)..(70): n is a, c, g, or t
  misc_feature (79)..(80): n is a, c, g, or t
  misc_feature (90)..(90): n is a, c, g, or t
  misc_feature (93)..(94): n is a, c, g, or t
  misc_feature (98)..(99): n is a, c, g, or t
  misc_feature (104)..(105): n is a, c, g, or t
  misc_feature (108)..(108): n is a, c, g, or t
  misc_feature (114)..(114): n is a, c, g, or t
  misc_feature (122)..(122): n is a, c, g, or t
  misc_feature (127)..(128): n is a, c, g, or t
  misc_feature (130)..(130): n is a, c, g, or t
  misc_feature (133)..(134): n is a, c, g, or t
  misc_feature (139)..(139): n is a, c, g, or t
  misc_feature (153)..(153): n is a, c, g, or t
  misc_feature (158)..(158): n is a, c, g, or t
  misc_feature (165)..(165): n is a, c, g, or t
  misc_feature (172)..(172): n is a, c, g, or t
  misc_feature (176)..(176): n is a, c, g, or t
  misc_feature (182)..(182): n is a, c, g, or t
  misc_feature (193)..(193): n is a, c, g, or t
  misc_feature (404)..(404): n is a, c, g, or t
  misc_feature (417)..(417): n is a, c, g, or t
  misc_feature (435)..(435): n is a, c, g, or t
  misc_feature (479)..(479): n is a, c, g, or t
  misc_feature (489)..(489): n is a, c, g, or t
  misc_feature (511)..(511): n is a, c, g, or t
  misc_feature (521)..(521): n is a, c, g, or t
  misc_feature (557)..(557): n is a, c, g, or t
  misc_feature (567)..(567): n is a, c, g, or t
  misc_feature (602)..(602): n is a, c, g, or t
  misc_feature (609)..(609): n is a, c, g, or t
ggaagtccccaaaaatgtccgcttgggcgccccaattataaataccgggagccaccaccgagttnatccntgtgaaaannccatcccccntcnngccnntaatnntangaattntccaaggncatcnngnttnngcagntgagagaaaggccnagggnccagagntgtgcancccntcaggntacctagcaanaaggcccaggttaagccagggcaaacattcagtgtggccggttgggggcaaacggcccccctgggaaaacattcacacaccctacaaaaggtgaagatgacagtgcaggaagattgaaagtgcgaatctgacttacgccattatttcgacggaccatttagtttgtgggtgggggccccaaaaattaaaaaaactttcctttaagggggantttggaggccctnttgtgtgtaacaaggtgncccagggcattgtttcctatggacgaaacaatggcatgcctccncgagcctgcnccaaagtttcaagctttgtacnctggataaanaaaaccatgaaacgctactaactacaggaagcaaantaagcccccnctgtaatgaaaccccttttttggagccaagtccanatttacnctgggaaaggggccagcaactgaataaaaaccttttagctgagggga

SEQ ID NO: 590093 - DNA, 178 bp, Homo sapiens
ggaagttcaaaggaactccctctccagcttttttgaatcttggggcccagcctaaaaagggccaaaagttagaagacagcatagccactcagctcagggagctaccaaagaaaaatagccactgatgtgggggccttttttttttttttttaatttgaataaaaagaattagaagtga

SEQ ID NO: 590094 - DNA, 1265 bp, Homo sapiens
caaaacaccaaatgtgcggatgactgccggtgcagcgggggtggcccgtgggtgccctgtgtggccctgggatggggaacctgctggtggcattccgcggaggtttcggcagtggcatccgggtgcctgggagtcgcggaccgtggacggggcctggtggccgatggccgcggagctctgcggaggcaaggccgaggataaggagtggatgccctgtcaccaagttgggccgcattggtcaaggacatgaagatcaagtccctggcaggagatctatactcttactccctgacactattaaggaatcagagatcattgatataacttccatgggaggcctactctcaaggcattgagagttaacgaagcatacatgccagatgcagagcaagcagacccggtgaccggccagaggcaccagggtttcaaggacatatagtagactaatcggggacatacaaatgcgacaagatacggtactggggtgtacaagatagctcccacgggagtgtggcaacccgaacataccgttggggcacatcaatacctgggccaagactcatccatcgtacccacgtgcgacagaggcaacctgggggcggaaccacgcattacgcgcagagcccagcaaaacatggttcctctctgcacaccgctgaccacgggcccgccttgacgggcatctagatacttgggtacggcctccaatacccgctggacccagaggcgcacactggtgactttgatccggacacctgttgccataaaaaggcttgctccgttagatcgcgttggatctcggaagaacgatgggtcgcagcgtaaagccccggggcacagacattgcccgagccatgggcccagtatcagccccaagggcacacattatgaagcagtttcgttaagaacctaacagataaccttgacccccggaccattcgtgacaggagaactgtgatacgcaccaagacatgctatcacggactacccgtggccacgcgaacgaaccccaaccggaagccccgcacgggcgcacggcccccgcgtgggcaacagcaaagtgttactctcggacgagacggattagccgaaacaacacaacgcggcgccaacgacccgagcggccgcacacacgccaccacacaagccgcaagtgagcgatacagcggtcccaaagcgagaaacgcatggagaacccaacggagccaccagtagagataaagatcaacagccgtattacagcgggggtcacgacaaaccagcga

SEQ ID NO: 590095 - DNA, 996 bp, Homo sapiens
tgtggtgtctcccttgttgattctgtcttctcactctataccttctaccgttttttgtcgtctatctgatggtggttggtggtcttggttctttcccggggcgttcgatgctgcctcggtttttatggggagctgttgtttattttcctgtaaccgtgcttgtgggacattcttgtgttccttgttgactgtctcgtgtgtctttttttttgttgtctcgtgcccccccccggggaaatgggcgccttggggccaccccctcctcttgccctcctactgctctctttttcgggctttgtggccccacgagagggttttccccccccgagccccacgcgttgtgggagaacactctgtggcgcccacgccgccttcttctgtgcttctgggtaacaaaaatggtaatgaatgcgtgttgggcctctttcttaaccccagcgagggggcccccactggagtttcccccccacgtcacccaacaccggtgtcccctttccactcggccctcgcggagtgccctccacccaccaccccacggttgttctgttcctctttgctctctgaaggtgccctctcccaggcgctctccccacatccacaggccccaaacgccccccatgtgccccctgttccacggagatactgtcctgggggccacatatcgagaggggcccacaacacagaagggcgccaccaccacaccacacccgaacgcggcatgggggagacccacacccacgaccccctttctccctcttttggtcccagaacatcacattgtcccattgcccgcgagaatggccccctaccagccaccccccgttttgccacccagaagaggagactgtagattggccagaaccgggcccccctgtaacccccacccccatctcccacccacgccccggccttgtctttttttggcctcacgtgtttcagattttttataggaccccaaaaaaaaaagggaaaaaaacaccaaaccaccaaaaccca

SEQ ID NO: 590096 - DNA, 837 bp, Homo sapiens
attctagaggccgaggcgccgacatgttatatatcttttttttattttctttttgggggaaaaaaatccgggggtattctcccgcgacaaatggatcatgagagaggacgaacagagatgtagccgcccagactgtaggagtgatacacaggggaggatgacacaacgcggtgtagacagaggagccggatggagacaaaaagagggcccacagagggtggcgcaccaccaacaacgatcccccgaagatgtaatggggcgaggaaaaaacgacgacgtgagcagcgtcacaagcagggacacagagtgcgggtgagagacccaacgctaaccacaaaaagaaacaccgtggtggggaaacacggtcgggaagccaaccactgtgcggattaaggcggagccaagcaacgctgcagagggggggcgccacactcagggggggacaagaacgcccaacattagcagcgggggggggcccccccacgaaccggtggagcgacagcaaaacacagccccgccaaagaggagcaccactctggtgggaacaacaggatatgtaaatcattgcaataacggggggaggtacagccacaaacagaggagggcgggcccgtgacaagcaaacaatgagatagctacaacgagagagaaggcattaagggaccacaccaaggtgctaacacggagaaaacagagaggagtgggcgagaagacccctcgccaagcaaacagaagagggctcttgagtgacgtatcggcgaggggcagaaaccctcacgagaataaacgccgtcgtgcagcgagccaaccacactgacgggccaccccctcttgtgt

SEQ ID NO: 590097 - DNA, 176 bp, Homo sapiens
ctgttgctagttatggtactcgtaagcattaataaattacagctccatagggtcttctcgtcttgctgtgtcatgcccgcctcttcacgggcaggtcaatttcactgtgtttacaagtcagagacagctgaacccttcgctggagccattcatacaggtccctaattcaggaacaa

SEQ ID NO: 590098 - DNA, 1047 bp, Homo sapiens
  misc_feature (10)..(10): n is a, c, g, or t
  misc_feature (38)..(38): n is a, c, g, or t
  misc_feature (74)..(74): n is a, c, g, or t
  misc_feature (88)..(88): n is a, c, g, or t
  misc_feature (93)..(93): n is a, c, g, or t
  misc_feature (110)..(110): n is a, c, g, or t
  misc_feature (158)..(158): n is a, c, g, or t
  misc_feature (1012)..(1012): n is a, c, g, or t
  misc_feature (1039)..(1039): n is a, c, g, or t
gataaggatnagagcatagcacccaaaactacccggtnacatacccagccaaagccagggcacattcatcgcanacagccaccagaantcgcnttgttcttccagctggnagatgtgaacactggtgctgtactcactcctcaccagacatttgtccnactccataaccagaagactggccaggaagtggtgtttgttgccgagccagacaacaagaacgtgtacaagtttgaactggatacctctgaaagaaagattgaatttgactctgcctctggcacctacactctctacttaatcattggagatgccactttgaagaacccaatcctctggaatgtggctgatgtggtcatcaagttccctgaggaagaagctccctcgactgtcttgtcccagaaccttttcactccaaaacaggaaattcagcacctgttccgcgagcctgagaagaggccccccaccgtggtgtccaatacattcactgccctgatcctctcgccgttgcttctgctcttcgctctgtggatccggattggtgccaatgtctccaacttcacttttgctcctagcacgattatatttcacctgggacatgctgctatgctgggactcatgtatgtctactggactcagctcaacatgttccagaccttgaagtacctggccatcttgggcagtgtgacgtttctggctggcaatcggatgctggcccagcaggcagtcaagagaacagcacattagttccagaagaaagatggaaattctgaaaactgaatgtcaagaaaaggagtcaagaaccattcacagtatgagaagaaaaatggaaaaaaaaaactttatttaaaaaagaaaaaagtccagattgtagttatacttttgcttgtttttcagtttcccccacacacagcagatacctggtgagctcagatagtctctttctctgacactgtgtaagaagctgtgaatattcctaacttacccagatgttgcttttgaaaagttgaaatgngtaattgttttggaataaaaagggtanccatagga

SEQ ID NO: 590099 - DNA, 196 bp, Homo sapiens
aactaacaaattgtatttactatacctagtgaaatctggaatgactgctacttcctagtgaatgtacaggtttgctattcgtgtaccctctttctggttgctttacaagtgacgtgtaatttctgaacccatgtttcatctgtataatagaacatctgcaccaatttctctcctgccccttatccagagccttggt

SEQ ID NO: 590100 - DNA, 1048 bp, Homo sapiens
  misc_feature (10)..(10): n is a, c, g, or t
  misc_feature (38)..(38): n is a, c, g, or t
  misc_feature (74)..(74): n is a, c, g, or t
  misc_feature (88)..(88): n is a, c, g, or t
  misc_feature (93)..(93): n is a, c, g, or t
  misc_feature (110)..(110): n is a, c, g, or t
  misc_feature (158)..(158): n is a, c, g, or t
  misc_feature (659)..(659): n is a, c, g, or t
  misc_feature (669)..(669): n is a, c, g, or t
  misc_feature (674)..(674): n is a, c, g, or t
  misc_feature (679)..(680): n is a, c, g, or t
  misc_feature (685)..(685): n is a, c, g, or t
  misc_feature (688)..(688): n is a, c, g, or t
  misc_feature (697)..(697): n is a, c, g, or t
  misc_feature (699)..(699): n is a, c, g, or t
  misc_feature (702)..(702): n is a, c, g, or t
  misc_feature (725)..(725): n is a, c, g, or t
  misc_feature (728)..(728): n is a, c, g, or t
  misc_feature (1013)..(1013): n is a, c, g, or t
  misc_feature (1040)..(1040): n is a, c, g, or t
gataaggatnagagcatagcacccaaaactacccggtnacatacccagccaaagccagggcacattcatcgcanacagccaccagaantcgcnttgttcttccagctggnagatgtgaacactggtgctgtactcactcctcaccagacatttgtccnactccataaccagaagactggccaggaagtggtgtttgttgccgagccagacaacaagaacgtgtacaagtttgaactggatacctctgaaagaaagattgaatttgactctgcctctggcacctacactctctacttaatcattggagatgccactttgaagaacccaatcctctggaatgtggctgatgtggtcatcaagttccctgaggaagaagctccctcgactgtcttgtcccagaaccttttcactccaaaacaggaaattcagcacctgttccgcgagcctgagaagaggccccccaccgtggtgtccaatacattcactgccctgatcctctcgccgttgcttctgctcttcgctctgtggatccggattggtgccaatgtctccaacttcacttttgctcctagcacgattatatttcacctgggacatgctgctatgctgggactcatgtatgtctactggactcagctcaacatgttccagaccttgancccccccccnccctncccannccccnccnccccccccncncanccccaccctccccccccacccanccnacagaacagcacattagttccagaagaaagatggaaattctgaaaactgaatgtcaagaaaaggagtcaagaaccattcacagtatgagaagaaaaatggaaaaaaaaaactttatttaaaaaagaaaaaagtccagattgtagttatacttttgcttgtttttcagtttcccccacacacagcagatacctggtgagctcagatagtctctttctctgacactgtgtaagaagctgtgaatattcctaacttacccagatgttgcttttgaaaagttgaaatgngtaattgttttggaataaaaagggtanccatagga

SEQ ID NO: 590101 - DNA, 913 bp, Homo sapiens
  misc_feature (308)..(308): n is a, c, g, or t
gaatatatttataaataggaaagtggtagctttcagatttttgtttgttctgttgtgtttggagacggagtctcactcgtgttacccaggcgtggaggtgcaagtggaaccatcgtcagctcacgtggaacctccagctccgggattcaagcgatgctccgtgcctcagactccagagtagcgtgggattacaggcgcatgcaccaagcccggccagtttggtatttttaatagagacaggttttcaccatggtgggccaggcgtggtctgtgaactggctgacctcaggtgatccagccgccagggnctcccaaagtggctgggattcacaggttgtgagccacgatgtgcccagcccagatttaaattatggagtaaaagagcacggattttttgtaaaaagtaagtctgtgtcttaatggaaacatactctagtccttactcacattagagaatcgtggttttaatttggtctattgagcaatcaacaattaacttggtatctcgtgactttaaatttgggtaatctgtatgaaagcagtgcctttgtggcaagctttctaagcgctgttttcacgggtcatctgtgttagatagtcggagttaatattagatatttacaggtcttctcatgtttcaaagcacatagtgtgggattcaaatagagttaacttcatggagacctaggatttaagaatgtcattaatggggccaaatttggagcggggagagattttttaggaaccttcgagttggaatttggacctgtgattgtgtgtgccttcagattaatcggggaaagggatgagggaattgggacaaaaggtatgttaacatttttgtggcaaggtaaacaatggggtaaaacacggggtgggggataacaaaatggggagcaacaaacagagaatg

SEQ ID NO: 590102 - DNA, 656 bp, Homo sapiens
caagatcgtaccattgcactccagcctgggcagcaagagcgaaactccatctaaaaaaaaaaaaaaaaaaaacagaaaagaaaaagaaaggtgccagagagctgccttgccccttctaccatgtgaggacacagcaagaaggagtcctccctgaggagtgggtcctcaccagatcctgagcctaccagtgccttgaccttggactctccaggctccaaaactgtgagaaatacatttctgtttataaaccacacaatcagcagggcatagtggcccacacctgtaatcccagcactttgggaggccaaggcaggcagatcccttgagatcaggagctccagaccagcctggccaacatggcaaaaccccttctctactaaaaatacaaaaacgtttgccaggcgtggtggcacacgcctgtaatcccagctacttgggaggctgaggcaagagaatcacttgaacctgtgaggcggaggttgcggcgagccaatatcatgccattgcgctacagcctgtgcaacagagtgagacttcatctcaaaacaacaacaacatacaacaaaaaaaaaaacttgagggaggccccggacccaattcgcctatagtgagccgattacaattcattggccgcgttttaacaacgtgtgactggg

SEQ ID NO: 590103 - DNA, 871 bp, Homo sapiens
aaaagccctgaaagttcagtgttgaggctcagggtggggaccctagagaggcaaaagatgcccagccagatggaattggtggtgtgaattgccaggtctggaaagagcccagatgggggctgcagcatgggccttggttgaagcctctaatcctgtaagggctgctttggcccaagaggccttagaaacccggtgtaagcctcaatcggtagccggtctggcctctttctcacacttaaccgacacagctcttgctctgatctcatcccaagtcatctcgctggaggacaattaactcggcttcaaaatggccctcagcctggagccaagatttaggagcaagaccgtctagttgggagagaagatgtttttggagagttgaagacttcttgaaaaagttcgaaaagttcttgaaaaagcaaaggatgcttctttcggtctgggagagggaaaacctctcccagggcaaaaggaactaagaccaggggtgggttaaaaaaaaaaaaaaaaaaacctttcactcttgtagaataagccaggagccggcgtgtggtagacttctgggcctgtttcccgacagctggtttcgtttagatttttgtgtgattaactgacatcttcctgttcctttgccacatgtatctagcaagcctcttttaccttataagggaaatcctttgtagcgtgtggaaggctttgattgcaggaaggggtggaacccaaaatgactcggccgtgactagcagtttttcaaaaatacatatatatgtatgcatgtacagatatgcgtgtatctcccaactccagacagctgaaaatctgccaaaagcgttgtttgccagatttagctcatcggccaggattactcact

SEQ ID NO: 590104 - DNA, 521 bp, Homo sapiens
gccccttaggccaatagaactatttctctaatggcccaagttttttaagagtcataaccgtctagttgggagagaagatgtttttggagagttgaagacttcttgaaaaagttcgaaaagttcttgaaaaagcaaaggatgcttctttcggtctgggagagggaaaacctctcccagggcaaaaggaactaagaccaggggtgggttaaaaaaaaaaaaaaaaaaacctttcactcttgtagaataagccaggagccggcgtgtggtagacttctgggcctgtttcccgacagctggtttcgtttagatttttgtgtgattaactgacatcttcctgttcctttgccacatgtatctagcaagcctcttttaccttataagggaaatcctttgtagcgtgtggaaggctttgattgcaggaaggggtggaacccaaaatgactcggccgtgactagcagtttttctcccagtcatagaacgattgtaagaagacgcaccagatgcccagtatcgtcatcca

SEQ ID NO: 590105 - DNA, 330 bp, Homo sapiens
  misc_feature (8)..(8): n is a, c, g, or t
  misc_feature (151)..(151): n is a, c, g, or t
  misc_feature (170)..(170): n is a, c, g, or t
gcgtcgancttctgctctgtagatgaaatagtatatcccacagcccaccacgcagggccccagtagcttcccgggcgctggaagaatctctgctaccaaacagtgatagaaaggattgtctccaaagccatctgctctcagggctgccgangattggagctgtgacaaangagatcagagaaagaggacgtgggtgtatagcccaagcctggagctggtcagccctggggaacccatttccctcaatttcctccccaggcctccgccaagaaacctggggcgcttgagcccccaaccttttcttccactgatcctttcaccttgaatccg

SEQ ID NO: 590106 - DNA, 233 bp, Homo sapiens
ctgcgagagaagaaagaacatttagggacccaggaaagtgtgcatatctagtatttgcctcatgttgaaagagaaaggcagggcttcagaattcactttcattcaggtttaaaaaattcaggcaaagaacatttgccctctgctggattattttgggaaaaatacagattttcttttttctaactattaaagtagaatggaagaatagagtgacaaagagacacagggaaagt

SEQ ID NO: 590107 - DNA, 1434 bp, Homo sapiens
aaaagccctgaaagttcagtgttgaggctcagggtggggaccctagagaggcaaaagatgcccagccagatggaattggtggtgtgaattgccaggtctggaaagagcccagatgggggctgcagcatgggccttggttgaagcctctaatcctgtaagggctgctttggcccaagaggccttagaaacccggtgtaagcctcaatcggtagccggtctggcctctttctcacacttaaccgacacagctcttgctctgatctcatcccaagtcatctcgctggaggacaattaactcggcttcaaaatggccctcagcctggagccaagatttaggagcaagaccgtctagttgggagagaagatgtttttggagagttgaagacttcttgaaaaagttcgaaaagttcttgaaaaagcaaaggatgcttctttcggtctgggagagggaaaacctctcccagggcaaaaggaactaagaccaggggtgggttaaaaaaaaaaaaaaaaaaacctttcactcttgtagaataagccaggagccggcgtgtggtagacttctgggcctgtttcccgacagctggtttcgtttagatttttgtgtgattaactgacatcttcctgttcctttgccacatgtatctagcaagcctcttttaccttataagggaaatcctttgtagcgtgtggaaggctttgattgcaggaaggggtggaacccaaaatgactcggccgtgactagcagtttttcaaaaatacatatatatgtatgcatgtacagatatgcgtgtatctcccaactccagacagctgaaaatctgccaaaagcgttgtttgccaggattcagaatttcccacataagggctactcacttcttaaaagacaactcatgaatcaagcacctctgtttgatctttaaaatcaattcctcgactgctaatgggtacacagttttttgtttgtttgtttgtctttggcgggttatgaaaatgtcctggaattcgataatggtgttggttgcagagtgtttttgcaacatcagttcctggcccagttactgaaggtggtaggaggagttaagatctaggcaattaaaaagaatgaaaggcacccattcatgggaaggcctcagtgacgtttcttaagacagtttcatcagtggttttcacaattctctgcatttggtgtttcagaggacactgcaatacgaaacacctgtgggagtgccctctttctgcttctaggaatctgaggctgagaaaccttcctgactctatttgtgtagtttttcggccacgttagcctcattctatttttttttcccccagtatgaactcagggcaggagagggagtggtttcctaataatttttttttttgagacggaatccagcctgggcaacagagggagactccgtccccctgcaaaaaaa

SEQ ID NO: 590108 - DNA, 635 bp, Homo sapiens
cgcaggagacgatccaggagtacagatgctgtgctagatttatcaccccagccgcatcttccagcctcatattgccccttggtgtcatgatcctccctcagcccttatatgagacatgctccagaccaagagaatctggtccggagtaccttgcgttacctgatcctggtagagaaaaaaaaccttctctctccctgggctgaattagaaagtagcagggaagaactctgattggccaggcctgtttcctgtgccctcccctgtgacttagtagaggtggggcctgatgctgtgattgacagcctggttaatcggctaaactcagtaggcgtgtcccatgcaccacaaggaattggggaggaacaattcccaaaggaaggaggttgctgttagcagaagaaaggcaaaacaacctgtgtccacatcatccctcctgccacctctggccctgtgctttcactgcactctgcacacacccccagcagaccccacccgagcttccagggatgatttgggtacttgggtatgggtgactgtccctgccactggacgatgaagtcttaaagggccaagactctggtcaccttggctctcccagccctctactctgtccctgatcataaactacttttgac

SEQ ID NO: 590109 - DNA, 366 bp, Homo sapiens
cttccaagacactcaaataaaagacacaagctacacaggtccatcggaaacctggggccaggtacgcttcctactctagaaccttacatgtcagagaagagtatgcacacaccagggtttcgggacagtgcctggaacatgccacggagaccttctgcagacttaagagtcttcagagcaagtgagattcatacagacccagagtagccccacggcagttcccgttaggttttgccaccacatatccacgccccaaatttaggggagaaaatgaagaattcaaaacgttctgaatttggtacttagaaggaagcgattataaacgtgttcagaggagttcccgtcatggctcaatggaaacaaatc

SEQ ID NO: 590110 - DNA, 101 bp, Homo sapiens
agccggtccgttctatgattctatgaccattggtcttctgagttttgcatttctagagaaggactgggctgaccatgcatcgatgctgccatcttgaaaac

SEQ ID NO: 590111 - DNA, 1858 bp, Homo sapiens
ccacgcgtacggttctagatcgcgagcggccgccctttgggttctttttataggaacttaaatgtgctttattagggcctattttgtaacaataataaattattcctaggaaacccaccctggccgaggtggctccatatctggcggactggctgagtggggtatacactcaaacaccatacctggcactggagtgaggcgtggcttgaatcgaacactcccgaccctatagttatacctggactaagctaccaggaacagcatcttgagcgggctatgcgacgcagataggcgcgccctcacacataggctgtgtgtgacaacctatatatgtatctaacacgtcgttgagcgacactattagcctatcacctagggtactatggcgacgccactatgcgggtctcgacacgtcactattacgcatatggggtgactacataagtgtgctacacaggactttcaacagtctacgcaccatcaaaacgaaccaggggatctccaagcagacccgtgcagggagcataaagtgcgctccatatgtagacaacgccacacgattgcgctacagtgcacaaagggagaaataaccaacatgtagactcggcacacacaacaacatctgagtccatgagggacgattcatctcacacacatatataccagggaaccatgtgctaccctcaacaaacagcaacaaaacactggttcacgtgtgcactactccaacaatatactagcgctcccccaacagggcgtgcgccatagcactattgtcgagcaccacacgcgcctctgcatcacacgctctcacaccaattgcaccccaccttcaggaaccgaagtacgacactaatccaaattgtcgtcatacacagcactatatacaccaaagatggagcaccgtgagggaggctggattttcacccattacgatcatttctagtggccgcagtccccaccaattcaatcatgcacagggattgcaatccccatcaaacttatctagcgagtgcagcgaatcacaccaaacagttatatcatatactgcaagaaagagaaacatccatacatacacagctgtaatgagagttcacccccaccacaaaacggaccccccaatgtgggaggacaacacaccggcttggaaaagcacaccccaagaggcgacacatataaggcggcccaccgacggcagaccactaccacagcaactcagccgggggtactacccccgtggcgcaggcaactcaccgaacacacccagccaaataatcacggcgagcgcagacacagggaagaactccacccagatgaaaacaacgagacagtcaggacgaccatcgcatcagcactacaagacaactacgaaaggccgatacccactgcagaacacacaacataacagtcatggatacagtcaccccaccaacaactagcagcgcagatagacccacccacgagcaggccgatcaagcgccgacccccaaccacacgtagcagaggaatgcacaatgcggagaagtcgagcccacccagcacaagccgccaacacaacgaacgtaactatgaatacgcacaacgcacacaccgctacgcacagagggtgatacaagacaccacacgaagacaactaaatgtagcgccaccactagaagacaagaaaagaaacaccacaatcgagcacacacagcccaacaagtcagcaatcgaaacatagaatagatatgcacaacacagaatcacacacaacgaagcattctacgaccagccagagcataggtcctacacaagaacagaagcgagcagcaagacccgcagaaatcagacacctacacaagtcaacaacaacactcat

SEQ ID NO: 590112 - DNA, 332 bp, Homo sapiens
ctagaggatcccggcacgtgtgtggctcttgcgggtggctcatgggcggggcgcgtgtgtgtctccttgtgtggctccttgggtggctcgtggggcggcgcgtcgagtggcgcttcgggtggcgcgtggtgaggctcatcgtggggctcattgcgtggctcgttgtggagtgtggcgagtcagctaaatactttgacgccggtcgggatagcgatgattatggtagcggaggtggctcttcgggccacgcaaagagcacccaacgagccacaccaagagccacaccaggccgccacgcaacgagccacacgacgggccccgcaaagtgccgg

SEQ ID NO: 590113 - DNA, 338 bp, Homo sapiens
ccgggtgtagggagtgaggaatgaagagaggttggttattgggtacaaaaatacagttaggtagaaggattaagtcctagtgttcaatagcacagtatggttacaagtgttagcaataatttattagctatcagaatagctagaagatttcgaatatttgcaacacaaagaaatgataaatgaggcggtggatattgtaattaccccgatttgatcatgacacattgtatgcatatatcaaaatatcacatgtaccccacaaatatgtacattatgtaccaaaaaaaaaactaaaataagcagcaaaaaccacttccagctaccacggtgctataacg

SEQ ID NO: 590114 - DNA, 686 bp, Homo sapiens
  misc_feature (4)..(4): n is a, c, g, or t
  misc_feature (503)..(503): n is a, c, g, or t
  misc_feature (579)..(579): n is a, c, g, or t
acanctccttcccgcaagacatcacccttaccgtcaattccatatccctctcgccaaatcggtaagttagcaccacccggcatccgaatgctggccgtatgccgcatcatgcccacaaagaatgctttttccaagaagagttgattccggccagaccagaaaaagctcacatgggccagaacatgaggtcggctttcgcctcgtactaaaagccctccttcaagtagacttgttacgtaaaactcttgccacacaggaacaatgttcccagcagtacgcaaggcaaaacgcagcggtgctctatagggacgtagcaggatgacatgacaatcaaaaaacaagctaaacctactgaaacacttttgaccttcgaggttttttcaatggtgagctgtttcaaaccgtcgagttttccagcctccgcaaatgcaacaactggcgcgaaaatagccttgggcccctagtgttttgaccacctgacgttgacctgtgcggaacagggnagtaaaagcaagcattcgctatgcaaaatccttaaattccgctagaaagcgaaattcgaagtaccactgtggaatngagctttgatcgactcaaggacagaaaattaagaaaattcgccgcagatactccgataaaaaaataaaataatctatttaatcaatcagttacgaaggccgttagag

SEQ ID NO: 590115 - DNA, 115 bp, Homo sapiens
ggacctgtcgcatagtttattcttgctgctgctgattcttctcacgtgtgcgcgccttcctcctgcctgagctccagtatgctttcgtattttgcacctcttgcttgtaccgctg

SEQ ID NO: 590116 - DNA, 892 bp, Homo sapiens
tagtttctttttttaaggtatttcttcttttagttttgtattttttttttgttttggagtttttttctattaatgtttttagattttgttttaggatgttttttggttagttttttattttttgattttttttctatttttgttgggtttaaatttttatgattttggtatttctttagtaatgtttttttttcgttgttaatttggtgttatttttttctcttatttgtgtattctatttttttttttgtgtatattgattcttcgtacacttgttaccgatttgcggtttttttccacttcgtcgttttcttctctttgtctacagactctgaagcatgttccttgcggcggctggctcctacacgcttttgggtagtttggttttatgtcactgtgttccgttagtttctgttaatttatagtataaagttctgttgcaaacgactgctgttggattctgagggtgttgaggtgagagtgagtggaggtagagggatgtgaagagcctgccctcctatatggattcttcagggccctccacatctgaggtggctcattcccatcacacacagattgtcctggtgttcatttcaaggccagtgttcagcagcagcgtttggaaagcatgttctgtgggacccccctgccccgccaacaccgcactccctcctaagcagcagtagtggcttctccatcctgttttctgcaacattctatacaaaactgtgctggaccttgcggaggcatggatcggcaaagagaatacaaatgaaaccccattcatttctctttcagtccaacaactctgaccgcgtcttgcaccattacccctttccacctgtgtattaattttaagttcagtgacgcaagtactcgaggcagatagaat

SEQ ID NO: 590117 - DNA, 278 bp, Homo sapiens
atgtccagatccatgccctgtaatctattccacagatcacggatagccagtatcgtgctcatagttatatgtgatatccatgaagaagattctttgtcgcatgtaaactgttatttctgttacttaaaaagtattgtaagtgggctattaaacttggaatctacttatgttgatgaatgcagtatgttctttttattcaagtatgaacttggagagaagactatagtaatatgatttttaagagatttatgttctacttaaactgtgaattgtactaa

SEQ ID NO: 590118 - DNA, 114 bp, Homo sapiens
cgggatcccctggtagtatcgccggagtgtgcagcacatcacaaaagcaataccctcagcgaagcgcttgagtggtcatagttgacccagtaaaccaatacagaaatgtctgtt

SEQ ID NO: 590119 - DNA, 568 bp, Homo sapiens
cggaatgccaatccgaaggcttcccaaatcagcccgcacatccattctagttttctccgaggggctaattcgacgagggccggagcgctaccggcgaccctccaacatcctaccggccaaactattaaggatctttgtataaatgaatgcggattaccttacttgacttccgggcttgtttttaccctcttatctaactcctggggtactaagtccgaaaacctaagagattaattttatctctaattgttatttgataacgcgcggaatgctagctaggggcggaaacatttttatgcgtcccttttgcccgcgtacgctcttaaaagaatcgatagtaattaaggatccctactaacgccatctctaccgtgacgttaaaaagacgctttgattatccatttttccgaactggtccgttccttggtagcttggattagcgtttattaggttgtaagatgcagattcactgacgctactgtggcgggatgccgcgggctaaataacttaggaggtctcgatatgtaatctcgactctaagagccgactatctagagtcggaatatct

SEQ ID NO: 590120 - DNA, 610 bp, Homo sapiens
aaggagagatgccccaagaggaaccaaacctcatgacactatgatcatggacttctagtcttcgatactgtgacacaatcaatctctgttttttcagccacacagtctgtggtattttgttctggcgagccccatagcctgactgtggatagtctcccagtggtgaaggtgtcactgatgggccaggcagagattcttgttcccagggcagtggctcaggccctttcctgtcttactggcttttgcatgtgatactcatgtcagtaggataccgtcctttattgcttcacatatcccaaatcctacctgtcgcttccaactggaaagggtaagcaccctacactaacgtggtaaaactgcgaatcagggtctaccgctatgttgcactcaggctgacctcataactcctgaccggcaaatgactcctccatgcactgagcctcaccaagatgtctgggaatttacaggacaccaatatagcgggcaatagttatcagcaaagatagcagctgcttggtttgtcttatgaagtttgtgtttagctttgttgtgccatccgtgatactattcttctgcaatcacttttgcctaaaaaagtctctgtgggggg

SEQ ID NO: 590121 - DNA, 547 bp, Homo sapiens
tgggggagacatggtcggcatggagcggagctccgctggctgacccgagcgctggtctccgccggtgagaccctggggcatggagaggtctgaggtacctcggtcgcggcgcgacgctgctagtcgcgggacgccaggcctgaggacgtgagtggtggcgggctccgtttcccgtgaccatgcttccggtgagacggtgtggggcctgagctgatgcgacgccgtcaagggaggtgttcaacggctgccggtgtcccagtggagttcctaaggagcaccgagctgagtgaggtgcacgaatatggcatctgaggatgaacgctggagcaggtgctgagttccatgaaggagaagccaaagttggcatcattgggaagattcataccccgatggagtataagggggagctagtctcctatgatatgcggctgaggcgtaagttggacttatttgcctaacgtgagtaccatgtgaagtcactatcctggggatatgactcgggacaacaagctagaccgtggtgatcattcgagagcagacagaaggg

SEQ ID NO: 590122 - DNA, 285 bp, Homo sapiens
gcaagacgtggaggtatttcatctgttcgtgtctctgggtatggactgtccatgtaaaccccagcataattacatgcagacctactgaatagtcagtgatccatgagttgaacttctactccagaactacatgagaattaagggtatggtggaagcggatctacgtaatatctggtgtaaagacagaatgtctggcatgtggacaccctagagtgctcaggcggagcaagcccatgaagtgcggttcgtatagtccaatacactctgtcctccatcacatcatgg

SEQ ID NO: 590123 - DNA, 1582 bp, Homo sapiens
  misc_feature (145)..(145): n is a, c, g, or t
tggggtagtaggggtggacaggtgattttatcggaatgtgggagggtgatctcctagggggttgtgttggactcccgatttcggtgcacagcaattacggagggtggaggtgcgtgcatagggcgtgcaactacagtgaagggcnaagagtgaaggtgaaaggtaaagaactcggtgttgacggggtgggcacgtgctcttacgtggagttagcccctccctcgagaatttcattgtgcaaccctaggtctcttgctctccaatgtgttgtggggctgtgggcggcaactagcctcacgctctgggtacactccacccgtggggacctctcctcgagcactgtgcctcctctggggcacctcccacgcggcgagcgccccccatataggccctatatgtgcacacggccgcggtgcgcccaacataagactgtgccaccacacacaggacgcagaatacagttgcccagcaacttgtttctcccacgagattccccatcgcacctctcacgcagaacaaacgcgcatctccctggctacacaatactacgcggcctctcggcccccgcgacaactgtgtgcttccggagaacagcacgccgccacccacttcaccacgcacaactcacctgcgcacgcgcgccaccaccacgtgagcgcggcgttcaacccagcgctcatacatccgcacctggcacctccccaccaccccaccacaactcactacccgctctctccacacgatgcgtactccctgcccgccaacccttagcaacagcaccaccacaagtgccccgagacagacaccgtacgtcctccgagtcagaacaccccaccagcgaccacctggcgccccacgcaggaacacacaacacccccacggcacgaccacaacccaccggagaaggcacaaaccaccgacgcaccaaaccaacacaaacgacaaccacaaacacccacaacaacaccccacaccaacgtccgccaacatcctcaccaacaagacgaatagagaacaccagcagtccacaccataaacactgaactctgataatcacacacacacataccaactctcaaagcaacgagcaaacaatattgctcgtctacttgaacaatcacaacaaacgcgagataatcagaagtgcaccgtccccacaccactccacaccacagcagcactacacgcacacatgccactcggagctacctcaccataaccccaaccaccctgcaacaccccacccccaaccacccgcccaccctcctccatcccagcctcacacaccacacaacaacacacaccacaacacactaaacacacaaaactcccaaacataacagccatcccaccaccttaacacataaccactgccacaccttatctcccatcatataacttctccccctatccacccacatcctcaacacagaccacaatacaacacaacaaaaacatcaaccatcactacacaactacaactaaaacaactcaacacacatccacaccaccaacgcaaactaaacaaaatatctatcacaccaacatccatctctcactaatatatactcgacatataccc

SEQ ID NO: 590124 - DNA, 396 bp, Homo sapiens
  misc_feature (11)..(11): n is a, c, g, or t
  misc_feature (25)..(25): n is a, c, g, or t
  misc_feature (40)..(40): n is a, c, g, or t
  misc_feature (61)..(61): n is a, c, g, or t
  misc_feature (125)..(125): n is a, c, g, or t
  misc_feature (176)..(176): n is a, c, g, or t
  misc_feature (185)..(185): n is a, c, g, or t
  misc_feature (231)..(231): n is a, c, g, or t
  misc_feature (241)..(241): n is a, c, g, or t
  misc_feature (260)..(260): n is a, c, g, or t
  misc_feature (288)..(288): n is a, c, g, or t
  misc_feature (296)..(296): n is a, c, g, or t
atatttgaacnaaatactgccccanaaacttcacaaactngaatttgggaaattcacaaanatgtggaaattaaacaacacactgttaaataccccggatatcaaagagaaatcacaaagtgcantctttgtagttgttagaaaatcaaagaaaggccccaggcgtggtggcttanacccgtaancccagcactttgggaggctgaggcaggtggatcacctgcagtcaantcaagaacancctggccaatgtggcgaancgctgtctttactaaaaatacaaaaaantggctgancgtggtggtgggtgcctgtagtcccggctactccggaggctgaggcgggagaatcggttgaacctgggaggcggaggttgcggtgggccgggattgtgcc

SEQ ID NO: 590125 - DNA, 356 bp, Homo sapiens
tgtggtgtccgtccatggtcatcttggaagctgtgggagtctctgctttctccctcctcttcctcctcttctacactttcttcatcttcttcttcctcttcttcctcctcctcctcctcttcagggtttgctattacttctatatgaactgtgtttccttctacttgttctgtctcctcatcactggccatatcgttcccaatcatccaatcaagactgctcagaatcttcttctacttctggttcaacaggaggtgatgtctcttcctttgctggtactccttgcttgggttgcattgccgttgactatgactgacattggattcaataaacaaccagattttccgtatggatgc

SEQ ID NO: 590126 - DNA, 158 bp, Homo sapiens
cagtacggatgtgctgctggactgcgccaggcgtatcctggcagagggaggggccccgtgccttctaccgcgggtatcgtccccaatcgtgctgggcatcatccccgtagtgcgggcatccgacctggcacgtctacgaagacatctgatggaaactg

SEQ ID NO: 590127 - DNA, 1184 bp, Homo sapiens
gtgctatgaagtggtgatgaacagtatgatccaccagttggatgcacctctatatcagtaacaagattgcacccaaagattatagagacaactggagttcatgtttcagacgtatgtatgagcacgtggggagcaacgtgctaacagattatcgctcacccatggagtgaacattatggataatcatagtcagcactgcaaaggaccactggcactcatgtaccaacacaggttactgaagatcgtgtccagtcacacatccttcacaaactttggaattcaggacagacaaacattcaaagccatcttgacacacagtatcttgcgctgaacgctacgaagggcaactctacatggcatggcaactgactatgccagggccatgatactcaggcacacacacaactatgcacttcgtctcaatggcaggcagtactcctgttgctcacacacaaccactagctaactatcccgcctcgacgcgcaactcccgccaccacctacgtactacccggctccacacacccgcggcacacactgtcacgcacacgccccaaccactcgcgcaggaaaccataactggaacactcggacaccaagacgagcacctacacgtaatcgcttcagcgaaattctggttcgcacctccctcccgctcctcagggcccacctctcccacgcatttgatctccgataccctcaattcggcgtacatcgacacgccccccactaacaggttcatatctacatccgggcaccaatttttggtatacacgacctccggcgtacgccaatcgcccctttcgcatcctcccttacaaccttggccctacaactcaactcccatctccggcgtcttatcacctggacctccaactttcaccaccggcactcctcacccaaaatccgtaggcccacttctctagccttgtcccacaatcacctcagttcagtataacggaaccgcatgcaaaaccaccctccgccctgctacaccaatatgtcgccctcgactcttccgcgttagtaacttatctacgtgggcaactagctcctgctccatgcctcagctacactcacgctcctgtactgccctcctaaacattcccgtcatcaaaccacaataagattatgtgcagccactgactcatctcccccattaccgcgcttccaacagcaccagc

SEQ ID NO: 590128 - DNA, 1012 bp, Homo sapiens
gaacaatggctaggatcaggccttgtttaattggacgaggactgctccccgctgcgcctcgccatggctggcggccccgggctcatctcggtgttctcgagttcccaggagctgggtcctggccgctagcgcagtggtggcccagcgcgcagcatgctgactggcagttggtgcccgcgcccgtttcgcgctcggttgtcgggctgggagcctcgtctcgatgctagcccggagctaccctgcgcgtcgccctgcgggccagtagcttagcgctgctggacgcttgggcttctgcgacgagcgcctcgtgcccttccgatcacgccgagagcacggtactggcctctacctggacgcatcttctctccagactgccgatcccagaaatgccaggtgatcaccattaaccctgagctgcctgtggaggaggcggcttgaggatacgccaagaaggctgagagcaggcattccaaggggatccatcccggtttacgacctgctgatcctgggggtgtggccccgatggtcacacctgtctcacatcttcccagacagcccctcctacagggagcgggagaagatgtggtcacattcagtgactcaccgaaggcaagcgcacagcgtggttgaccctcatgctacctgtacctgaatgcaggacgaactgtaatctaatgtggcaactggacgaatgcaaggaagctgtctgaggcgcattattggagggacaggaggaacaaccgatgcctgacgaactgttcagcgccgagagagggaaaggtagcatgttcatatgacgaggaggggcagattcattaacgtgccttgaaagaatcaatttaagtggcagaaggcgcggagtggacatgtaggggccatggtatggccgtgatggcggatatcaggaattataaaatcagtgtgagatatgaagacggcaggaaagaacggaaaaaagtaggagaaacgataaagagtcgaaaaaaaaaaagagaagaaatatagaaaaaaa

SEQ ID NO: 590129 - DNA, 331 bp, Homo sapiens
  misc_feature (39)..(39): n is a, c, g, or t
  misc_feature (47)..(47): n is a, c, g, or t
  misc_feature (52)..(52): n is a, c, g, or t
  misc_feature (67)..(67): n is a, c, g, or t
  misc_feature (73)..(73): n is a, c, g, or t
  misc_feature (184)..(184): n is a, c, g, or t
  misc_feature (246)..(246): n is a, c, g, or t
  misc_feature (271)..(271): n is a, c, g, or t
  misc_feature (288)..(288): n is a, c, g, or t
  misc_feature (300)..(300): n is a, c, g, or t
  misc_feature (329)..(329): n is a, c, g, or t
ggcagcctcgtacgggacacgatcgccagggtgcacggnaactttcngcgcncctggctccatcggncttcgngggttcgatatctcaatgcctatacttgaatagtgctacttcgatggcaggaaaagaattctattcagcttgtgtgggtcaggctcttcccttcatcacatactttggagnaacaaaggacaccgttgacccatggctttttcaacacattaacatgtggggagggtacaatnaggaacatgttcaggaagttcctantttcagttacaacaggnggacagctgttngatcttgtttggcaggaactgcactggangg

SEQ ID NO: 590130 - DNA, 255 bp, Homo sapiens
aacgagggaacaccatctcccgggataaagagagttgccagccgcagaccaaaggaacttgtggtgttgcagagagttaatgtgtttctaagataggataatcaacacataagatttgtgaaaattgacctgctaatttgaactgcctattgtggctggacagtgtcattggggaaatatgcctgagaggttaattaaagatggcactaaacgacattcacacgagattggatttcatattaactcaatatttga

SEQ ID NO: 590131 - DNA, 240 bp, Homo sapiens
acttacgcagataagagtatgtctgtttgagaaggaagcatcatgtttactcataaaacacaatttcattccttgggaatttttctctctgctgtgtgttaggtaagggctgcagagaaataaaggtacctcacatatacacacctgaaactatctgcagtgtccacaacgtatcttgttattattccaaattagattgtgacttaaatctcgtaagttgctccggggtacggagctcga

SEQ ID NO: 590132 - DNA, 86 bp, Homo sapiens
  misc_feature (3)..(3): n is a, c, g, or t
tcnccactgctcaaaatgtaatgcaaacatgaactgacttagttttctcaatgttcaaacttgaaataaaataaacattttgttcc

SEQ ID NO: 590133 - DNA, 119 bp, Homo sapiens
actgttgtataaatttgtgctggtgctgagacaagattgcggtaggtcagtctagagcacgagaagcagaatctggagctcaagcaccatgcagaatcctagcaccagcacgaatccct

SEQ ID NO: 590134 - DNA, 1199 bp, Homo sapiens
tgtgacgttttaaaaaaatagagagaattaaggcttcccaaaaaagaaatggggaggaggcagatggatggccgaggtgtggggtctgggaggcaagtttggccgtccgaaagctcggggtcccgggggatagacacgggtctcgtgtggcgcaggacacagcccttgcccaggctgtcgcccatctaccggtctgcgctgtacccaatggggcacagttgtgtcaggcccagtctggccaagtggagagggccaccgatagtggcagctcctgaacctcgtgctgcgagaaaccagggcgcgcggtggcacaggctgtggcccgcaaaggcctggcagctccccccacaggcccacgtgcccacagcgttccagaagcacccagaggcagtcggctctcagcgagcgcaacactcgcgcacacctcgtcgctgtgagcacgctacgaactcccggcgtaccacatcggggtgattcccccaatcatgcgggccccctaccacgcggtcaccccccccaccttctgtgatcgcgcatcccgcgacggaccacgcacttccttcccagaacggcgctctccggtccacaggacgcgtactcccccttgctccatacgtcgctcccactgcggccacacaccactcgcgcacacgccactagaacacccccaaaacacacgggcggcgacacaccactcgctcggcgccaccacacgtagccccaactactacgccgacgccccacccaccccaatgacacccccctcactgcctacggcaacaacgcgagggtctaccaacccgcctcgccccctgacaaagcgcgcggccatcacgccacaacaccacaagtcccacccccaccaccacctcgcgtatcgtcattctgatagctgttgtttcgagcccacacactgcgatgacataggtcttcgagatggtgacaaaaacccctccctcccttatcggctgtcccccctccatcaccatgatctcgcacacttgtgatccaaacaggcagagaacctctctctctgttgtgactccacacaactctctccctgttctgatcaatttcaattgctcctcagcatccttgtacactctcacttgatctctatgactacaccgtgcctgtgtcgctactgaaccacgacgcgccgctcacactaacctcctccaatctatcttcgtgccccc

SEQ ID NO: 590135 - DNA, 882 bp, Homo sapiens
tgccttcgtgagctcgagattctgtacttgtaccaagtgtttgtacgaaacatgatccgatcactctcttctcagatatccgaccgacttcgcgatacctctcctgatatgtatccgtccgggcatcatcttttcgcgtcatatccttcttctgcggaccttgcctataacgcgaattatgggggttaagttcgcttttattgagaatctagccagtgagctcccagattcgggcagaatttattccactcgacgtgaatggcagccgtatataggcctggacaatttgtatctgcatagacttatacaactagcttctctctggggttctattaccgactcgtgatgatcgtggctcttggaatttgcgtagagcacacttatatcccggaattgagccgagcagacgcgcgagagtaatgagcgtctcctgaagatgataaacagcgtggtgacgagaacttatcagcgaggttcaagaagctaggctgaacgatgccgtggggtaaaacccctgatgctatgaaattctgtcgatgcctatggaataaaaaaagttagagaccagggccccttgcgggatctttcagtgcccctgcagttattggcccagaaaggatccccattctctgtgatatcctgcagaatcattcctaaatgaggcagtgaacggtcatcgagagattggttgcactctggcaactaaccagggtgttgccccgggttaggtggccgaattctccagaaggtacctctaaagagaaaaagctttgtacccgaatttgtcggccttgaagataggtgttgcaaccctccgccacaaaggggtttatctcccagctggcccggcacttttgggacaaaaaaaatgtggggcagaaa

SEQ ID NO: 590136 - DNA, 260 bp, Homo sapiens
tgctcggtaccgtatctctaacattacggaggtataatcaacaggcagaagctgtacgtgtttaaagtgtgagatccaacacttttttttgtttagttttgacacggagtctcgctctgtcgctcaggctggagtgcagtggcgcaatctcggttcactgcaatctccgcctcccgagttcaagcgatcctcctgcatcagcttcctgagtagctgggattacaggtgtccactaccacacctggctaatgttagagata

SEQ ID NO: 590137 - DNA, 160 bp, Homo sapiens
  misc_feature (155)..(155): n is a, c, g, or t
tagaaaacaactgtgtttaatgacaatcctcagtttaaaaaaaaaaaagaagaagaaggtttatacacactgtacacacatttacaaatggctttggaggatagcagtctgcgaaaagggcttcaggaggaccagcctgggcaaggattgaggtntgttc

SEQ ID NO: 590138 - DNA, 1088 bp, Homo sapiens
  misc_feature (655)..(655): n is a, c, g, or t
  misc_feature (825)..(825): n is a, c, g, or t
  misc_feature (871)..(871): n is a, c, g, or t
cctgctgtggcatgaaatcgctttaagcaagaatagcgaaggaatttcgcagagctgagagatcaagcgcctgataaagaggttgtgcaatagatgatgctgtacgataagggctagggagtggaaggttatctataacaaagcaagagcactatcgacagaggaatatgaggccccgatagtacagcatacctgagaaattccgcaactgagcgaagggactggcccacaagaacacatgctttggcaaatcgtgtcctcactgtacctctgcgacgcaactccgaagaatcggcggatgcgtgccatcctagaatctcgatggaggtgctagtctagatccgtgccatgttgacgcccctagaaacgagttccgcaaacggatgtatgccaccgtattcattcagccatatcctgctctgagaatccttcccaatttgtgtaaccctttgtgctggaatgtcttccaatcaataacggacttttctgaattttaggatcatttagtcgtggaaaggcgaggttttggtcatgcacgcaccaagtaattttaagtgttggcctacttggggggggcgataccccctccgaaatttgcgtttggagacgtacgattgttacatacttcgaataaccctaagagtgcttaatcganatgagcggtcggggttgtattcgggcgaaaatattcaaaataaagtgaagagacgacaagtttgtcttctttgaaccagaattagaacgccgttatgcacttgtgacctgccgaagtctacctttttgccgatacctaccccacagggccacatctatcttcctggcaantgcggcaaggcatttggggacttccattgcattgatcctatgactngttcggtaaacatcctgtcttccaaacgatgtgccaatatataccattccatgttgggccctttctaatattacgtcttcatgcccatcgtatgtgtggcaattggctgaaaaaatgacccaccgctttgcgtagaagggggcggaaatatctggtgacagggcaggaaccagatcaacaggtttaattgaggaagaatgacgttaaggcgtctaca

SEQ ID NO: 590139 - DNA, 1476 bp, Homo sapiens
ccagtgttgcgaaacaaggggtttttccacagcgacaaattgtttgttgcacacagagggggccactaaagatgttgtgttgcgtgttgaagcaagagggtgctggaagaaaacaaccggtggaagattgttcacacaccatccttgggcaagattttattggcttgtcgttcaggcaattttccgggcccttcccgttcttttaaggggagccactcacccggagttttgttgccacgcccctggggccagatgcctctcttgggtaagtacccaacggatgaaaactttaaaattatagtcgtgagaaagatggaatccccggaagagcactgcccctcgtgcagaacgtaaccgtaggggtgttgttgtaatccaaaggccattaaatgggaacagagttcgttgtgtgtaaaggtaagaaatagtgttgaagagccaaggacgaccattgttggcgctggtgcgactaaatgaaaaggttccctgcctgcgcttttgagaatccaatgttgtgctccctgttgtggacgccaaatcgaattgtggttgagagaagggttttcttcttctcgtgaaaataagggggagttacaattagtataaagccgcccaatattagaaatgggggaaccagaatctcctggccaatcatatcaccgggaaattgtttttgtcccgtttcgccagtaaacgatactccatgatagaatgattgttaccagaagctttggaggtgggaggggtaattctgctctgatttcaccctttgaaactgctgcaccagtgaaacattacttttaggcccgtattaaagatcccccttacctttttttttttttttttttttttaaagaaaaggtattattttccccaaatgaagcaaagcaagtactggggcggagtcatcagaaataccttgggaggtggtggggaggggagtcgaaagtcttgcgttttccatcactggtgcacaaagaactttcccaggaatggccagtggcctttcgcccgtaacaaggccgcacgctcagagcagtcttccttctgggctgggtggacccggaggctccaatgaaagcctgctccgggaccgcttggctagcaaggcaccccgaggacaggacgacggcgagtatcagtcgtggcttcatacttgtgattaatgcccctcttggcttcttggcccggctccacaatccaccggagattggcccgaagcttttgctcaaatggggccatctgcttttaaaccgaaaggcttatgcctgttattaccgtccccggcgggtcccccctgcactccgacgcccgttgctaacccaccccaagccccttgcccaagccccgggccgccaacctggtctaagtcgttcgcgggcttccttttttgccccacatttccgggttccggcctttttgagggaacccttagggttaacgtggattagggacaacccttgccctttgcccccc

SEQ ID NO: 590140 - DNA, 143 bp, Homo sapiens
cccaacatgcacaggaatgctacatgatggccagctgcttccctcctggtttctcatcccagggccagctgctcagtacagcaaaggtggggcagggcatgcattttcagtcaacatccatgggggcattttcattggcattt

SEQ ID NO: 590141 - DNA, 819 bp, Homo sapiens
  misc_feature (555)..(555): n is a, c, g, or t
  misc_feature (567)..(567): n is a, c, g, or t
  misc_feature (593)..(593): n is a, c, g, or t
  misc_feature (595)..(595): n is a, c, g, or t
  misc_feature (597)..(598): n is a, c, g, or t
caggctcagagaagacagcacaggctgactggaggaaattcacaaacactgaagggcatcgtactacaagtttcttagttgttagactggtattctattcatcacactctgcttctaaaaagtaaaagcatcactttctgtgatccaggtcatttcccattcatgttatcctatttgaaccaacaactgcaaaggtgagcagcctccttttatggagcagaaggccaaagcttggaggatgtagattattgctgaaggataccagattggtggcagagtctgaattccccaggacttaaccatggtgtgtccagctcttcttacagaaactctcaccatggccaatgtcagcacaaggctgaggcccttactagagtcaggtcattgttggtgatcctttaccccaaatctcagaatctcgagatttgctcagaccctgtgacatcatagctaccctttaccttgtcgttgattcttcatttagtatttcttttctatagttaagttcttgtctctcccttaaaaaaaaagatacacacacacacacacacacanacacatatatanactataaatatattggttgtatattntngnngttacaaaggggctcaaaacacccaactatatgagcgctgtgatctattcttctgtgcatattcgtgtctgtcatatcccataaatagaacatttaggacacttcttttggcaaataactgaatattctcctggtgtgtgaaatatccgttacgggcatcacgggtgacgatgaactcttgactacctgccatattccccggttggattccttcaagaaca

SEQ ID NO: 590142 - DNA, 117 bp, Homo sapiens
ctctgaccagcaccatggcggttggcaagaacacgcgacttacgaaaggcggccaaaaggggagccaagaagaaagtagtttgatccatttcctaagaaagattggtattgtatggt

SEQ ID NO: 590143 - DNA, 484 bp, Homo sapiens
  misc_feature (37)..(37): n is a, c, g, or t
  misc_feature (472)..(472): n is a, c, g, or t
  misc_feature (476)..(476): n is a, c, g, or t
aacccaaatgtccatcattggatgaatggataaacanaatgagatagagacatacaacagaatattattcagccttagaaaggagtacaattctagctcatgctccaatgtggatgaagcccgaagacatcataagtggaataacctagacacaaaaggacaaacactgtatgattccacctttgtgtacctagaatagtcaaattcagagagacaagaagtagaacagtgattctcaggaactgtgaggaggggaaagtaggctgttatgtttaatgatttcaaagtttgggatgatggaaaagttctggatttggatagtgatgatagttgcacaagaatgtgaatgaacttcatgccactgaactctacacttaaaaatggttaagatggtaaattttatgtatattttaccacattaaaaaatgaatggggtaaaattctacccattcctatgaaaagatttcaaagntatnattagggt

SEQ ID NO: 590144 - DNA, 349 bp, Homo sapiens
gacaactagactctagtcggatgataatcttatgacctctaaccagcgtcatattactctgttgccatataattggatactactatactttgtcacaataatcctgactgtgacagaagggctcgttaactcctcatctgatgatggtatgcactcacattctgagcgtaacataattgcagtaccgagtatgacgattgtacaatcgtcggatgttcatctctacacactttactatctgtaggtatgtacattgacagcattagatcattctatattatgtcatctgatcccgacacctgatgagcataggcattgaccgtcagccttggccgtcattatcttcctg

SEQ ID NO: 590145 - DNA, 1556 bp, Homo sapiens
  misc_feature (254)..(254): n is a, c, g, or t
ctcctctagtagaagcttgggtagctcttgtggaggcagaccaagagggaatggaagtggaggagatcaccacttcgagctaacacaccaccactgtggggacagcttttgtagagagaagagtgttttcttacttgctgcatctcctgccacacacgagggtcgttcctatagagaggtttttggtgctcactttgcttgccaccagcacccaacagcgagaagtgtttggggggagcacgccaacaacaaantgccaaccttctgtgaggagtctaccagattacctctttcggtggaagtaactactggtggagagatgttgtggaaaaagtcttgtggtggtgcttcacaaagagttgggggtttctttttgtcgcgcaacatgactcttctcataagagggccctctcctctctgtggggatctcccacgaagtagagtttgtatatagaaaggtgatatagtgattgggcatcaagaccacacacacgagggggaggttccttagctgcatgtatcgtcgggcagcgcccataacacatcatcagtggggagaagatgtgtagtaaaaaattcgtcgtgcccagtagagataataggtgtccaccacaacagagccaccacatgttattatgggtcctttgccctcgtcattgctcctcccgtggggagagaatcttcttggaacacccaacacagtgggtggtatacaacgaagcagccagcgggggggttcctcctctggggaaccacacagggcgctgccacaacagatcagaaaagggtgtgctactaggagaggagagttaatttactcctccttggggatgagggtcttcgcacaacagctacaaggtgtccacacgagaatggtggtttctcctcttctcattatagagagagagtgtcgtctgtggacaatctcactttacacgggggatatgtacgcttttctctctgggcggcactaccgccaacagtgtctcaacacacaatgtgtgtgtgcctgtgtgagagagatatgtagaggcgcaaccccacaaaggcgcaccacgtgattcgcaccacacacaccctcacagcgcgcaaatctccggagagagaatgagacaccctctccaagagagagaaagaagacaccacactgtctcacacacgcacactcaagagaaggagcactcctctctgcgaacacacacccaagtgaccctcggcacaatgcgccacaagcacacccacgggtgagagaggcgcacaacacgtggggcacggaaatgaaggcacggcagagattgccaccacgggattggatcccccgaggccaaggaaatatgcggcttgaatcccaagaactctggcccccgaggcacaagatttaaaggtttgaaggaaaacattttggcttttgaaaccaaatatgagaggccactctggatattcacaagtgggtttttcggggtcccagacaaaatgctgccctcccccgaacactggccaaaccccacactttggctgacgcatgccccaattatactgagccccccacatccata

SEQ ID NO: 590146 - DNA, 176 bp, Homo sapiens
ctgtccttgctcatcacatacacatgactttatacatgcgtgaaaatgcccatccagcgcgtcttcccgagaatgaacataacagatgaaagttcatagatcaaggaagttcttttcaagtccagataccgagatcttttcagttccactaataggtttcaagaagcaggaactgg

SEQ ID NO: 590147 - DNA, 1187 bp, Homo sapiens
  misc_feature (77)..(77): n is a, c, g, or t
  misc_feature (197)..(197): n is a, c, g, or t
  misc_feature (274)..(274): n is a, c, g, or t
  misc_feature (361)..(361): n is a, c, g, or t
  misc_feature (393)..(393): n is a, c, g, or t
  misc_feature (560)..(560): n is a, c, g, or t
  misc_feature (647)..(647): n is a, c, g, or t
  misc_feature (843)..(843): n is a, c, g, or t
agggctgtggaagagaacaaggctactagagaataacagaaaaataaaccaagaaagcagaccagacaataagcganaggacagaagaacaccagccacagacggaactcaaaggtactgtgtcgctcgcaggagtgtcgcacccgctgggctcctgcctcgctgcgcccacaagttttggtgtgaacgagcaggcngtgaagtactctcccgggacgtgccttacatgaaactggtcgtcagaaaagctctgagtacacccgcgctgctgcgnaccagcatggcccgccaccgttggaccccgtgcgccctgcgggcccgtgtgtttctcgcgtcccctctccggggccccatgtggccntcgccgtaggtggcgccgtgtttaatgggcgntccccaccgccggctctcaattacaagtcaatcggttctcgtgtgggttggtgaaaagcacaaccatgtggcgtcgccgcccgttgtctcgcgtagaacaccctgtggagcaggggcccccaaagtctgtccaaaggttcgtgtggggggacgcatgccccacctgnttatatatggggctgccctcgggccgaaggcccactcactcgggtcgtgtggcagcgctgtcttgccacaagcttgagcaacacccnatggtggaagccccgcttgtgcgtgcttggccgataatccaggaaacccaacacccgggcggctggagggtgtcaacacaaagccactgcgggcaaaaagcacctgctgggcagtgtggcaccagagtgcccccaacagtggctccgccacagatcttccgacagggcgcccaaggcgaatcgttgttcgccgctncgaagcgtgcccccgccccgcaccacaataacacgaggcggtggaagcaccggcgttcgcaaaaaccaggtgtgtgtcaacaacgcccactcatacaatgtatgcaatttacagaacaggtgtgttgacagagacacccaaggctttgtgctacctccctcagatagaacaagcataaacttttttgagcacaccaccagtgtttctatctctgtttcgagcaggcacaggttttcaaataactagctatttaaaacaccatcactgtgtgagtcaggacccagggccccccaaatggtcgaccaaaatgttagaacccatacaaaaactcaacaaacataaca

SEQ ID NO: 590148 - DNA, 953 bp, Homo sapiens
aacgcagcgacacacgcggagaggagaacggaagactcagaccgggggtgacccgccggtgtgctccagcagaaacagggcccagtggaagaagaagtgccgggagccccggagttgtccacaggtgcgccggccccgaccgtgcttaaagcgggacgcgtagaatctcacagggagcgcggtgaaaaaggccaacgcgatattcagaagggtcttccagcgggtgaccgcaaaaaagtcggcatggccggaacaggcgcgtccccgcctcgctggcgtgcggccagtaaagtccggagccaagcagcttccgagcgctcccccagcggaatcatcctaaagcaaaggccccccaagaaaatttcttttttagcttgggggatctctccgatcaaaagaggactcctttttgtgcggtcgcccggcatcagcgccatgttaggggtttaacaacagaggaaacagttcccgcgaatgttagagaaaatttgataccgccctgctgaaaaggttcgcctaccacatagtccttccccacgttcggagtggtatgtcagcaaaaagaaccacagccccggggtccaacagaggaaaacccacatcaattgaggtaattctaccacaaggggtgtctacaccctcgttttaaacaagtgtacatgccagggggcaccttgtcttacaagacgctgttcaataacattccaccccccaagccgttcatcggatctctcaaatggccacaacgcgctagtgactcacacggccccggaataactgtcgtgggacccttatcaggcgacctttgcccccagggcaaaccccattggtagaggtataaaagagggtttgtggaaaataggggcagggatataactttttgatatgagaacgttagttcgttcgcaacagactctgtattctccaccaccgtccaacaaacgaacataaca

SEQ ID NO: 590149 - DNA, 894 bp, Homo sapiens
gctcactgcaacctccacctcccaaatcaagtgattctcctgcctcagcctcccgagtagctgggattacaggcatgtgccactatgcctggctaatttgtatttttagtagagacggggtaggctggtctcaaactcccaacctcaggtgatctgcccgcctctgcctttcaaaatgctggtattacaggcatgagccaccgtggccggcagtatgagatattttatcttttttttgagacggagtcttgctgtgtcgcccaggctggagtgtagtggcgcgatcttggtcactgcaagctccgcctcccaggttcaggccattctcctgcctcagcctcccgagaagctgggactacaggcgcctgccaccacgcccggctaattttttgtcttttcagtagagacggggtttcaccgcgttggccaggatggtctcgatctcctgacctcgtgatctgcctgccttggcctcccaaagtgctgggattacaggcgtgagccactgcgcccagccgagatatttgaccttttttaagtctatgttgtaaatggtgaataaatccaaacaaagttggatatatactttaatacatttactttatacgatttcggctataaccaaaatactgattagtatgtcattcctaaaagcatatccttggccgggtgggggctcatgctgtaactcccccttcgtagccagtggagctggtcgggggaggagccggataactgggcattaagacccggctcttttacacttgcgccacacggggcacattacaggcgcccgtgcacctgcggacacaagcctcgtggtagggtgaacatccttcggggacttcgaaccaggcgttttcaccacacagggcgccaacgccgctcacttga

SEQ ID NO: 590150 - DNA, 389 bp, Homo sapiens
tagtccaatgacggtctggctgtcaggtgtgaccaaggcatgtccactcgcgactgaactgacacatgggggatctctgacgaaaccaccacagggacatgtctgatgggcacagggtctcccaaacccagcggcttcggtctgtcctcagcccttgtccctgtttatctgcagccaggagacttgcaagggataggagattgacagcagcaggactcgtgcgctgtttggtgtcagcagaggatttgtgtatcacaggtcaggcttcagcgtcctctcagagtgtagtgccgggtcctggtgccacgctcgctgagcactcaggagagttcatcagcacagaatcccaccggggcctcctctttagcaggaactcacaaacagcttgg

SEQ ID NO: 590151 - DNA, 267 bp, Homo sapiens
ctctcttactcgtgttgcacgagactatggcatcctttcttccttacttttacatgtgactcctgtttgacttgatactctcatgtattgttatattcaagctacccagcggacgctacacgctgcatgactattctcgtcctaccttcctgtgcacgggatgatgatgctatattttcttctgactaccacatatttggcgagatacacttatacgcttttcagtatctaacttcttcctctctcgctatctatacgctacacttt

SEQ ID NO: 590152 - DNA, 695 bp, Homo sapiens
  misc_feature (27)..(27): n is a, c, g, or t
  misc_feature (145)..(145): n is a, c, g, or t
  misc_feature (197)..(197): n is a, c, g, or t
  misc_feature (199)..(199): n is a, c, g, or t
  misc_feature (201)..(202): n is a, c, g, or t
  misc_feature (220)..(220): n is a, c, g, or t
  misc_feature (228)..(228): n is a, c, g, or t
  misc_feature (230)..(231): n is a, c, g, or t
  misc_feature (234)..(234): n is a, c, g, or t
  misc_feature (238)..(238): n is a, c, g, or t
  misc_feature (243)..(243): n is a, c, g, or t
  misc_feature (247)..(247): n is a, c, g, or t
  misc_feature (250)..(250): n is a, c, g, or t
  misc_feature (258)..(258): n is a, c, g, or t
  misc_feature (267)..(267): n is a, c, g, or t
  misc_feature (272)..(273): n is a, c, g, or t
  misc_feature (298)..(298): n is a, c, g, or t
  misc_feature (302)..(302): n is a, c, g, or t
  misc_feature (317)..(317): n is a, c, g, or t
  misc_feature (323)..(323): n is a, c, g, or t
  misc_feature (325)..(325): n is a, c, g, or t
  misc_feature (328)..(328): n is a, c, g, or t
  misc_feature (335)..(335): n is a, c, g, or t
  misc_feature (337)..(337): n is a, c, g, or t
  misc_feature (348)..(348): n is a, c, g, or t
  misc_feature (355)..(355): n is a, c, g, or t
  misc_feature (360)..(360): n is a, c, g, or t
  misc_feature (363)..(364): n is a, c, g, or t
  misc_feature (382)..(382): n is a, c, g, or t
  misc_feature (384)..(386): n is a, c, g, or t
  misc_feature (388)..(389): n is a, c, g, or t
  misc_feature (395)..(396): n is a, c, g, or t
  misc_feature (398)..(398): n is a, c, g, or t
  misc_feature (402)..(402): n is a, c, g, or t
  misc_feature (404)..(404): n is a, c, g, or t
  misc_feature (424)..(426): n is a, c, g, or t
  misc_feature (428)..(429): n is a, c, g, or t
  misc_feature (467)..(467): n is a, c, g, or t
  misc_feature (470)..(470): n is a, c, g, or t
  misc_feature (480)..(480): n is a, c, g, or t
  misc_feature (523)..(523): n is a, c, g, or t
  misc_feature (533)..(533): n is a, c, g, or t
  misc_feature (555)..(555): n is a, c, g, or t
  misc_feature (562)..(562): n is a, c, g, or t
  misc_feature (613)..(613): n is a, c, g, or t
  misc_feature (686)..(686): n is a, c, g, or t
cctccctattaggcctggggctgttgnagtcgggtgttgtcccctctgtgctgctcctggttttgtctcctctcctatccttgagctccctgatatgcaacatggggggttatcagtaggggggggctgcctctgttggggctanggctgggggtgggggcggtgtgttgggcaccttttgcggtcagcccagccanantnnatcgccagagagaatgcnaaagtgtngnntgnatgnaattntgtnggnaaatggtnaatggtggntgggnnggtggctttttgcatgggtggtttntatnatgtgaaggggattntttatntnagnagggggnanaggggtatatnttggctnaggtnatnntgccagtcaggggaagcnannntnnagggannanagantnaaagtggctgtggtggggannnanngcctgggttgggtgttgtcaagacactgggaggtttcnatntgcggtggcnaagggctgcgggttctgccatgctgggcattggtgggtgggangggagggagnacgtggggcccgtcctctgggnagcaggnggtgggaaatgtgaatgggagaagggtggatgtgatgtaaaggaatatgangaaaaaattgggggatagggaattggagagaaaagtatataggaatggagaaagaagggagtgggagggagangaaggatga

SEQ ID NO: 590153 - DNA, 420 bp, Homo sapiens
  misc_feature (8)..(8): n is a, c, g, or t
  misc_feature (29)..(29): n is a, c, g, or t
tgaagccnaccaagcccctactccccctntgaaacccttaaaaaccaataggccccgtgttttcttcctgcctgtcaccacgatttggaattgtctgtgtttaaatggcaatgttcagggtctcccgctagaaaaccagctcccaggggcaagggagatgccacggtcacttctgtgttcttgatgcccccggcccagtgcccgacactcatgactgctcagcaaacgttggctcagtgtgtgacccggtcacgtgcctggcacataagaagcatcagataggtgtttgtgatttctgtggctgtcactgcctgagcgggcattttgagtgtaggagaaatagcagtgcctggatggtagaagcccagaggtcttgtcctagcttggcttcttcctcctgataattgaatgacttaaaaa

SEQ ID NO: 590154 - DNA, 603 bp, Homo sapiens
  misc_feature (412)..(412): n is a, c, g, or t
attgttgggtgaatggacgagacattgtcatgatctgggaggatggggagaactacagttgttcggtctagacatttcgcctagacacatttctcgcaccaaacttggcatttgaactgccagatataggccttatgagtaacttatttttcagggccctatgagaagggctttgtattacgtggttaccttgaacaactgctaggaggaccaaagattttgcaaggcttcttaaaagtgcatggtgagaacttttacatatgagaggataactattgttgactgaaaggattaactgtgttcgcttgtcaaagataaggttgatgtttcaaatcaagtagattggtatgccaggatatactcttcaggactgaatgcgataccgcccatttatgatatgactcctacaagngcgcctatagccttaagtaaaagatggatgtctgccaaagcagaagacttaaactcatggactggctcatacctgaacgttcactgattctcatcaatgggatgagtttttagcgcaaatgctgctgagggacacctcttccatgtggaggcagtaaagctattgcaagaagtgtacaccttcactgacga

SEQ ID NO: 590155 - DNA, 1057 bp, Homo sapiens
aaccagatgggagcagctgagggggccgggtggcaacgaggatgggccacagaagctggacgcggaagctgatgctgagccccgaagacgctcggagtagctacgaatcctctgtgggaggaggtgaaggctcccagaggactagtttcctcaagtttgcgctatattgtggattctggtacagtcgacgacaggcgagacagagttccgtgcaggcgtgtttggagaccaataggtgtcagaggacggtgtgctagttgtcctagtcaagctatccccgtatgtcgctccagccgtcttcacccattgtgagcaggtgctgggcgagggtgccctggaccgaggcacctagtactgggaggtggagattatcgagggctgggatcagcaatgggggtcatggccgaagacttctcccacacaaggagccctacgaccgcgagcggctgggccgcaatgacccgagtcctgcatgccatgctaggtggtaagtggacgcagattcgtccgtctggtttcatgggctggaggctcccctgtcccagcccgttctcgcccacgggtggggtctgcctggaatacgctgaccgtggcttggccttctatgctgtacgggacggcaagatgagcctcctgcggaggctgaagggctcccgagcgcgccggaggtgcgcatcaccggactgtcccattgaagcacattcgagaggccgcctgggaaagtcgagtctagaggggctctttagaccagaggactcaagggctgccttgcttcctgtgagagtgatggaagcgcaattgggagaatcgggggccaatcacgaaaagtcaggcaatataccggtgctgaggaggcagggaatccccaggggcacggggcagggacgaggtaggagcggactctggctccagcgaagggtcgcaccaatgggggccattcacatacggaggagaagggagcaacactggagaccgaacaaccaggacacaaagtagtaaagggcaccgcctgagaaagggacagactccccgtacaggaagggaggaccccgagaac

SEQ ID NO: 590156 - DNA, 123 bp, Homo sapiens
ggatcacgtcagccagcaggaggctgttcagtggtggcccaagcctccctctttccggggggtgttgatccaagccaggtgtagtgaactgatgagtccaccgatgacgcccagcatcttcac

SEQ ID NO: 590157 - DNA, 289 bp, Homo sapiens
acaggtcaacttgagagagattttgggccttcataggccaccaggaggcagcagttgggactagagagtctgacttgagtaagttttgggcccggagatgatgtcctgggacaggagttggccgtggagaggccaccgtgaggcataagctggatgtagagaggccagtgtgaggccatacctgggcctgtctaagctggtgcaagacagggaggaatctggtcttgcatcacaatggcctctctatgtccatgagtagtaaccagacaaaaggaaagaggaacaacag

SEQ ID NO: 590158 - DNA, 112 bp, Homo sapiens
caatgatgcgccatcttctcccatcagcttagcccttactagatgttggtcccaccccaggtcatctcattaacataaattcagtgtggccttgatgggatgccctactgcg

SEQ ID NO: 590159 - DNA, 710 bp, Homo sapiens
ggaagggcctgggacaacctcctgcagaacaagactgctttcaccaccaaagagaactacggcaaaggggagagggaagcacaatgggctactgcacagagaacactccatggccttcaagcacccgagccggcctcccacacactgttcaacgacaagagcagctaccgtgagctctctgagatcgctgagcaagcaaagagaagagctgagattgcaaggttgagggagctcaacacactcaagggccacgttgaatccgtggtgaagctcaagggccttgacatcgacaccatcaaccagaactacaccgtgtgaggaaattcgacattgaaccaacaaacatgacatccgtattggagcgagattggaatggagctccgctttaagatttttccggtgaatgaatgaaacaaacatggctgatctgaccagcccctagttgtaaagtgctaccaaatatatggtttcggttgtccgtcttctagagaggttttaatgttctagtggagttataccgtgtttggagcacggcgtggttgtaatcgttttcgcgttttacccagtttcccctaactagtcggtgatcttgcggaaagcaagacgagaaataatcactgcaaattttctgccccatgcttgctatcccttcacttgggtttatacaaagacaattctcgtctataaatatcaatagctggcttttctgc

SEQ ID NO: 590160 - DNA, 901 bp, Homo sapiens
  misc_feature (111)..(111): n is a, c, g, or t
  misc_feature (143)..(143): n is a, c, g, or t
  misc_feature (171)..(171): n is a, c, g, or t
  misc_feature (175)..(175): n is a, c, g, or t
  misc_feature (224)..(224): n is a, c, g, or t
  misc_feature (230)..(230): n is a, c, g, or t
  misc_feature (236)..(236): n is a, c, g, or t
  misc_feature (239)..(239): n is a, c, g, or t
  misc_feature (242)..(242): n is a, c, g, or t
  misc_feature (257)..(257): n is a, c, g, or t
  misc_feature (295)..(295): n is a, c, g, or t
  misc_feature (301)..(301): n is a, c, g, or t
  misc_feature (307)..(307): n is a, c, g, or t
  misc_feature (325)..(325): n is a, c, g, or t
  misc_feature (341)..(341): n is a, c, g, or t
  misc_feature (366)..(366): n is a, c, g, or t
  misc_feature (373)..(373): n is a, c, g, or t
  misc_feature (382)..(382): n is a, c, g, or t
  misc_feature (394)..(394): n is a, c, g, or t
  misc_feature (403)..(403): n is a, c, g, or t
  misc_feature (424)..(424): n is a, c, g, or t
  misc_feature (455)..(455): n is a, c, g, or t
  misc_feature (466)..(466): n is a, c, g, or t
  misc_feature (485)..(485): n is a, c, g, or t
  misc_feature (519)..(519): n is a, c, g, or t
  misc_feature (529)..(529): n is a, c, g, or t
  misc_feature (542)..(542): n is a, c, g, or t
  misc_feature (544)..(545): n is a, c, g, or t
  misc_feature (557)..(557): n is a, c, g, or t
  misc_feature (573)..(573): n is a, c, g, or t
  misc_feature (611)..(611): n is a, c, g, or t
  misc_feature (668)..(668): n is a, c, g, or t
  misc_feature (692)..(692): n is a, c, g, or t
  misc_feature (726)..(726): n is a, c, g, or t
  misc_feature (728)..(728): n is a, c, g, or t
  misc_feature (731)..(731): n is a, c, g, or t
  misc_feature (750)..(750): n is a, c, g, or t
  misc_feature (752)..(752): n is a, c, g, or t
  misc_feature (755)..(756): n is a, c, g, or t
  misc_feature (777)..(777): n is a, c, g, or t
  misc_feature (780)..(780): n is a, c, g, or t
  misc_feature (789)..(789): n is a, c, g, or t
  misc_feature (801)..(801): n is a, c, g, or t
  misc_feature (810)..(810): n is a, c, g, or t
  misc_feature (813)..(813): n is a, c, g, or t
  misc_feature (822)..(822): n is a, c, g, or t
  misc_feature (826)..(826): n is a, c, g, or t
  misc_feature (832)..(832): n is a, c, g, or t
  misc_feature (834)..(836): n is a, c, g, or t
  misc_feature (891)..(891): n is a, c, g, or t
ccccagcacagaggaggtggacagcaagaggggtgcggtggatactgacctttgctccggcctcgtcgtgaagacacagcgcatctccccgctgtaggcttcctcccacanaacccgtttcgggcctcagagcgtctggtganatgctgttgccgctgctgctgctgctanccangtgctgggccgtggaggtcaaaaggccccggggcgtctccctcaccaancatcanttctangangantccaaagcctttcanctgcctggacggttcggccaccatcccaatttgatcangtcaangaagantattgcgactgcaaaaanggctctgacgaaccangcacagctgcctgtcctaaaggcancttccantgcaccaanactggctaaaancccctgtanaacccctccaaccgggtcaangatggtgtttgtgactgctgcgatggaacanacgagtacaanagcggcgtcatcatgtganaaaacactgcaaagaaaaaggccgtaagaaaaanagagtccctncaacaaaaggccnanntcacccgcgaangagattccgtctgaanaaaatccttaaagaggactggaaaaagagcacggagangagaaaaaaaaaaaactcattgaactacaggctgggaagaagtctctggaagaccangtggagatgctgcggacagtgaangaggaagctgagaagccagaaagagaggccaaanancancaccagaagctgtgggaanancanntggctgctgccaaagcccaanaanagcaggagntggcggatgatnccttcaagnagntggatgatnacanggacgnannngtctcgatgactgagctgcagactcaccaagagatggaacccgctgggggtgaancattgtacaa

SEQ ID NO: 590161 - DNA, 844 bp, Homo sapiens
ggataaagtaagtgctgtctgggctaacaggatctcctcttgcagtctgcagcccaggacgctgattccagcagcgccttaccgcgcagcccgaagattcactatggtgaaaaatcgccttcaatacccctaccgccgtgcacaaaggaggaggcgcggcaagacgtggaggccctcctgagccgcacggtcagaactcagatacgtgaccggcaggagctccgagttgccaacccaggaacaaagacgggctccctctggagaagatgtatgcttacctctcttaggccctttcatccatctgtggcaaggacttacatctgttgggggagccctgcaatttaccaagtcacttacatggcccaaagagcaacaatttacctgtggacagagatgtgctttttggatttctgaggatcctgcaaaaattcccttcgtggcaggcagaccctaatttcctgcctgtgactgagggaggactgacattcgttgaggatgacaacatttgcaatccatgtgatgtgcctgtcacccagtatctctgatacgttgacgcctgccaggcattaattccatgacgtttcgacaaagggattgactgttacctggaatttgtagttggggaactgtattctgatggcccctcaataaattctatggttgatggctccaaaaaatctgggtagaggtccttgggacacctgggagtggggagatatctggctcaacttattgtggtcgagaagacctacttggtgtgggggacattcggcggtagaacctgggatttttacccaattggataaaaagaagcttcggtggagaacatttggtggtcacagtg

SEQ ID NO: 590162 - DNA, 202 bp, Homo sapiens
ccccagcacagaggaggtggacagcaagaggggtgcggtggatactgacctttgctccggcctcgtcgtgaagacacagcgcatctccccgctgtaggcttcctcccgcctcctctgtgctgtacagcacagaggaggtggacagcacagagatggacagctggacagcacagaaggggctcactcacccaccacaacacac

SEQ ID NO: 590163 - DNA, 822 bp, Homo sapiens
gaagagctgtcaaatgaaaaactttgtgctgaagcaggtttttagtatgtatatctttttgatggtatgaagaatttatttaggcttgactgttttaaaacaccataatgaatgtataattaatttatgttaaagtattaaccctttgtcacaaaggaatggtaatgtgattggctgcctgttagcccatcgactattcccgtcacggtagtccttacctctgtcggcagctcagagcctccacatttttatatttaattctcatgatcaattagccaccataatcccatggaattaggtcttgttaaaatctagtccgggcgcagtggctcacgcctgtaatcccagcactttgggaggccggggcgggtggatcgcctgaggtcaggagtttgagaccagtctggccagcgtggtgtagcccggtttctactagaaatacaaaaattagccaggcgtggtggtgcgcgtctgtagtcccagctactcgggagtctgagcataggagagtcgcttgaacctgggaggcagaggttgcggtgagccgagatcacgccactgcactccaacctgggtgacagagcgagatcctagtactgcacaagaatataaaaaaaaaaactgagaggacttcaaaggacgagccgcagcaagacaaaggcgtcccggagcatggggcccatgagtgaacaaaacgcggcataccctgaagacaagagcatgaatgggacaccagcgggggaaacactcactccggggctcaccataatagagagaacagcaataatcacagggtaacccagggatacacgcgcttaaggc

SEQ ID NO: 590164 - DNA, 240 bp, Homo sapiens
agcagggaacctcccccattcagggaagcagtgagtgaatatgggaccccgggaaccacgcttcttccacagacctttttacaaccctcgggtcaggagactgcctcatgaacccactccaccagggtcttcagtctgacacagagctacatggaatcttggcagagtagtttctcaggcgcaaacagagaccagaaagcctgggtatctaaggctctcgggtctctgtttgcgcctgag

SEQ ID NO: 590165 - DNA, 992 bp, Homo sapiens
tgactggggtcaattcaagtcatgcaggctgtgaagaaacggcggggtcgcggttcctgcggtcctgtggacttggccccagacagccggggtcgtggtgcagaacgccggtcgggaccatctgcacaggcgctcgacagctccaagatgctgcggcaagcagaaagttgaagcagaatgcggtcccaggcacaccaagttcagcatttaccctcccattccaggagaggagcagctctctgaggtggggccagcgcacaagaaatttgaggagatcccaattgcacaccattaatagcattcgcacaacaagatacagtagttccaggtagtctctgctagtaatgagccccttgccctttgcttcctgtggcgcagagggatttcggaatgccaccgaagggcacaggcatcgcagcccagacagcaggctatagcccgcagcggcgagagctaaacaaaagggcgtgatccaatccgagttgtggtgaaaggcttgggggccaggacgcttgttttgcattgcacggacttgatcatgggccggcctggaagtgatctcaaatccacagaaaaagagcccaattccaacgaaggtgccgccccaggtaagggctcggaagctgggattgggacaggcgcggcttgcacttggaactgacctcaagcctctgtcccgttggagcttgtaaatgtccctggtagagtctccgactatgcttgttgggaatccctaaggcgcaccgagagtttcgcccctaccaagtggcgtgttgactcaggtgggatgggtgccccaactagctgattcctacagaggggctagggagcgggcttcgccctcgtgagaatacatcgtccctgcaacaacgggcgctaataccaggcactccgccactgaggggcgacagcaaacaccacgcaaccgggcgaccactcaccctgtctgcaccaccaccatgagccgccttaacacaacacacgccacacaa

SEQ ID NO: 590166 - DNA, 211 bp, Homo sapiens
ctgtcaaaacgaagaagtagccaatgcctttggcttggcagatgagcttgcagcctgccaagccaaaggcattggcgacttcttcgtatatgcagcccaaggttgtagactggtactcgatgtagcccagattccacctcgtgtctgtgtgcaaggacagctgtgtaaaacgctggattgtgatcggcatcatacgactccaaacaagaag

SEQ ID NO: 590167 - DNA, 228 bp, Homo sapiens
  misc_feature (140)..(140): n is a, c, g, or t
  misc_feature (195)..(195): n is a, c, g, or t
tttttttgagatgggttctcactatattgtccaggctagagtgcagtggctattcacagatgcgaacatagtacactgcagcctccaactcctagcctcaagtgatcctcctgtctcaacctcccaagtaggattacaanatgcgccgacgatgcccagaatccagaactttgtctatcactctccccaacaacnctagatgtgaaaacagaataaacttcacccaga

SEQ ID NO: 590168 - DNA, 1497 bp, Homo sapiens
gggtggcggcgggggcggcggttgcagctacagaaggggatccggaggaagcagcgtgatggaggtggatgctgcagataagtcacccagcgtgaatggacctgacggagatgagatgggagtgttatccgatcgctctcgcatcgcccattgttcaattctcaagcatctcagacgcactggagtccgcagtgacgcatcccaggcaggggcggccgtggtgcatggtgaatatgcgggacttcgtgatattgggccaagacgaggcagggcccgcacaattatctgaagtgctgtagtgagacctcccttttgcatgcatgactgttctccgactagctcggtgcgcaatgcacgtacacgcatctatcaatcttgaccagatgcgaacatattgatctacaacccacaaggaagtgacgcaaaggtgttaacgacaagtggtggtatccaacggacgactgggaggctttcgctggggcttggcgtaatactcaacagagggcgagccatgacatgacacctctcgtgacggtccacggtttcacagtaaacgcccaggatgctgtgagaactcagtcgaagcaggcacaccgtccttttcctgaagggttgaacccgatagtgaaccaagacgaacaacatggatcgttccctggtacagacgatatggcagaagtcatggtcgagacggcctatcagatcacatctggcacgagagccaacgaagtcgctggtactcgctggagccttgaccatagacttcttggcccacatgagcgcaagcggaacactgcgatttgggagttagacacagcgtaggcccgcgaaatgaacgagcaaacaaggcaaagctggggaagacggaacacttacccaactaagtggtgcttgacacaagcccttggatttagccaccagccaccaaggctacccattccacacgacttgcttgccacaccaagacctcgcgggtccaagcgatcattcctgagaagtacggtccacggccctcctggcaagccgggacgagggttcccccatatcaacttcactgaagaacccccctcaccgagagaagggacctaatgcgccaccctgggtgcctaccctggccatacccggggcgaccctcaacccaccacgaaccaccgcttcacacgacacggacatctctacaggcagccaagcgggcaacaacaccgtagtcggcaggccacacggaccgtaacccgtgggcagccactaccccagaaaagcggtcacagacccacgacccagcctggtcgacccacgccacacggccccctaccagacccagccagcggaccccgccagcacacacacgcgcgccaccaccccaaaacgagaagccacgaacagccaccacaggacgcacgccaccaccacccgcacgcgacacaaccgtcacaacccagcttaaaacgagagcccagcgcacagaccaacgacacacaccaccgaccgcagcgcacg

SEQ ID NO: 590169 - DNA, 575 bp, Homo sapiens
cgcacgagacccagcgcccgggttggagcgtccagccctgcagcggatcatggtgcagcaggcggagagcttggaagcggagagcaacctgccccgggaggcgctggacacggaggagggcgaattcatggcttgcagcccggtggccctggacgagagcgacccagactggtgcaagacggcgtcgggccacatcaagcggccgatgaacgcgttcatggtatggtccaagatcgaacgcaggaagatcatggagcagtctccggacatgcacaacgccgagatctccaagaggctgggcaagcgctggaaaatgctgaaggacagcgagaagatcccgttcatccgggaggcggagcggctgcggctcaagcacatggccgactaccccgactacaagtaccggccccggaaaaagcccaaaatggacccctcggccaagcccagcgccagccagagcccagagaagagcgcggccggcggcggcggcgggagcgcgggcggaggcgcgggcggtgccaagacctccaagggctccagcaagaaatgcggcaagctcaaggcccccgcggccg

SEQ ID NO: 590170 - DNA, 339 bp, Homo sapiens
gagacagagtctcgctctgtcgcacaggctacagtgcagtggcgtgatctcagctcactgccagctccacctcctgggttcctgccattctcctgcctcagcctccggagtagctgggactacaggtgcccaccaccatgcccggctaattttttgtatttttagtagagacggggtttcaccgtgttagccaggatggtcttgatctcctgaccttgtgatctgcctgtctcagcctcccaaagtgctgggattacgggcgtgagccactgcgcctggccgaaaaaagaaaatttaaatttccttaaagaatgagcaaatcctcatcacatgtcgacg

SEQ ID NO: 590171 - DNA, 265 bp, Homo sapiens
ttttcagacaagtgctattatcaatcatagcacaaaataatagatctatacagccgggatgagagaggacattctagatgcatcagaactcacataaagattgacagaagccaggtgtatagaagtgtgttgataaaggggaaaagaaaaagaaaaaattgcggcagcagtgattgcagaagccatcaaaattctccaacagaactaaacaacgatagaaccagtagagactccactcctgttatgaggtgaagcagcaccttgc

SEQ ID NO: 590172 - DNA, 1337 bp, Homo sapiens
gactggcacctcgcagcccagtacactagatgaggccgagggactcctcaggagtggggcttacggcagcttgtgctagagagaactccggttgagtggtacgaaccgtgacctatagcagggtgatgggccctcgagtgtctagggctgacgcagtgctagtagtagctagcgattccgatggagtttcgacaatgcataggttcgtaggccggaccgatactagccctataccacacgaagggatccattgtgacgccatgcagagaaccagtcttccaatatgccctacaggaccggttactatgcatgcaacacacaacgtcaatgtagggcgacatgacgtgcacggtgcatggacgtgccccgacgcaatacgcgcatgacgcataacggagtcagacattatcataccagcgtagacccgcaagggacttgtcgagagcagaacaagaatacgaaggggtacacgtgacattgtacaacatgacctacttcccacgggagttaggagtcatgactgcatgggacttgacagtaccaggagcactcagagaaccttgacactgattgaccaaaaatggaacccttatcagcgggaatgggaccccagagcagaaattacacgcgtaaaatgttgggcaaaacacatgggcgcaatggtaacggtggccatggaacccctgggttacgcacaaggatcgagtgaagagcctttcctggggacacattgaaagggtcctgacctggatggggcagggataacacatataaggtacggaatgaatggactcggatggaaggaacagcaaggcacctaataggtgatggccctaggaaaagatgtatggatgtgagggtaggaacatatgcttttccatcgaagagaacagggcacagtatgcccatagggggacgtaaatctggaacgtggagcgacagacaagcgtaccttttcgaagaggacactacaggttatcaagggggaatcggtcctatcccacgttgaaagtaaccattttccttgggatacacgtggcaaagtatccgatggatgtagggggggtatcatagtccggtggaaagatggcagtagtagagactcgaagacgtggcagtccacatgggacacgagagattcaatgtgaccagtaaatgtgtggaatggaacaatgctttaggggtaaggatgcaaaaagagggtagaggaaatgaggtgacagtttggtgaacggatcgcaaatccatgggggaagaatcatgagcaatggattgggataagacgagatgggcagagactatatgatgtataggtggagagaaacataggggtgtgt

SEQ ID NO: 590173 - DNA, 206 bp, Homo sapiens
tgagacatgtgtgtgaatggggatgttgttcacaatacaatacaggctcccccacagggtggggtgtcctgtggggaacttggtctgcttcagcccacagaggaatcaaaagatcaaaagcagtttgggaagtgccagataccggcaagtggatggagtggagaacggaaaatccagcgcggtggtggggtctggtttggcaactg

SEQ ID NO: 590174 - DNA, 139 bp, Homo sapiens
taccacatgcacagctgcgtcacttcagctctggggcatgttatgcactgcctactttagtgtggtagtatctcttgcctgcttgccttctgttagttattttattacttcctcaatttgtcagtttccactctgccct

SEQ ID NO: 590175 - DNA, 104 bp, Homo sapiens
  misc_feature (91)..(91): n is a, c, g, or t
cttaggatccctgtgcactgctcggatgggcatgtggatatgaaaaaaattttttgaaatccctgactattgctataaagttatctgtaanatacttgctattt

SEQ ID NO: 590176 - DNA, 275 bp, Homo sapiens
  misc_feature (69)..(69): n is a, c, g, or t
cagagatgatgccactgcactccagcctgggcgacagagcaagactccatctcaaaaaaaaaaaaggcngctgaaatcgggcagcgcctttcagattccgggcccaggtgatttcgtaactccggggcacccgggatacggcccttcctaggcccggccataacccttcttcctccatttagcactgggccccatgtcacttacatctccttacccagttttttacggggccgggtaagagccttcacccagggaacagtacaaccggccggggg

SEQ ID NO: 590177 - DNA, 280 bp, Homo sapiens
ttcaaagcgcacagaagtttcgtatggtgagtggatcccggtcgggcttgctgaatgaatatagagtcagcctcatattttctcatcagttcttcagctctcctccctatcgtcatcccactgtaagactgtcactgatcatgtcctcgagctgctgctttcttagctcaacgccatgctgcgtgccatcccactggttctagaccctttccaatttttctgtcattgctgttctcatctctgaaccggaagctttatttttcactttctgtgccctttg

SEQ ID NO: 590178 - DNA, 420 bp, Homo sapiens
atgatggtcttgatctcccgacctcgtgatctgcctgcccggcctcccaaagtgctgagattacaggcatgagccactgcgcccaggcctatacatttttttaaaataatggtttgtaattaataaagggagaggcctgcaaaaaaacaaaagaaaacaacaaaaaaaaaaaatgatcacaaaaaaaaacactatggtttttcggcgccgggccgtgctggccctcgagcggagaaaggctttcttaaacgaacaaacacattgcggtggtggggggggacggggcggcacccagagtagtagaaagcgatagaacaaggtgggacaacagcccggtgtctgctcagtgggagaaaacgtcgtggacatagaacgagcggggggcgtgattatccacccagcaaaaaacgccgcgcgaga

SEQ ID NO: 590179 - DNA, 208 bp, Homo sapiens
catggaccagagatctggatgttaccttcacagttcaaagaccctttcgtcaccacctggtatgacactggaatggtattcagcttcctggcacttctggtcagcacccagtgttggcacaatgatctttgaggacatggtttaggcggaccacaccgccacacggcaccccataggataggcaggacataccgcgatgtaggaagag

SEQ ID NO: 590180 - DNA, 180 bp, Homo sapiens
cccccaaaaaagaccaaaaacagcagcatcaacagaaactcaatgtaacatttatgctcaatgaaacaacaaagttggttcttcataactttacatttatcttgtcataaagataaattaagaatttagaggtttttaaatatactaatatgttcacatatgcatatatgaagttatatg

SEQ ID NO: 590181 - DNA, 211 bp, Homo sapiens
ggtcaagaccccttcctgaacccctcaaaccctccctggacccctgcgaatggaggcaagagcccacgaaagttttctcattccttcatagccaccaaagcacagaagaacctctgattgggactgccacatgtcttgcgggtgtgtacgtgtgtcgtgatgagtgaagtgacaagtctgtgtccgtggagaaagaaatccgtgacgggga

SEQ ID NO: 590182 - DNA, 168 bp, Homo sapiens
gggggggcgcccccccctttttaaattggcccccccccctttttgggggggggggttttttggggccccctttttccccctttcccctttaaaacgggggggggggggaaaaccgggttttttggggccgggggccccccaaattccttggggggtttttttttttta

SEQ ID NO: 590183 - DNA, 666 bp, Homo sapiens
aaccgccttcgtcggaagctgccttggatccgcgtctccccaaggaaaactgcgactggcgactccccaagtgctattagccgttggttaattcggggattgcacaaactaatgctggggtactaaggtcaaacgtgaacggagcacgtatattatctaggctgcaaggctttaaatagttactactacacacgtcttaacatacgcacctgctaacccgtgcgcagatgtcaaaacccatttggctaagcaactggtcaaactctaagttcaggtatgaaatgctaaaccccaatgctctgctactacctatatgtgcatgagaaactttggtaggctgacaaggatgtactggacagcgctactggtagaagccaacaattggcaacgtacatcagtgaccctatgaagaccttatggcatgctaggaagtactggtataccgccagtaaaggagactggacttaacaatgcgttgcggtaatcagcgaatgccgtttgacaataagttgtatgaccattcagatgcattcaactctaaaacatggtgaacaatgctatacaatgcttagatctgcatacataagtacctaacgtagtcaaggaatactcgcgaattgacaataaagtgagagaaagcaatcctattggccaggaggaggccct

SEQ ID NO: 590184 - DNA, 390 bp, Homo sapiens
agagctttcccgattaccgaaaactgagaaaggacaaagggggaggggcacatgtaaagaggacagcccaaccagaatagacaacgcaacacaaagaaaactagaagaaagacacaactaaggaaaaaaacacgaaaacaggaccaaggaaaaccaagaaagaggagaagaagaggaaacaaaatgatagaaacaaagaggcaaagggagaaaggaagacaaaacagagcaatggagtaaaaaccgaagagaaagagaagaacctgactgagaaaaaagacaggtaaatcgaaaaacaagcaaaaaaacagaacccgacaaatagaagagacacaaactacaccatgaaataaataagaagaaccacaagaaaggaataaacacgtcgct

SEQ ID NO: 590185 - DNA, 667 bp, Homo sapiens
  misc_feature (4)..(4): n is a, c, g, or t
  misc_feature (214)..(214): n is a, c, g, or t
  misc_feature (629)..(629): n is a, c, g, or t
  misc_feature (636)..(636): n is a, c, g, or t
  misc_feature (641)..(643): n is a, c, g, or t
ttancacagacacacaatcacacacaccctcttcttgccacagagacgcaccattacatacacagacacagacacacagagacacagacacacaaacatagacacacacacacagacacacaccagacacgcaaagacacacagacacagatacacagatacaaagacacagacatatagacacacagacatgcacagagacacatggagacanatgcaaaaatgcacagagaaagacatacagaagtgtacacacagacacatagaccacacagacacacagacatgcatgcaaacacacagacatgcagacatgcacacaaacacagacgcacgcacacagacttaggcagcccaaattcagcgcctggggcataagttcctggaggggtggccaccttcagcccccacggtaaggtcctgaggaaccttccccttagacaagggatcatggaggaggtctcttccggagcctggagggaggcctcaagtggtccttccacctcggcatcccaaagtgctaggattataagcatgagccactgcacctggccccaacatcatttattgaacagactgtcgtttccacattgtgtttcttggcatttctgtcaaaaatcagttgaccntaaatgnatggnnncacttccgggctctctaaaaaaaa

SEQ ID NO: 590186 - DNA, 274 bp, Homo sapiens
agtcacctcggccccccgtctgtacagttgcggggacttatactggggacgtaagcgatttccgggtgtagtactgttactcttatttcagcgcttatactcagtgaatcttgtctgaagctatcgagggcagactgccaagtcctggagaaatagtatatagcaagtaagtgggtaatgtttctcattgtacacaattttgagaaatgccacataattttccttagccaaatggaaacgcttgtcacccgaattctgtggccatttgtggttc

SEQ ID NO: 590187 - DNA, 642 bp, Homo sapiens
  misc_feature (4)..(4): n is a, c, g, or t
  misc_feature (189)..(189): n is a, c, g, or t
  misc_feature (604)..(604): n is a, c, g, or t
  misc_feature (611)..(611): n is a, c, g, or t
  misc_feature (616)..(618): n is a, c, g, or t
ttancacagacacacaatcacacacaccctcttcttgccacagagacgcaccattacatacacagacacagacaagacacacacacacagacacacaccagacacgcaaagacacacagacacagatacacagatacaaagacacagacatatagacacacagacatgcacagagacacatggagacanatgcaaaaatgcacagagaaagacatacagaagtgtacacacagacacatagaccacacagacacacagacatgcatgcaaacacacagacatgcagacatgcacacaaacacagacgcacgcacacagacttaggcagcccaaattcagcgcctggggcataagttcctggaggggtggccaccttcagcccccacggtaaggtcctgaggaaccttccccttagacaagggatcatggaggaggtctcttccggagcctggagggaggcctcaagtggtccttccacctcggcatcccaaagtgctaggattataagcatgagccactgcacctggccccaacatcatttattgaacagactgtcgtttccacattgtgtttcttggcatttctgtcaaaaatcagttgaccntaaatgnatggnnncacttccgggctctctaaaaaaaa

SEQ ID NO: 590188 - DNA, 743 bp, Homo sapiens
ggttctcgacctcaggtgcctggctgtgcatccaggcgtgcacgaccggtgtggcctgggctccagcctggagtgtggaccgggtcggtcggcgtgtgcctcccctgtgagggtgccctggcgggtgtgagtcccggctgggctggatgaaccgggtctctggtcggccgcgatggtccctgctgcggctcctgggtgatggcactgcccgcgcgcccgccggcgccatgggaaggagcgggcgccgctgctgtctccccgcacggtgcgcgcgacgacttgatgagcctgctcactggtgcagtccccggtccgtcgggtccccgagtgacggctggcggcactctgagagtgttggcggcggtgcccaggggcttcaccgcatgcggagcgcgcagttgtccacgtgaagcggtctgatgtgacccagccagtccctgtgcctgccggacagtgcgtgatgtcccgagggtacctacacgttcctcacgtgcttcggccgggcttcgtggctcatctggggtctcatcggtcctgctctgctggttcgtgcagcttcctgcgccgcgcctcaaactggtgccaggaggagcgactgcgcgagcagaacctgcgcgcgctagagctggagcccctcgaagtcgagggcacgctggccgggagcccccccgggcctggcgcacgcgagccaacaccagaccgatagcgcctggaggcgccggctcacgcgcactcggcatcga

SEQ ID NO: 590189 - DNA, 374 bp, Homo sapiens
acactggtggttcctcatctctgtctagctccatttcatccatttcgtggttcttatttgcctcattttgtgtaatcctaatgtatgcatgtttcttgtgagtcgtgttctagcgccacatcagtatcctcagttgaaattgggactcaggtttgggtcccttgtcggagcctgggtttgttctaaattcgcctcttttttaatgtagtctgttctcgtctccctgttatacagtcaggagtatgggacttggtacatgtggctcagtccttcagttcatcaggctttatggtcatgtatacagttagcccatttcatttaaatcctgcgagacagagcatcatagctagacattgacagagagatcggcatag

SEQ ID NO: 590190 - DNA, 449 bp, Homo sapiens
gagatggagtcttgcccctatcccccaagctggagcgcaatggtgcgatctcagctcaccgcaacctccacctcccggattcaactgattctcctgcctcagtctcccaagtagctggaattacaggcgtgtgctaccacgcccggctaattttttgtatctttagtagacatggggtttccacatggttggccagggctggtctcaaactcctgacctcaagtcatctgcctgcctcagcctcccaaagtgatgggattacagcagtgatccaccaggcccagcagttttaaacttgaacttacatctgtgcttgttaaagcacagattcctaagctccatccccagagattctgattcagtagggctggggccaggcctaatatatatatatatattttttttagacagaatctagcctgggcaacagagcgagactccctctcaat

SEQ ID NO: 590191 - DNA, 222 bp, Homo sapiens
tgcgggcagggctgagccaacaggcacgctggtaacattgaggtgggcacgggatgatctgcacagcctatgccattctcctggtgacacacggacctcccacccatcactaggattagaggccatgcgggtgcagacggagatgtgagctacgatgttccgccagaacgaattcatgtactacaagatgcgcgagctgcctgacaccagcccatgacggct

SEQ ID NO: 590192 - DNA, 246 bp, Homo sapiens
gcgttgtccagcaccctttccagctggggaatttccaacctcgggaggcccaccttgcccaaggcagaagaacataaaccctcattttcttggcccctttggtcgcttaggcttaggcccacagctgaggtttggggccattaagataccattttgtccaattgcacatgttatttctaagtgcagaaggcacagagtttcagcagacgggagttcgcccatcgtgggagtctcatcctggacaag

SEQ ID NO: 590193 - DNA, 301 bp, Homo sapiens
tcaaatggtgctggtgtgctggcttccgatccctcatagcggggatcgtctacctagatcacctccattgttgtccttgtggaagagaggaaatcactccaaaatcgtcgcaggagtactgggcctaatcgctacgtgcctctttggctatgatgcttatctcatctgtgtcgctgcggcagccaagacatacagcagcccccactgaccccgcagatggcccggtgtaggcgaacttccctcatttctctctgcaatctgcaaataactcctccattgaaataactcctccccaccccaa

SEQ ID NO: 590194 - DNA, 693 bp, Homo sapiens
  misc_feature (693)..(693): n is a, c, g, or t
gacgagtacgtggctaacctcacggagctggtgcggcagcatcaaggctgcccaggtcgccataggagaaaaagaagagaaagaaataagaagaaggcagaagatgcaggaaggacacgacgcctgccattgggccggatggggagcctctggacgagaccagccagatgagcgacctcccgagtgaaggtgtatccacgtggagagtgggatagatcctcacaggctagcagatgcccccaaagccgggcagctggaggcctggctcgagtatgaacccgtgggtatgaatgtagcgtccgaggtctgatagctgatagaaagtggctcagaagaagaggaagaggaggaggaggaaagagcagccgtctggctagcgacgagtgctcccaccctgcccgtggtagggagaagaagaagattcctacgatccgagatcagcgatgacgtcgtctgaggtggacgcgcgggacatcattgagaatgccaagcaagatgtcgatgatgaatatggctgtgtcccgaggcccttggcacgtggccgtgcagtcctactatgccgtggcccatgctgtcactgagagagtggacaagcagtcagcgcttatggtcaatggtgtcctcgaacagtacctagatcgacaggttgggagctggctgggtgtccctgtacaacaaggacctgaacggcan

SEQ ID NO: 590195 - DNA, 496 bp, Homo sapiens
aaatactggttaaagatgatgctcgttgtctagatcttgggaagaagacatcagtatgtttgcaggaggatcatgaagcacatgatcgttgcatgaaaaatgttgcttcctgcctgttcaaactgtccaattttggagggtggggtggttgcaatgcttacttaaaggatatgtagcaagccatcggaaaaacagagaaggtgaatctcggtcacagtatgatttatgcttggggacactaagccctgagtccattaaaatcaagtctgaacaaaactcaagcagtgtagtctattcttgcatgctgggttgtttcaacgtgtcttttttcttgccctgaatcccggggtatttgcaaaatggattctcctactgacatctgttgacaccctagggggacaggtctaattcaatccagctaaaggcagcaggggttcctgactaactcctctcataccaagctccccttctccatgactcccaaaaccttcacggg

SEQ ID NO: 590196 - DNA, 1171 bp, Homo sapiens
gatacgccggtgcagcggggtgggcccggggtgcctgtgtggccctgtggatggggaacctgcggtggcttcctgcggagggtttcggcagtggcatcctggtggcctggggtcgctggcctgtgtggacgtgggcctggtggcctgatggccgcgggagcttcgcggaggcaaggccggagtgatacggagtggatgcccgtcaccaagttgggccgcttgggtcaaggacttgaagatcaagttcccttggaggagatcgtatcgtcttcttcccttgcccaatttagggaatcggagaatcatttggatttcttccgttggggggcctcatcttcaaggatgaaggttttgagaagatttatgccagttgcagaaaggcgagaaccctgttgccgtgggccaagcggcaaccaagtgttccgagggggcattttgggttacgagatattcgggggggaccatacatagttggccgccatgtcggcgatcatggagagtagtaacaggtggctccaagaggggagggtagtgccaaccggacaatccggtggggggccaatacattccttgggccaaagagcttcttcacaatcggttccccctgtttgcaggccaaggagggccatacgtgggggggagaagacatatgacttcggggaacaggccccacccaacaaacgtgtgtcgccttttgcaacatgtgttgaccatgggcacggatatgcagggcactatctttgtcgcgtggagtataccagccattcaattcccctttggaaccccgagggtggagaccacttgggaccatttcggatacttcgcggacaacctttgttggcctttaagaagaggcttgcttcaattagatgcgctatggatatccgcatcgacttggatacacctttaaggcaccgtggggcttgacactttgccaaccgcttggggacaactctttccgccagtagggcaccaactttttggattgccatttttcttaaggaccctaaggagggtaaccttggacccccgggacctctggaaaggggggacttggtatttccaccaaggtttctcccctaataaggaggttcaagtttgaccacctttgttaaggagccagacacgagagttctcgtggcaggggaaatcacggtcacaagcttgtgcg

SEQ ID NO: 590197 - DNA, 1103 bp, Homo sapiens
caccaacccacaacacacagtgcaggagcaggctgggtggtgccgcgagcggacgcggcagcgcctctgtcttgctttttcttatttttcccccctttcccctttcttattcattatatctattaactatttctccccatccccaccaataagcgcaatacacccatcgaaggcgcatccacggtaaagcgaaagacggaaacacccaacacgccacaaacaaaacgaagctaaaactaaatcaatcatacaaacaagcagataaacaacaaaacatcacatatcaatacaaatcacgaccacacactcaacttatattacatacactatatactaccacaatatataatctaaattaaccacaaaaaagtcacatatacaaaataacacatataataaacacaatatacgacgacaaagcagccagagcagacaaagaagagaggaaagacgcgaagcggcggagcacgcaagaaggcgtcaacacagagcgagcgtaacacgcagctaagacctaactcgagtaccagagcacgaagcagcacagaggagggatgtacaaaacagagatcaggagcacacagagggaagagagctaagcacaccaggaagaggacccaccagctaggtctcactgaagacgcaaaaccacaacaaaaaaatcacaaacaaaaacacacacaacaacaacagaaaactacatcaacgaacaaaacaaataacaaagaacacacacatactaccaatcatacctatacgcacacataatacagaaagacacaacaacgacccaacatataagctaataactaagctagctcaggagagacgtcccacttacagagctacacgacagtggagcagacagaaataagcaacgagtaagataagaaagaacatagacacggcaacaagcagcactcgccctaaaacgcacagaagaccagccaggaaaagacaaaggagcataacgacgaaaccaactagtcagcgagcagacgtaacacgtgacaaaaatagatatagactagaacagtacaagcaacgaaacgtcaagaagaccaacgcagaccagaccacagacaatcaatagaaaacagcag

SEQ ID NO: 590198 - DNA, 426 bp, Homo sapiens
  misc_feature (1)..(1): n is a, c, g, or t
  misc_feature (61)..(61): n is a, c, g, or t
  misc_feature (87)..(87): n is a, c, g, or t
  misc_feature (94)..(94): n is a, c, g, or t
  misc_feature (109)..(109): n is a, c, g, or t
  misc_feature (122)..(122): n is a, c, g, or t
  misc_feature (129)..(129): n is a, c, g, or t
  misc_feature (139)..(139): n is a, c, g, or t
  misc_feature (177)..(177): n is a, c, g, or t
  misc_feature (189)..(189): n is a, c, g, or t
  misc_feature (193)..(193): n is a, c, g, or t
  misc_feature (226)..(226): n is a, c, g, or t
  misc_feature (228)..(228): n is a, c, g, or t
  misc_feature (244)..(244): n is a, c, g, or t
  misc_feature (255)..(255): n is a, c, g, or t
  misc_feature (257)..(257): n is a, c, g, or t
  misc_feature (266)..(267): n is a, c, g, or t
  misc_feature (271)..(271): n is a, c, g, or t
  misc_feature (285)..(286): n is a, c, g, or t
  misc_feature (289)..(289): n is a, c, g, or t
  misc_feature (303)..(303): n is a, c, g, or t
  misc_feature (305)..(305): n is a, c, g, or t
  misc_feature (312)..(312): n is a, c, g, or t
  misc_feature (407)..(407): n is a, c, g, or t
ngggataccagcattcccctcctggataccaggcagcttcagccctggcaagcacgatagnagacaatacttgttacccctcccccnccccccnccccgcgcccctccncgccacccgcccnctcggcngcccccgccnccccgcgccgtcccccccccgcccccccctcccccccngccgccgccccncgcnccccacgctccccctccctgctgcgcccccgcntnccggcgctgggccgcngcatcctgccncntcccactanntttngtcccccccccccnnccnccccgccccccccngnccccccnccccccccccccgccccgccccccccccccccccccgcccccccccccccccccccccccccccccccccccccccgcccccccccccccccgcnccaccccccccgcgcggcg

SEQ ID NO: 590199 - DNA, 738 bp, Homo sapiens
ggtggagaggtggtgtcccgcacgtgggccaggctggtctctagctcccggccctcaagtggtctgtccgcgattgggctcccaaagtgctgggattgcaggtgcgtgagcctgcacatggctccggacgaagaactcattagggagagttagtgcatgcgacggcaaacgaatgtgcagctgaaacgattattgtggcctttggaagtgtatgtgtaagaacatggttgcgtggcactctgaggtcatatctgcaaattggcagtccaattaagacaataagagcattatgtgaagagcaaggatagtaggggtgaggttaagtagacaggggtttcagagagagtcaattacctggaatcgtaaatgaacgtttggttggtattttgaagaaggtataatgggcagaatgtacatggtttatcatcgaaggttgctggttcaatgcatgtcagataagctgtgcactatctgacttccctttcattcaatgataattggacatgtcatcgtgccataggggcatggtgtcccaaccgtgtttaatgagaagggcatgtagaaccaagaaagtctgagttgtggacatgcatggacaaggaatgaggaagcggggcaggcgctgatataaaccttacaggatgccttaggggttcagtgaaatatgtgcaggagtggaaatgtggttaatagttcccattccaatgttgagagtggtgtgacccttgttgaagatgt

SEQ ID NO: 590200 - DNA, 401 bp, Homo sapiens
  misc_feature (117)..(117): n is a, c, g, or t
atgaggacagtgtgctcctgtgcggtgaataccacttgtatccaatgaacaacaggagacttgttctaaaaaaatttttttaattaaaaaataaaaaccacatttacacgagagtgnggaggagtgatcccaaccttcataggtgactctggggggttcaagtcttcagtggaaaaagtaactgtggatgtgatggaaaaaagagaactagaattagaagtggagcctgaagatgtgacagaattgtttcaatctcgtgaaaaaacttgaacagatgagaggctgctttgtatagataagcaaagaaagtggtttcctgaaatgaaatctactcctgaagatgctgtgaacattgttgaaaagacaacagacttagaatattacatcaacttagttgatcc

SEQ ID NO: 590201 - DNA, 166 bp, Homo sapiens
tgcggacctaagcaaaccccgacttaggtgatgggaggtgcaggctgatgtcgggggagctggcggtgtgcagagtgactgaaggtgcaagctgcatgtcaggtgagctgccggtgcggagagtgactgaatggtgcatggctgcatgtcggggtgtttggcttta

SEQ ID NO: 590202 - DNA, 1010 bp, Homo sapiens
  misc_feature (109)..(109): n is a, c, g, or t
  misc_feature (136)..(136): n is a, c, g, or t
  misc_feature (142)..(142): n is a, c, g, or t
  misc_feature (148)..(148): n is a, c, g, or t
  misc_feature (386)..(386): n is a, c, g, or t
gcacagttcctgtgggactggaccggtgagttttccattggaaagaagttcaggtggtcccattggttaactcagcctcaaatctcaactgtcaggccctacaaagaanatggagagcctcttctggtggatgctntgctcnctctgnagctgcccatgctggtctggcaaacacacctttctgctttgccttcacaaaagtaatgtgttccctttcccaccccttgcctgaccctcagggagtcagcctgcttccatccatgggtgggaagacttcagcacaaaggaaagactaattcttgtcaggcatttttgaaaaggctgattatgtgtatcaaggtacagcatcgtaggggttccccctaaacttgccctgtttatgtttnttctagctcttgttatccccttactgagcggctctactaggtggctgtgattaaatgtcccaagcaaggatagggaaggggaatggttgagcctctggagatcattgtaaccaatcctgccagacctgttctggggcagtggggagcaaacctagataaggacctgttcggggcagcagggagcacaaatctcctttaacaaccaagcagttcctcattcacatcaaacagagcgaggctgtgataacttaggaggcagcaatcctaatagtccttcagtgcattttagtctgtctccaactggacaccagataggtagtgtcaaggccagagattcggggcagtaggataaagtgttcattggcactgagtgcactttagtttttggtctgtgacctgttttccagaaatggtggccttttaggcgggagttaggcgaccaaaccagtgagagccccaatccctgcagttttgtggcttcaagtgtgggtggacagtcctaatggggatctccagctccttcccctgtgggctgtcacagacagctacccccagaagggtcaatgttgggagtggttgtggctctgagctgctctacagagcttcagtgtgagaggatcgagc

SEQ ID NO: 590203 - DNA, 242 bp, Homo sapiens
cagcaccagaggatccacacggggagaagccctacacgtgcagcgagtgtgggaaggccttcagcgaccgctcagtcctcattcagcaccacaacgtgcacaccggggagaggcctatgagttcagttagtgttggaagaccttcagccaccgttcacactgttgatcacgagcggatcacaccgaggaaagccctatgcatgtacgatgtggaggtcttgtttcagcattacacttatcag

SEQ ID NO: 590204 - DNA, 227 bp, Homo sapiens
tgattgcatatagaccatgcagaaatatcttacatcttctgttaataatatttcaatagcaactttatcaaataatatacctacttgccctgtacatatacaaaataatgcatacatgctcacacagaaaaagagtagtccttaaactcaatctatcataacggtattactatcttaacatgtctacaggcagcgtgtcacaagggttaagagacatagaaggcaat

SEQ ID NO: 590205 - DNA, 285 bp, Homo sapiens
ttgaggaagactctcgaggatccccctgctccgcccctctctgtctgggaagtgaggattgcctctgcccggccgccaccctgtctaggaagggaggacagcctctgcccagccgccaccctgtctaggaagtgaggagtgtctctgcccggccacccatcgtctgagatgtgaggagcgcctctgcctggacgccacgtctgggatgtgaggagcgcctctgcccggccgccaccctgtctgggaagtgaggagagcctctgcccggccgccaccctgtctagg

SEQ ID NO: 590206 - DNA, 1190 bp, Homo sapiens
ggccaaggaaggtaccttggctctactgccatctcttccagactccagcgccggcgcagcagggaaaggccaaggcaacatgagcggctctggagagattcatgccagtgcacagcaaggtgcacgactagatgagcctctgtatggatatctaaacgaataattcacacaacattactcaatgaatgaacggacaagggaacctgaagattgtctcaatggacgtgcgttcagggtctggttgtaggaacgatcgggtcgaacgttaccagagatgctcccctttcccatcagtcacacagtaggatgatgcgtgacgtattgaatgaaagatccatcatactcataaatggaaatatgaatgcggagccgattcgccaatgtataatacaatggactcgtccttcaacgatggtgcatggtgagtcacgtccaatatactactggcttcaattcgcttcaacgcacggagctatctcacgtgcgaactcctttcaagtccttaatgtccagcacagggcaattgcttcactgtggatacagaatacttgttcggtgtcatccactattagtggatttctccaactaggaaatatctagcgccaatggattcggcttctacacattatacacgtgcaacttactacgtagctggacattccctaaacactggtaatgtgactagtcacgttaaaacgatacaccaggacttttctatcctccgtgatatccaattggcacagcacagagcatgaatattaggctttgtagtaccaatgtgggtacatgaacgtagtccgcatggtggtgatttcccaatacttacacgaatcgtggagtcaactggatccttaatgtgagggaaactttgaagcaaagaagtcagcttgtttgcagattaaagcatggaatttgctccagactttgaccaggcgaggcgaatcattttgcggggacagaatctaacaggttgcttgaatggaacaaggcagtgggattgaagaagtggagccaaagagtataagttaaataacaacagcattaacgtgaagggaatacttaggtaaaacaagcagcatgcagaaaaccatcagagtatccgcaacgtccgccaggcgggagaaatatgccgcgccagagccgtaggaaaaccccggtcccgaggaggactggtcaaaccttcaacaaca

SEQ ID NO: 590207 - DNA, 553 bp, Homo sapiens
  misc_feature (351)..(351): n is a, c, g, or t
  misc_feature (392)..(392): n is a, c, g, or t
  misc_feature (553)..(553): n is a, c, g, or t
atatatatagtaaatatttgtgtatttttataaaaacaaggtcatatttacatagttttacaactttttgcaactttctttgtctttctgacaatttgtcgtgaatatttctccatgtcacatccatgtatcatcttaattattatcctttaacagctccctggtagtctcttttgcggatggaccatcatttaattcccttgataggcaaactcaccacttagcatgtgttgtcagtgaaccccattcattatatattactttcaaaagattttttctaattgatctttgctcttgtattttcattgggatttctatatgccatcttgattttcataagtttgtcttccnctgagggctggccactcttttttaaaaattgagatataatntatataggatagaattcacctttttaaagtgtacaattcagtggttgttagtatattcagagttgtacagccattaccactatctaattttcattttcatcaccttagaaccccatatcctgttcctccctcctcccagttctaagtggttcttttgtgcn

SEQ ID NO: 590208 - DNA, 200 bp, Homo sapiens
cagaatgattccaccgatggcttgtactgctgccatactcgcgggctcatgtgggagggcaggcagaccccaaggcagccatcacgggcaagggctggcagtttgattcacgtcagatctgtgtgtgtgtagtgtgcgtgtagtgtgtagtgtgtgcagcagatatgtaggggtgtcaactcgtcatttgcaggtgtagg

SEQ ID NO: 590209 - DNA, 339 bp, Homo sapiens
cacgagcacgcgtcatagctgtcgtaggtgcctgcggctctattcttcttccttccatgatattttttcccactattcttcaaattggttaattttttttttttaagacagagtcttgctgtgtcacgcaggctggagtgcagtggcccaatgttggctcactgcaacctccacctcccaggtacaagcattcgagtgattctcatgcctcagcctcccgagtagctgggattacaggcatgtgccaccacacctggctaataaatggtatttttagtaggacatggtttcactatttaggccatgctgatcttaaatgcctgtcctcaagtgatctgc

SEQ ID NO: 590210 - DNA, 1049 bp, Homo sapiens
  misc_feature (714)..(714): n is a, c, g, or t
ccgccgtgagtggtggcacgtgaaccttgtgagctgatccgccgattttagacgttggatgcctgagcaatgggcctcgtcactacgcggttgctaggtcggcctcccttcatcgctgtgcctgtgcccttgaatgcaagtcgactcctgtagccatccgcctgtcgtcgccggatcgccgattaatagtcgtcccttgtcgcacgcagatgtgctctcgttgtcaagcattccgttgccatcctcgaactttgcttgcagccgtggtcctatggtcttgcccactctgctggatgttgttgctgaggtcccttcgttggattctggcatcactctacccggttttgatctaggattcagctagcactgtgcgaccagacctttctactacccaccaatttgcgtgctgagtgattgcgcttgatatacgacgtgctggtatggttgaggtgtcctttccaggcagttggcggccagagcgtgcctttctcagatagtgattgtcttaggactcccccaatcttcggtccacagtcttttcgggtctcgtcttggttatgcactaattagatttttgggggatgtctatccaggacaaggaaacgctcggcatatggcaccaatggccctatgttcctggaagtggctgaattgaacatacgctctttcctatctaatgtgatacatgtgaatcgagttctacgtgatctagtncatatataatcgattcttatcatagtacccaatacttttgatagtttagacttattttgtcatccggacggataggtataggaaacggacactcacgatcccactttaaggaggtcccttgcattcgcgtaatacctgccggtggatggtgcccctgtgacatcgctaatgcatccttttggtttcctcctatttaagtacgaaggggaagtaaaagtcctccagaggcttcagtgtccgtcacttcaagtcgggtccataactccctgtgctgcgctagtcgctaagaagtttacgtacattctcaggtctcactccccttacctacgtaaacc

SEQ ID NO: 590211 - DNA, 1472 bp, Homo sapiens
  misc_feature (510)..(510): n is a, c, g, or t
ccggtatgatgtgctgttaatggacatgcttgtgtcccgagtgcctcgaatattatgaggaggagcctcccagtagacgccttggtgtggtggaaatccacccgggggatgttatactctttctctgcggtgcaaccataaagggccttggtggagttctcctgggaggatggtgtaacccctggggaactaatttctctcacggggggtttctcaaaggagcgcttgagaattgtttgatggggcgcccccctctttaataagggggccccaataaaagaggggccttttttccccctattgggggggccccggccgccccatagtggcctcaagagagtggcctccggggaagatcctacaggacacgtgtgtgggaggaaacgccacttggccccaccaactatttacatggtgtaatgccccgcaacacgcaggcgccccaaaagatgtgtggttcccctgagaagactattgtgggagagtgcccccccgccccccgactgcgcncaagacgacgggggcctcaaagagccgcaaggggggcccaaattagggggcgccgagcgcgcaacgacattgccgggttggaagattaccccacacgggtaggaccctcgagatggataacgcttttccatagtccgtgggcccccctcgggaaccactttcgacagatttctgcctcaccccctatatcacacagggagaaagctcgtctctttgtgaaaggggcgcgcagaggagagaaggacacgcgcgtttgggaaagtttctgtggggaagatctccacgagaacacacttggacgttaattgttcacataccgagatgaccccacactcacaggcggggctaataagccaagggttgggtgttctgagagctttcgggggcacttatttggggggggcgtctctcacacacaaggctcccccgggctctctcacaggttagcacaggccttggggcttccacagactctttgggcttttctggcgcacagggggtcgtccacagcttccttttcacagcccgcacccaaggtgcctctccacggggcccgttggtttttgaaaaggaaagattcgaagagcacacctgtaattgggagaagctctggtggttttgaagttcctctcttagacttcctgcgcccaagttggaacacacttgcggcaagcgcctcttcccacagcctacccccttcctgcgcttgcgcccacagagagcctctgggaaaggagaggcccgctaattgcacagggtgagcacctggggaacacggagaacccaccctgaggggtcagccctagccctcagcccacacctggggaggtttaactaacctggggagaccccccttgcccacaggctccaggtagccaaaacacaattcacaattggtttttttttttggtcccaaaattaaacctcagctagctctgccaatgtccaaaaaaaaataaaaa

SEQ ID NO: 590212 - DNA, 320 bp, Homo sapiens
ggtctctgggtctaatcccatcctgggccaatgcttaaatactatttggtggaaaataatccttggagacagatttcagctacctcccttccaggtccgattaaactgggtggtaatggtcaattggtggtaataggttctacctgtgttgaaagaaaaaaaagaaagaaagaaagaaagagaagggaaattataaggtcaagttaccagtttggaggtttggtgtattttcctggaacatacttcaggtgagaaaataaaaaaaatggttgacaaggcgtgtcagatagagatattagaggacaaagtgctgaagggta

SEQ ID NO: 590213 - DNA, 462 bp, Homo sapiens
  misc_feature (8)..(8): n is a, c, g, or t
  misc_feature (11)..(12): n is a, c, g, or t
  misc_feature (18)..(18): n is a, c, g, or t
  misc_feature (29)..(30): n is a, c, g, or t
  misc_feature (391)..(391): n is a, c, g, or t
  misc_feature (395)..(395): n is a, c, g, or t
  misc_feature (411)..(411): n is a, c, g, or t
  misc_feature (424)..(424): n is a, c, g, or t
  misc_feature (449)..(449): n is a, c, g, or t
tgcatggnatnnggacgngacgaatatannccaataaatctcatctgttagcagtgtgatctcacgtaattttttacggttaggggaacatgatcaaaagagtttggagaccactgttaggaagaaagagcccttgtctggtggttaagaaccttagaatattccctttataaaacgcaaggtcttgggctattcttttaattgatcagctgttagagacctctcgcttgtaaaatgaggatcctgaactgaaaacatgtgaattaaaatttgcccttttcatagcaagattgttaaagtgataatagtttttcattggtaagattttctcaatataaaagtaatacaaccgcactaaattatattttgaaaatgaagactaggcaaaaangggnaaaaggtggaaaaatnccgttacacccanttccaagccccttttccattcctgnattttccctttgt

SEQ ID NO: 590214 - DNA, 856 bp, Homo sapiens
  misc_feature (435)..(435): n is a, c, g, or t
  misc_feature (459)..(459): n is a, c, g, or t
  misc_feature (507)..(507): n is a, c, g, or t
  misc_feature (593)..(593): n is a, c, g, or t
  misc_feature (679)..(679): n is a, c, g, or t
  misc_feature (693)..(693): n is a, c, g, or t
  misc_feature (718)..(718): n is a, c, g, or t
  misc_feature (819)..(819): n is a, c, g, or t
tatgaacgttctatgtgctcgtcgaatggcttgggaccatgcctatgtgtactgggtctcatgattggcctgtgaaggtaggatacatcatagtcaccattataggaggattatgaagatacgagaatgagaggtagaaatgtcatcattatgagcacagggttggtaacggaatgtactgcgtacttttaccaagtacgttcttgatggctctgccgcatcatggaaccatggtacatgttctgctacacgatgtcccacattgcgtggtgtcacctgtcattacgtggcgcattcgttatttccaattccttaatctgcgtgcattctgtggttcgctgctatcgtagctgtttagaaatgatcttgaaatatcagcattgtagtgcacttatttgcacctactcttgttctgagagatgctgctcaggatgncattgtgttctactatgagctatngtatataagcctaaatgaagagcgagcatagaatgtagaggctttgantacatagagattaataagaaaggaccgcaacgatgtgaacgctaggctgaccctgaagagacacaatgaccataaataagcgggantctatgccttcacgacggacacgtgagacactctttggcccgtggggggtccaagatgtggtgttcgtcgcaaccgcaataactgngcgataggcggtanacgtgatcaagcgttctcagaaagnccgccggtacctttggaggagacgtggcggttcgacgcgggacgcactgtttgtaatttaagttgctgtccttgaaagtggtctcccagttccacagggcncccataagtgtgtggtcgccccccacttatttccctg

SEQ ID NO: 590215 - DNA, 468 bp, Homo sapiens
  misc_feature (450)..(450): n is a, c, g, or t
aactcagaacctcaggtttcctcctccgtaaaatggggctaacactgcctaacataaggtgctgctcttccatgccagtgagacaggatgtggggaaagcacctagccccttgctcaataagtagcatctgttgttattctacacacacctgcaggggtctgctatttgatactccttccttcaccacccttcactcacactttgtttttggttagagagtctccatgtccaataaagcttttaagttacacacaggtaaagtattgggcccagaagctgtatttttatttcacgggactttgatattttcaatatgcttcagtgtaacacaaagcttcctgtcaggccaagctggaatgctgccgtcttccctacatgtaaggaattacagtgctggccaacatgaggttaataccaccttacctaggcctcatgggttcatttcctcncggggtttttttccgggg

SEQ ID NO: 590216 - DNA, 235 bp, Homo sapiens
gtaacaccaaagagaaattactttttactatgaggcatcaatttacaggagagatgaaccgctcatctggagatgattagtgtcacagggtattttaagcggatactctcaacccttgagcttactaaaatagcaacaggaggtggctataaaattacattagtacagtatgtactacagttaattttatgaagttaggatgtaatattgcctcttgtagttttgtttttttttg

SEQ ID NO: 590217 - DNA, 204 bp, Homo sapiens
tcgtgcgatcgcagaattaaacatcaaagggacccagcggcatacttccattcagggacttgatacacaaaatgtatcataccaaaaatactactaatataactacggtgtccagggtgcccatgatcccctctcttcctcccgcagcgcgaaaaaaatgagttcctattttctctgggagagggggggattgattagaaaaaa

SEQ ID NO: 590218 - DNA, 1041 bp, Homo sapiens
ggaggccgcaactcaggaccgatgcctgtcaccatgtatcgaaatcagtatgacaatagatgtcactgtattggatgcccccagggcaggacttcatcaaattagaatatgcaactggaagctgttaaacaaggttcagccacagttggtctgaacatcaaaaactacatgcagtctatatgtgctcagcattgaaaagggcgcaaatcagagccttgcatgctcatcagaaacaaaacttctccatgattagaacaaccactactcgcgctactccatcaactcttgccggcgtgccctataacctgccctgcaccttgcctacgcatcttggcttaaattgctacactattctcatactcgcctgctcacgcgccgctgctatctgcgacatatcaccaagcactcactgctactctcagcacctacggaccccacactgcacatgctgctccatccgctcctatgctaatctctcctacacttgcgacagtcaacgtattctcagtaataccgatactaccaaccgcacatatgcagccgcgcagacaaccagtactgagcctgctactgagctcctccactctaatctggacataggactctcacattgcacctgtaacttacttggacgggcccaccatccaacccactatagatatctcccaaatatccctctggtgtactccaatgttcactgacacttacacccgtaaactatagtacaggcatccttggctacaggcagtccccaacctggcataccacacattacattggagaacacgcacaccccagggcatcatatccgctcccaacaaactccaacaatgcgcacttcctatcatcaaccctgtcataaaccacactacatggcagcaattcgcaaacgacacctacaactttaatttggagtagcatccgggacacgctttacacacacattcgtagaggaagccgattggaataacccaaagtgtcgtctacaaacactttggtataacactctagtcataagactttcttcaacttcacccatcg

SEQ ID NO: 590219 - DNA, 440 bp, Homo sapiens
acctacgacttcgggtcctcagaccaaccagcccaaggaacatctcatgaatttcaaatcgggaccccactggaaatcggactgtccaacccggcagccactcccagggcccctagaactctggccaaaggctctctgactgactccttcccagatcttctcagcttagcagctgaagactgatgctgcctgatcgccttggaagccccctggaccattacggatgctgagctttggataactcttacagtagaggattcccaactatatgaagacaccctagctggacgatcagttcttattaagaacctgacccctcaaactctacaacctcgatggactggaccctacttagtcatctatagtaccccaactgccgtccgcctgcaggatcctccccactgggttcaccgttccagaataaagctgtgcccatcgga

SEQ ID NO: 590220 - DNA, 688 bp, Homo sapiens
tgtcagactcccgttatagaacgactctgtgctcctcccagttacaggtgcgtgctctgctcaaagcactgttgagaaggagatagatcactggcttataactttatggggacggtatcttttaaaataatagttaaatgttacctctgaatttacttccttgcatgtggtttgaaaaactgagtattaatatctgaggatgaccagaaatggtgagatgtatgtttggctctgcttttaactttctaaatccagtgacctctgtctctgggacttggtgtccccaactaaaatttgaagtagttgaatggggtctcaaagtttgacaggaaccttaagtaatcatctaagtcagtacccaccaccttcttctcctacatatcccttccagatggtcatccagactcagagctctctctacagagaggaaattctccactgtgcacaacccacctttggaaagctctgaccacttgaggcctgatctgcccatcgtgaagaagcctgtaacactcctctgcgtctatcctgtgtagcatactggcttcacatcaaatcctgattctctctaagtggcatagccatgtggaaggcaagccaaggctcacttcacagagtcaggctgctcctgtaggtcaaccagactgtagaaaggctctcatttgtcttacatgcctttaagacagct

SEQ ID NO: 590221 - DNA, 1516 bp, Homo sapiens
cgtatcccaaagtataagccgtcgagcctgcgcactctggcctgagaccctcgacccagccgagagtacaacatatctccggaaagcccggcgggcgcaaagccgagtcggattgggcataagagaccctagactgaataacggagatgtgcctgcttcagtacaagcggatcccaatcgccgatgggctcatcgatagatccttgcctggcttcgattggtgcctatgcgagaacaataaattgtctatcctaatgtcagacccatctcccttaaaaactcactctatgtgggagctctcgtgatggatattcgggccaccctctatctgtcactttgattgatatttagtcaatagactgagaggggtaagttattgcacgacccatgaatgtatatatgtcatgatgatgttgaatatggttcactatttcatatgggaccaacgcatcgcagcatctcattctgctctagaatagaatattgccatcccagtgtagcgcctacttccaccgacgcatatgggggggctttgatccgtacatagcccattgacccccgtttcgtcttcatacttttactttttaaattcctttataaatattcccgggttatacccagttgccaaggcgactggtttacaggataggtccacgacgcaacgtctttcttacaagaggtccaaggccttttttgtgttggtaactctttagtagagttactgagcgtttttcaacatgtgtgtctgttgtgtttgtcagacacacagggaagtgaaactgtgttatctaccatagtgcgggggctataaaaggtttagctttacggacatggaacaagttagcagtttaaaagagctacataatgttataaggattaaccgggtgtatacccattggatattatggcaggtggaaatactttcttaactttttgaattggttattgcggatcaagcaaagtggacgggccgacaaactctaacatcttgttttccaagagatctgccgttaattctaaaatttaacccaccattacaccgggtggaggccaacgtcactgcaaactggcgaaccgaaagagtcctatggcgccattggcttggttcgtggagggcgcaacatctaaagcgcttttggcgcctggttgccacagggccaaccgaccccctatggagccggattataaacttggccagatacggggcacgggacgcgaagacacagactccgcaagggacctgtgacacgtccctctcgtggatcacaacccctaaaacgacgcccaagatatacgctcaacaccagtttgccatgtgggggtgtaaacattaaagaaaacccgcctggggaggtcacttggacatgctcaccccgcagagaggctttgtgcgatggtgatttggacccacacgtgtgagaagagtcccccaaacgctccgacatgcttaaaggacccaatctggtgactgttattatacccttggggtgccccagtctgtggtgcaattggcccg

SEQ ID NO: 590222 - DNA, 464 bp, Homo sapiens
  misc_feature (346)..(346): n is a, c, g, or t
cccgacgatgcctgcaccagaagacctttaacacgtagccagctgttttccgctgtgaaatctattcaccttttccagggcgaatattaaactcattgactcacttctcgcttcaggctgttattttcccaaaggctagactcaaatataatgactcaaaaattatttacatcatttcattctgccaagtatcagaatctactctggacaagactccaacagggaaagccaagagttaaaacataaggagaaagaagagaagagagggcagaggaggacctgggagaagagttgtagcgccaaagcatcaagtaaactgaaacactcaacaccgtccacgcacgtnagtttactggtttaaaaaaatcaaaaatcgaagaaataacgcgcgcccaaactcgtgatggccacagattcatggcatttaaccgatgcccctctgcccgctccccgtcacacccggc

SEQ ID NO: 590223 - DNA, 180 bp, Homo sapiens
atcatcaccggacttatgacaggctgatgctcagcctttcggatactaaacataactatgctgccagatgggagacacccttccttcctgtcagtgtcttagaaatgggggtgagcaatcagcagcaacagtgtggcaagcgagagttcagtcagagtagtgtggtgagccaaaggcatg

SEQ ID NO: 590224 - DNA, 874 bp, Homo sapiens
agaacaaaaaaaaaaaaaaacaacaaaaaaaaaaaagataatagaaatacaaaacgaatcgaatgactcgagtcctgtgggttaatcggcaccgaggggatgctgggccagggataagcagccgtggtctgaagatagagcattagaggagccagagggagcggatgcggaacctgcgtggcagaggcggggcgtagcggtgcagcatgatagcaggaacatgtgatcaagtcttccataccagtggaccagtgccaaataccagacttgcacgtgccccgtacttgggccccactgtccccagaaatgcagctgctgtgatcatgggcaatatctttggaaaccttctcaagagcctgattgggaagaaggagatgcagcatccatgatggtgtggcctgagatgccagcaggaaagaccaccatcctatacaagcttgaaactgggggagatcgtcaccaccatcccataccatatgggttcaagtgtggatgacaagtgggagtatacagaacatcagcctttacagtgtgcgatgtgcgagtggccagtgacaagattcgacccctctggagacactacttccaaaacacccaaaggagtgatatcatgtggtcgaccagccactgaatcgggagcgacgtaactgaggccgggaaaagctgctgagacatgctggcggaggactggccttccgggcatgctgtactccatgtgtctaggcaaccacacagggatctgcctaattgctttaacgctgcttggatcacgtccgcctgggccttcatcccttcgacccggtactggtcttcggcaccttgctccgcgggccgctgtcacgtctgttgtgcccttctacactcattgcctctc

SEQ ID NO: 590225 - DNA, 183 bp, Homo sapiens
ggaaatctatgttcccggcccgggaccgacgagggctactaccaagtcaagatgcgcaacatccgccgcttcctgtatgacggttataagtgcaaggtgacccctgcgcctccctgggcgggagatcacccaccaggagctgtgcttggcctttccatatgcaatggctaccgtagctcgaat

SEQ ID NO: 590226 - DNA, 163 bp, Homo sapiens
ttacttgtcggtcttgcagttaagcttacttgtgttattgcactttatttcgttctacacaacaaattggtttcatttcaatttaagtaaacctttggacttctatgatactttattatagaactccgtcccagagaaactaccaggcagccactgtcgacgc

SEQ ID NO: 590227 - DNA, 773 bp, Homo sapiens
agcggctttttccaccacatgagaacacagtaagaaggtggccatctacaagacaggaagagggccctcaccacgctagctccccagtctcagactttcaggctccggaactgtgggaaaatgaatttcaagtctttaagcctcccagtctatggcattttgttaaggtagcctgagttgactaataacagtaaccatttgtagagggtttatcccacgtttacctggagtaacaaagagagatacatccctaaagaagtcattgccatgtcataggaaaatctgtaccaggaatgttccctgggcagactgttgagaaacttcagactgagatttagggagaagagaagaacctaggaataaagcccaagtcaaatctacattgtctgaatggaagattcttgaattcaagaatgagaacctcaaacagtaagcagcgaggaaaactagagagcagacgaagctcatggttaaaacccagtcttttatagctgacagatatgggtttaatctcagctttatcagtaactgcgtaactttgaacaagtaaatttacttggttttagctttcttagctctaaagttaggatataaaaacatatttcataagatcgttttaagaagtaaactactatgcatgtaaaatacatagtagagtgtccattgtagaggaacactcaatacatatttaataaagtgcttaaacattctcattatcaacctgaacaaagagcatacttgttaagtttgccagtgacagatattaaaagtgg

SEQ ID NO: 590228 - DNA, 903 bp, Homo sapiens
gaagaattttctatctttaataaactttttcttgttttttttttccagatggagtttcgctcttgtcccccaggctggagtggtgcagtggcacgatctcaggtcactgcaacctctgcctcctgggttcaaacgattctcctgcctcagcctcccaagtagctgggattacaggcatgcgccaccaagcccagacaatttttaggtgtattcagtagagacggagtttcaccatgatggccaggctagtctcgaactcctgacctcaagtgatccgcccgcctcggactcccaaagtgctaggattacaggcgtgagccagtggcccagcctctttacataaatatttttaagtgcatcttccccttcaggcttggtagggagtcccagtgctacaacgcatggtatgttcccacagcagatgtgtcctgaaacagtgtatagaaacctgtactgggaacctgaatgctttgggacattgcaccgggcagagtctgccagctaaaggactcctggcaacattctgtgacatatgaaactggaaacctggcatttgtcgaaaacctaattgtgcccattttctcacatttggatccatgggtataacaaagggagagggtgagataataaatgagacaagaggacaccacaggtcaccctcggcacgaaatcgaggggacaaattgcgccccacgcacgactgacacacgggacacaagagaaccccgagaaacaacgctcataatagccccgaggtaacgagaaaataccagcagaggcacaaaaattaaacacggggaaacacaagcggccaagttgacccagtgtcgggaacccaagctgaaggcaccttggccacacccaagtggggaaacaggggggcatcaccacggccaaaacgtg

SEQ ID NO: 590229 - DNA, 166 bp, Homo sapiens
ttcgcctacacaattctcggatccgtccctaacaaactaggaggcgttctggccctattactaatccatcctcatcctagcaataatcgccggtcacgagatatctcgtgaccgggcgattacatctgaatatggaaccattggttataatcgccggtcacgagat

SEQ ID NO: 590230 - DNA, 542 bp, Homo sapiens
ctgtggtcacagaaatcacgtgtaccccttcataggtagatgtaatgcacatgctcaggccttccccaggttcaatgtttggtaagtgagcttcttccagacatgcacactgtctagtcacagtatctgtggtagatcgaattgttctctcacatacgccatttacctccttgtccacagttaacactttatcttccattcccgccacacaccaatctttgtgcactgtagtgccagtgtccaaacaaagttgcatgattttgttcttcgtgactgagaaatcagtgatcccgtgtaaccgaagcccggtccagccacgccagcaggcccttgacggcgccgttgagcaccgcctccgaggtcagaaactcattggggcccttgcggaaggtgttgccatcgtaagcggtacttttccgtcggctacttatgtagttctgtacattgtggcaagattctctcagttccagatgcaagttcttcatattctcagtttcgaggccataattcagtgcacagagaatgtccacagcctcccacgt

SEQ ID NO: 590231 - DNA, 1414 bp, Homo sapiens
acccacgcgttcggccaccgttgtccgagcccgacgctatgtacaacaaaggctccgtggttctggcctacagatggcggacctgaacacctcgtgcattcctcgtgtggctagaaggaatcaaggctatgacgtcatctgcctatcatcggccatagattggcccatcaagtgcagcacttctgaggtaagcccacgcgacagaaggcactgcaaggctctggcggccaaacataggtgttcgcttagagcgcatcgtctcgcatgggcagtccgtggcacggagttctatctgtccggccatccatgatctcagcgacactagatatgtagagacacgtctaaccctccatgcgtgccaccatctcattgactcaagggactcatgactatcggacctcagcagagacgaaagatggtgaatatctgctccaagacgtgagaagagtcgcgtccccacatggtaaatgttgtctccgaccgagagacctacaagcgtcccatcggggactcgcatgccacggtctcccgcgattttgaagactcaagcctagcctaacatctacttggtactcccaccccagtagtcaccaggggtcccattgcctcctcttgtggaagggagtggcccctggaagtatctactagagcgtggttttccaatcggttgccgactatattggaccctgtgcactgggaacgtcaacggcttacatggcacccaccccggggaatttcccccgatattccaccggggtttaaaaatccccccaaagtagccctcagcgtttgacgtacgacctcgtgcgattgcaagttaaaacccctctaagtgtccaacctatttcacaaggccttaactgaagggcgcttgtggaacacgtctcattggtgcagataaagcccgcataggaaaactctatatgttgggcacgtggcccaagagcttcatccttaacatgcggacaaacgtaccaccatggggaaacgcccggcgccacacacatggatcgcccacataattcaacccccatgttaaacaatcttcttgccgacgtaattacgaacgttttcctccactaccctgtgggcgatcgccctgtatgaaaagcgtatgcagcccatcggtcaaaggaaatgttcgacgaaccgcaactaagaaccctacgtttgtacgggctcctttcaaatggttcccttggataccgaacgtcctacgcgtgggcaaggaacttggcgggttgtaaccgtggtacttggccaaattccgtggagcagaacacccgcgactatctaggttgggaccgtataacattctccagaagagagtcaactcaaaggggaggacccccaggtcattggcacacgattccctgttactccaatgggtgcacatatgagagcacttcagaag

SEQ ID NO: 590232 - DNA, 316 bp, Homo sapiens
tggggtatctcaaaagagcacaggagccaacctgaaagagctctcaaatgtccaaagctagaacaatttgagaaaccaaagaaatgataggttcgcatagcccacagaataatatatgtatatatcccttgaattcaaactggactggcagggcaaggcagggcacagcaagcacaactctccctgatagcaagcaatccaattcaaataaatgtagcacatgaaagcaaaatagcaaaataactcattaagccaatcattttactcaatcaattagtatgtcaggcaaaacatccaaactgtgagattgctaaaa

SEQ ID NO: 590233 - DNA, 365 bp, Homo sapiens
atgagagctgtttgcacacacccactacgcttaaactgtctgccttgagcggaagcacactgaaaccctcaccacaggcaggtgtcccgaccggaactttccacccaccagaagcgagagcactcttctatacatatcacccagtcgtaggagtactgatgctaaacacaaaaaggacaaagaaaattgactggctaagataaacccatgaaaaatagtatatataactgatccttttaaaaagagggattttaaaaaatattaatttgccatatttactagcacttccctaccgaatgatttgttttggaagaccttgtaaagacggacttaataattcaaatgctcataaaaaggcttggaca

SEQ ID NO: 590234 - DNA, 113 bp, Homo sapiens
catgcagttccgcaagccgttgcagcacctgcgccacccgcaatcccggcagtgatgtatcgacctcgatggcaagacactcgcgcgtgtatgtcatcgacgatgttcaagca

SEQ ID NO: 590235 - DNA, 418 bp, Homo sapiens
ggtttcatgcctcttttatgagatataaaatattaaattgcagggtgaagacactgcacattcctgattttctgccccattatacttctacacattcagtttcccttgtccctttatagcttcactactacacataagtgcccattggaaaccactttttttggatgttttttaacctcttattttagggaaattggaatagacattattcacctttcaataggagctgcaactgcctctacagtatgacaagatacttgtttggcagtgtttctcatttctttgttactacaccaagtaaagccattgagttaataatgctatgtttctatttcggttattttaagtgtaataacagtgttcttcattttatttatagctccaaaaggaattcttcatttgtctcctgatgtttatc

SEQ ID NO: 590236 - DNA, 887 bp, Homo sapiens
ggtttggattgagctttgtctttgaggactattgtctctgatgagctgagaaacaagagtccacccagcgcaagtgaagtctgtactctggtggcttccagtggtaaaaggcatgttggaggcaggtcaagtttacccatgggggaactggttccatgccaaagcgaaccaatcctgctggccagggaaagttccccaatgggagacaaagctgaggatggcttcctatggtagtctcccactagttgaatgcatttccgccgccctagaactagactacggtgctctatgacctcctggggaactgtgtgggagtggacagcatcacctgtaccaggctgctgagcttaggacatgcgctgttctccggggtggcatcctgtggatcgacagcgagcatgatggctctgcacaatcaccgggcccgggtcaccaccaggatgggcaagactccatgattcagcctcagacaacctcggtttccgctgtgctgcagacgcaggccggtcgccaggggatctgtaagacagccgggtggtgacaaagtgcagaaaagcctttctagggtcactgtcattccctggccctgttgcaaacagcgcaattccaagctcgagagcttcagactcaggaaagaacttccccttccctgtctcccatccctctgtggcaggcgcctctcagcagggcaggagaggactcagctcctgtgtatcggaggaagggggccccagtgtgtgtcgaccgatggctgtgcggcaggatgtgtcctgggacaaggccacggtataatttgacccaaggaattggaacatacacaaaacaattgggaacagaagccatctcacgagtgcattattacagcatataaaatctatacttacccc

SEQ ID NO: 590237 - DNA, 350 bp, Homo sapiens
ccaggctgggcaacacagggagaccccctttttacaaaaacatttttaaaaaattagctgggtgtggtgatgcatgcctgtggtcccagttacttgggaggctgacgtgggtggctcacttgagcacaggagtttgaggctgcagtgacctatgaccacatcactgtacgccagcccgggtgagagagggagaccccctctctcaacacacaacctaacatccccccaacaccgcagcgttcggtgaaacaagtgggattttttgggccagcaagttttccaaactgtatatgatgcatcctgtttccatgtgtaatatattttaatgataaatgtatttttaacagtga

SEQ ID NO: 590238 - DNA, 390 bp, Homo sapiens
  misc_feature (30)..(30): n is a, c, g, or t
  misc_feature (80)..(80): n is a, c, g, or t
  misc_feature (118)..(118): n is a, c, g, or t
  misc_feature (191)..(191): n is a, c, g, or t
  misc_feature (259)..(259): n is a, c, g, or t
  misc_feature (302)..(302): n is a, c, g, or t
atgggatttctccccagttcaacagatgtnacaaactcttccttccaggaagtgtggctataatgccctcagtcatgatncctcattattccccacttaatcccctttcctacctctntcaatcatagcaaggcccaggcgcagtggctcaggcctgtaatcctagcactttgggggctgaggtgggtggntcacctgaggtcaggagttcaagaccagcctggacaacatggccaaacccatttctactaaaaatacnaaaattaggcagacatggtggtgggtgcctgtaatcccagctnctcaggaggctgaggttggagaatggcatgaacccgggaggcagaggctgcagtgacctacaattggccactgcactcccagcctgag

SEQ ID NO: 590239 - DNA, 976 bp, Homo sapiens
gcagaagtgtcaccctgtgtggtgtctccctcgtgggtgctcttcccctagacctccccctcacttacataaagctcccttgaagcaatgaaatgatggtgtcccagtgtgctgcagaaacttggaatgcacaagcctcgtgtggcatgcgggatgcggaaacgacggttgctatatccatgttcctgctctctgctcatggtgtggctgtgacaaccctggcctcacttgattcatctctggttttcttgccaccctctgggagtccccatcccattttcatcctgagcccaaccaggccctgccatttggcctacttgtcccttggcacacttgtacccacaggtgaggggcaggacctgaaggtatttggcctgttcaacaatcagtcatcatgggtgttcttctgtcaactgcttgttcattgattcgcgggatgtttgccccgaatgagcaggttgaggacaagactgtgggtggcgaggccctgcctgacccatcccttaaccttactggccccagcctatgtggaggcaagtggaatatcttatattgggcgatatgggggctcggggagtgcagagaatctcttgggagatctgggtgagctcttgggtgcattctgtaacctacttgaatctcaaagcacaatgtggatacggggaccaaaggtcacggacaacatacccctaaaggacctgcgtaccgcgcacagatgctgactgaatggacgatccgcacgaataacctgaagaccatcggcactcactaacttcccagactaggcacccagcctggcaactgacggaagccacaagaaacaaacccgtccaaaacaacggcccgcaccaacgcccccgaacaggaggagggcaacaggccgcaaccgggagccgaacaggaccaaccacacccagacaaaccaaaacagaaagcaccaacgaacacagcaacaacacacacaaatacgcaaatg

SEQ ID NO: 590240 - DNA, 441 bp, Homo sapiens
tccataaggtgtgccagagacaagaagtggcatgttctgtgggaaaatggaacaacacagagttgccaaaaaccttcaagttgtaaaaaaaataaaaataaaaataaaataaaaataaaaaaagtggtatctgcaaagtgcaataaagcggagttcaataaaataagatgcctacatagacttctgttctgtgcctttttcctccattctggaaggtactttatgcttccagggacttggcttctctgggttctgagatgaatcctgtggttgctcatggacactcccatatgtagacatttaggatgtagttactggtgtttttgaaaaattcattggctagattggctagttttcatctttcaaatatttatggaagtctctacatttgatattttcctgtcatattctcttggtcttaaagatacatacatatatttc

SEQ ID NO: 590241 - DNA, 436 bp, Homo sapiens
aaagaaaaaaaaagaattaccaagagaaggggacttctcttccagtttctgtaaggtcttacattgcctgactaaaatgtttcatttacctctaaatttccatatccttctggctgtagataaataatgtagttttgtttatgcatttggaattagtggatttttttgtcattaaaattgttaccactggtaacatgtgacaagcacaccacaattctccctatcttgtgaagtagtataatttaaatcgccttgaacaaaaagtttatataaaaggtaaggtaaaaggcatctctgaaattcacagaagcctaggaggactggggtaagcggaataaacctagagaagggagacatggtagggattcccctttatactgtgaagttacatgcataaaagggtcaaacctgtagatgcaaaaaacaaaaaaaaaga

SEQ ID NO: 590242 - DNA, 114 bp, Homo sapiens
actctcggcaccacctctctctctacctacccgtccccggttgctacctcttacccgtacccggttactacctacttatccatccccggccaccacctacatacccatcccctg

SEQ ID NO: 590243 - DNA, 712 bp, Homo sapiens
cgacgcgagcggccgtgtgttggcgggcagactggccgttcggaatgaagattataacaggtggaacatgccataggtgatatcatgctcggatctacaagcgttctgatccatacatctgaaggagcgggcttagttgtactgaagaggaatacttggctactgacggagactagtatgataggcatatatgtgcatatacgagcttacatcagtgaggccatgcatgtgactgttgccaatgctaaaagtatagttgctgaaggcagagtgctgacacagaatcacatgctaacttacaatgatacaatgacacattgccagtgtgacccaagctgtgtgcagatgagccttgacagaatgatgacactgatcaaaaacagagtgcatgtgttggcctgtaagagtaatttgatacatgtaggatctatagagaatgaccgcatcggtttatatggacccatatgggacctttgacactgaacgctaagctagtgcattgatataagggattccagaatcttcgattgagatgccacaagtaatgcttttatagacatcgcaatgttaactatgatgctaaacatgaccggagaaagctgatgcaacaacaatgactagcacaggcacctggccgatttcaatgttacaagggtacttgatcaggtttaagcctttaagaatctgatctgaaattcaatgtttggatttt

SEQ ID NO: 590244 - DNA, 194 bp, Homo sapiens
tgctgggattacaggcgtgagccaccatgcccggccatgacacattttttgactgagcacctaggtaataagactcttctccattgcttggactctgtcagagaaggtattgtgatgtatcactgggcctaacacctaggtgaagatactgtcttctcctgcctggacactccataaattgtatattttgatat

SEQ ID NO: 590245 - DNA, 1002 bp, Homo sapiens
ggacgcgtgggtcgctcaggtcacccagcacccttcggaacccagaaggcccgcgctcttgaaggtgatccccccttggtggaggaatggcgatggcccctgcgaggacgatggccccgcgcccgcctctccccggccggaatccctgccgtcgccttgtggtttctgtgcacgctcggcctccagggcactccagggcgggccaccgccgcgcccccttggaactgtccagcgggagccgactgcctcgtaactagattttacactgccggggttgcctggcttcgtgctggtgactacccaacgcctcggatctagcaaacggcagctagcttaccctggagtcccccaccgaatgacgccggggctgggaactgcgtagcagcgcctgcttgcaccacccaagaactgccaacttggtccgctaaatggagctagcaacgcccagacccgccggggcagggacgccagtcgccgcctgcctacctcatcaaactggcatctacggaggcagaaccttcgtgtgcgagttcagcggcccgagggagggcttcatcatgcgtacctcactgatgggaacgtgtaccgctcctatcggcatctgctggaacccatggggctttggagtggtttggggatccccaaaggcctgggcatggcatatgacgttgtaaggtaccatccccaaggaagcccctggtgctgaaggatgtggcataacacagattggggtccctactgtcggggctgtaccggatgttcaaggtcacaagggaaggacccaaccaggttgaaacgtggggcggctctcaggaagggcctaaccggtttcacctttaatgaatagcgttgaaccccccagtggaacggccacgctccatcaacggtgcgttcacccacgagaagaatggctctcaacacaagagggtgcgccgggtcttcccggagataaacgccagattaaaatctctcggccgtgcaaccacctcctgcgaaatgtcc

SEQ ID NO: 590246 - DNA, 260 bp, Homo sapiens
gtcgatgacagcaccttggcatcgttgtgcctaacctggggagacggaagaagcacgccatgggaagtgtttacactttggggacaagttctaagtatttttggagcccattaggccccttgaggttaggttgcttacttgccctttctcctgaacctgtcttccaagaatgtggatttggggaaagtggtcttaaaggattcatttagtcaccctcaaattaagatttttactccatctttctgggcctccacctccac

SEQ ID NO: 590247 - DNA, 130 bp, Homo sapiens
attttttgattgtttagcaattaaaatttatgacattttaagaacctttaaagttacttagttaagggattgaaaaccaaagttactggtttattgggggatctccttctagagtctcgacctgtgcagg

SEQ ID NO: 590248 - DNA, 314 bp, Homo sapiens
  misc_feature (287)..(287): n is a, c, g, or t
  misc_feature (304)..(304): n is a, c, g, or t
aggtataggaattctcgaaggacttgaaaacaagaatcaaacagatacctagacaccaatattcaagaagcactattcacaacaggcaaaaggtggaaacaacccaagtgcccattaatagatggagggaaaaacaaaatgtggtctatcgatatgctggaatattatctttctcttaaaagggaaagaaattctgatccatgatacaacgtggatgaaccttgaggacattatgctaaatgaaataaaccagccaccaagcctgtatgattctgcttatatgagtnccctagagtagtcaaantttttaaaca

SEQ ID NO: 590249 - DNA, 513 bp, Homo sapiens
aaaatgatgtattaatttattgatcaaaagacagggcccttttttattacccaggcaggctgacccccagcggcgcagtcaaggctaactgtaggcttaaactcccggcctcaagtgatcctcatgcctggaccatcacaacgggctgggattacaggaatgagccaccatgcctggcctgtatcatgtaattcaacacattcccatctctaagggataacgagcggcagcgcacactaaacgcagataacttaagggttgcaattaaatcgcactggccacaaatgcccaagctttcccacaatacatgaccaaatggttctgcatgagaaacacacttgcagcagcaataacaatgctgagtgaagagccttcatagacacacatagaaacatatctagctccctgtcttgaaatgcttcccttattcctgttctttccaagaggaagagctaaaaggaagctgtatgagttcgctaatgccggtataccaaattatcacaaacttcatgg

SEQ ID NO: 590250 - DNA, 1044 bp, Homo sapiens
  misc_feature (1)..(1): n is a, c, g, or t
  misc_feature (6)..(6): n is a, c, g, or t
  misc_feature (10)..(10): n is a, c, g, or t
  misc_feature (13)..(13): n is a, c, g, or t
  misc_feature (16)..(16): n is a, c, g, or t
  misc_feature (692)..(692): n is a, c, g, or t
  misc_feature (864)..(864): n is a, c, g, or t
ntactngggnggnggntttgtattggtgggggtcggccgggacgccgggccatccccgtccggggcgctgcttttcttcttccgcgtgtgtgaaggtagtcgcatttgctacgtccttactgtgtccgcaagcacccgcacaaccacacctctcgccgtccccccaacaacactaaacctaggaccgcaccagagggtcctagggggcgccctgacacagatatgtcccggagcgggtattgggagcacgagtgcaggaagtacagacaagagacgcacacattatagcgagaaagacacaacagtccccagccatgaggcagtgacacataattccagatcgctataaactttttccagcccgtggtcggagtttagattaatagtgcggcttacgtgttcgacatgctatcatgactatgagggtcatgtggagggtggttaacagtacggtggtacgggtgtgtgccatccacgacacattccaaccacctctgacagaatcataaaaaacataagcaaggcgcatgtaacgtccgatacaccacagacaaccagcacgcacccggccacccaccctcctcccaaccccacatatcgcacccacgctatcggctacggcggggtgcggagcgtagtacgcgtgcgagcgccgtggtgtggcgcgcgcatgagctgtgaggagagtcgtnggagcaggtcgagtccgatctatgtagtgtctacacacacgcagcctccatatcaccacgctcgaatgcggcacgcgcgtggtaacacgacgggcggaactaactcgtcttgtcacgcctactacccacatagagggagggggacgcgagggctagcatcgtctctcgttantatatacaaccactatccactcttcatcgccgtacctggactgaatattaaggatgagcgactgcgctctaagtggaagtgacctccacatcaatacacaaccagcgtacgcagcgacgtgtagtcgtcttgcaggatgcatcggcacgcgagattccagaatcgctgcgctcgcggagg

SEQ ID NO: 590251 - DNA, 116 bp, Homo sapiens
taaagttgggacatatgcaagacaggcaattgtaagtcagcgacccatctgtactgtgtattttattcattcatcgaggatcttttcctttatgtctttaggcatgattatagctg

SEQ ID NO: 590252 - DNA, 139 bp, Homo sapiens
ctagttattactttttttcttttttgcattgtagttttcagattggagaactaggcaaatacctctgacaagtaaattcgagtttctaggcattaatagacaatcctatctccaactttcatgtgctgctcttacagac

SEQ ID NO: 590253 - DNA, 735 bp, Homo sapiens
  misc_feature (452)..(452): n is a, c, g, or t
  misc_feature (612)..(612): n is a, c, g, or t
  misc_feature (627)..(627): n is a, c, g, or t
  misc_feature (672)..(672): n is a, c, g, or t
  misc_feature (678)..(678): n is a, c, g, or t
gagtacagtagtaagagtaacactgtagccgccaccggcaaggggtgcgcgctggggagcggacgctgcatcccctttctgctgcaggaacctctcatcagaccgcctgagggaagcggcgcccggagacccgccccggcccggtccacattctccccagtgaagcctggactctatggggcgggaccctggtgtggagcctgagcctgatgccctggagccagccccggaacccctgaacctccagccagggggctgccccggtgatgcatgccatgccccgtgggctgatgcctgccctgcccgccgatgcagccatgagctgagacggtcatcttgttccatgcctgggccactgtgatgctttattgatcgattggcaacaagctgatgggctccctgctggacacgggtccccaggccttcagccgcgtccagatctaccacaagcnccacggccaattcctttcgcgtcgtgggccggaagatgcagcccgaccagccaggtggtcatcaactgtgccatcgtccggggtgtcaagtataaccaggccacccccaacttccatcagtggcgcgacgctcgccaggtctggggcctcaacttcggcngcaggaggatgcggnccagtttgccgccggcgttgccagtgccctagaggcgttggaggnggtggncccctccactccagatttccaccggggcggcccgaacggcgctcccgagcggtgctg

SEQ ID NO: 590254 - DNA, 1011 bp, Homo sapiens
ggaaaaaaaaaaaaaaaaaaaattagccgggcgtggtggggggcgcctatagtcccagcttactccggaggcttgaggcaggagaattggcgttgaacccaggaggcagagctttgcaattgagccgagattcgcaccacttgaacttgcagccttgggcaacagagagagactccgtcttcaaaaaaaaaaaaaaaaaatgtgggggagagaatcagggtgagacttggggcgcctgtgttccccaaatttcccactaaattctgcgccctacgttgagatgtggggggttgtgccctttggagaagggctctacaaggttgggccaccattcctccaaacctctctcccttcttctccaggggccaggccacccaatttttctcatcaaggggttggcgcgcagggtggattccctctttaaagagaaacgggtgaattctcctcttttgggtgcccatattgttcctcttatacaaaggggtgtggggacaaattgagaaagaattgcggattgtgaaatacgccgccggcggtggcttccaaaacagaacaacgggggcagacgcaaagcgaaaatattcttcctgtggggggagaacctattatacggcccactatgtggggtttccacccttgtgttacccaacacctttggggctcgtggggtgcccaaccgagacatcacccaccggtgcacgaatgggtcttcttacttgcaaaccacacccccggggggggcacaaacctcgggggacgcagtttcacccaaaaaaggcaatgcctgtgattgggaaaaaacctctccagtggacaacttttcgcgacgaggcgcttaaccgtttccacacacggacgttttaatcacagtccgcatattcccacctcacacacgcggtggacgccgtgtgtgttggaaaagcggcgggtacctaatcatagaggcgcgaacaccacaagagcgcagcacgacgaagacaaaatacaaaagagaacgaaccaccaccaaac

SEQ ID NO: 590255 - DNA, 708 bp, Homo sapiens
  misc_feature (300)..(300): n is a, c, g, or t
  misc_feature (302)..(302): n is a, c, g, or t
  misc_feature (310)..(310): n is a, c, g, or t
  misc_feature (314)..(314): n is a, c, g, or t
  misc_feature (316)..(316): n is a, c, g, or t
  misc_feature (323)..(324): n is a, c, g, or t
  misc_feature (329)..(329): n is a, c, g, or t
  misc_feature (332)..(332): n is a, c, g, or t
  misc_feature (338)..(338): n is a, c, g, or t
  misc_feature (341)..(341): n is a, c, g, or t
  misc_feature (343)..(343): n is a, c, g, or t
  misc_feature (347)..(347): n is a, c, g, or t
  misc_feature (354)..(355): n is a, c, g, or t
  misc_feature (357)..(358): n is a, c, g, or t
  misc_feature (360)..(361): n is a, c, g, or t
  misc_feature (365)..(366): n is a, c, g, or t
  misc_feature (368)..(369): n is a, c, g, or t
  misc_feature (372)..(373): n is a, c, g, or t
  misc_feature (433)..(433): n is a, c, g, or t
  misc_feature (604)..(604): n is a, c, g, or t
  misc_feature (613)..(613): n is a, c, g, or t
  misc_feature (626)..(626): n is a, c, g, or t
  misc_feature (642)..(644): n is a, c, g, or t
  misc_feature (678)..(678): n is a, c, g, or t
gagtacagtagtaagagtaacactgtagccgccaccggcaaggggtgcgcgctggggagcggacgctgcatcccctttctgctgcaggaacctctcatcagaccgcctgagggaagcggcgcccggagacccgccccggcccggtccacattctccccagtgaagcctggactctatggggcgggaccctggtgtggagcctgagcctgatgccctggagccagccccggaacccctgaacctccagccagggggctgccccgggaacaaccaacccgtaggcaaaccgcccccccgccnancacccatnaccnanaccgtcnnctctnccnccccgnccncnctcntcctttnnanncnnggcnncnnccnntcgctccctgctggacacgggtccccaggccttcagccgcgtccagatctaccacaagcnccacggccaattcctttcgcgtcgtgggccggaagatgcagcccgaccagccaggtggtcatcaactgtgccatcgtccggggtgtcaagtataaccaggccacccccaacttccatcagtggcgcgacgctcgccaggtctggggcctcaacttcggcccccccgccgcngcgggcccntttgccgcgggcnggcccctgccctcccnnnttggcccgccgggggcccctcccccccccccctncccctggtcggtccgaccggccctccccgg

SEQ ID NO: 590256 - DNA, 938 bp, Homo sapiens
cgacagcaggtcaaaacaggagctgatatcgagctggcagagctgggccatggaaccggtagagaccgaaccctcagatgagaggaggggtgaaggaaagcagaacgaggcccgtcagaacggaccgaggatgaatcatatcaacaaccaagcagaatctggatggcgcaacacggcgccgaataccacgataacacgaaacatgacaagtacgcaagaagcagccagagagctcatccaggggcgggggaggaactggctggccatgggcccagtagcaccagagcaatcaaacttaaggatccagtaattctggacagattattctagaataagcaactgcataatcaaccaaaacaaaataccaaaacaacccaaaaaacaattccaaaaccccaaaaaaaaccacagacaacaaaaaacaaaacataaaaggcgggggggccgacctacagtcaaatctacagtcagagaagccagcaactacctctacgaaaaagaagaagtctactaatcgaaatccggtgaagatacctgagtaccgaatataattataagaaccaaaagtcgcgggagacgaaatcttaaaaaataaaatggcagtaatgcagggagaccaatgatcgagatagtcgcgatggcccttaaggagacgcagaatcctaatatctaatgaggcgggggtgaataaatctcttgaggcaagaaaaacaattctcccaatagaaatacggtatttaaacaagagtcaaaaggtgagcaggaaccatatagcaaatatataccaagaggacatgaatgaggaatggtgcctaaagcccaaccaaaggatacaagttgtccccgattccagagtgcaggggtaaatgtatacggattgacactatgtggccttgatatattgtaagcgaagcgattccctactttaaggggggagg

SEQ ID NO: 590257 - DNA, 388 bp, Homo sapiens
ggggcccccccccccccccaagtggttaaagggggccacgggttgggttccccccccccttcccccggggagctccagggatggggccccatttttgtttccccccccaaagagggggggtaaaagggggggccagttttttcccccccccccccttaaaaattggggagggggcccccagggggggccccccaaagggttttggggcctttttccccccccaaaaagggggcgcaaaaaaggtctttggggcccccgtttcccccccccccccccccccctaaaacaggggtttttgggcccaagggcagggggggggggggcccgggaaaaccccccgggggggggggttcccccccttgggtttttttttaaagggcccggggga

SEQ ID NO: 590258 - DNA, 810 bp, Homo sapiens
tccccttggcccttaatttttttttgggcggcgtcaggaaaaaacccggggttagggtgccccttctcttccctccccctctctacccaaaaaaccccctcccacaaggacatgacaaaacccccagaagcctggtgttgcctcaaagagaccttgggatggcaacgacaatatgtttgggatgtagatctcttcttctgtgtccccccaagacaggtctggcggaatgtgtggacaaatctcctctggctcacagcccgagatttgatggcccatagacccgctggtataccatctgattgcgggccgcctcccctaatacagcctccgccatctttcccccacgttgggtgcctctacaatacccgcttgtatccaccgccctgggatattggccccagtgtggggtccccaaaaggcgccgcctctccgcgttacttgggcccgtgggtgttcttccagaggccgtttccatggtcccagttgtgttacacagtgcgagctctcaactcttcaaaacacccgtgaaaggtggtgcgccgataggtctagaacactccgcaactgtgcctctcttgggagcgtgcccggtgtggccagcgacctccgggaaacaaatattcaaacccgggcgtggtaacccagggtttaaacaactcttcccggatataacacggcaaagaaccacatattggccacacgtgtaccacaggaatatgagaaaaccgagccccgagagaatccatccaagtgccttcctcaatgtcccaaaggaagatttccccagagcaccacagaagcaccctcatg

SEQ ID NO: 590259 - DNA, 107 bp, Homo sapiens
tctgagttccctcacagcttgggcctacagtattgtacacggacttccagtaagtatctttcccatggtgaccggctgtacatcggtctggccgggctcgccagtgt

SEQ ID NO: 590260 - DNA, 1534 bp, Homo sapiens
tgtgtgctgctgtggctgtgctgtgtgacattcactgggccactttgctgtgctgtgtgagtgtgtgctgtgctgtgctgcccctgctgcacatcacttcctcgtgctgcctcccctgttgttgatgtgactgtgtgctgaactgagtgcgctgtacgtgacatggcttgacatgcagtggctgtgacatgcagtggatgtgacatgcatgttgctgtgtgcatgtggtgtgctgtgagctgtgctcactgtgctgcctgtgggtgtgtgctgccttcccttgtgttttcccttgctttcccttgctgttcccccttgaaccctcaattgtgcttgtgtgctctctgtgcctctctgctccctgcttgtggccttgatcttgattgtctctcctgtgtgtcccctgtgctctgcccatgtgcttgctcttcttatcctttctcagtgtgagttgtgagtgtggccgatacacctaggcactttaaaggagtggctttgggcctgtcctttgtgcacggtgccgcttgaatgccctgtttcctttagtaggccaaccaggggccgtgtgtctgaagcctattccaaagagaacaaggccggctggtttgggacccctatacttatgtgtgaaggtgccatatggctttgttatggccaaggtcgtttggagggcggaccccgcggcagtggcggagccccttaggaagagcggaacgcctcccttttggaagtgcttaggccgccaggtaccttagaccatgggcgtctaccgctccgtttgtgtggtctaaagccctggccgcgttaaaccttattccttaaccccctgatgcatgctgctgcaatggcccagcttgtcgcccttggtgtgtggctccgccttcgtgccagcacttctaccgcagtctaacacagagcagatttcgcagccccctttcctactcttgctccttagggcgcctctgtcctgtggaacctccaacttacctgtcggttggaaccacctgcgcgcatttagcgtggtcgcgacagggggccccgacagctggtgctcccacacggtttcgggaagagaccgcccttgtgggtggagagatagccaacaccatccttcctacagtgctgtggttctccccttttgtgctcttctgcgtcgtgcttatctctgcgacagctcgaatagttgcgctttggtccgctgagtacgttttgccgattttgtctcctgaagtggacattgtgcgctagcgtttacattttgcagtcgccagacgttcctctgttgccccgtagcatggtaagcggccagatcgcgttgagtcgcggaccaccaccagcgggcgtttaggcggggggcacaggtggtctcgcacagggcgctggctccctccatttctatcagacgaagcccctatcgcgcgcgcgccagggacgggtatcgcaagcgtctcacaggaccatcgtgctctgtgagggagcacgtgtcgttccctctagttagtatctgtcgcgtcctcctagctgatctcgctgt

SEQ ID NO: 590261 - DNA, 153 bp, Homo sapiens
ctcgtctcatagatggatcccacctatattcccccgtgtaacccgagagactttggtttcccggtacgctgtcccggcggggtcatgggatactgacgccgccgcatcgccggaggtcacatctgcgccattatgggtgggtaccgatgctcg

SEQ ID NO: 590262 - DNA, 235 bp, Homo sapiens
  misc_feature (204)..(204): n is a, c, g, or t
  misc_feature (208)..(209): n is a, c, g, or t
  misc_feature (211)..(211): n is a, c, g, or t
  misc_feature (224)..(224): n is a, c, g, or t
tttttttgacagtttttaaaatttaaaacttcttaaattttaaattaaaaataaaacactttcactactattttctagatgaactcatttagtctcttggctaaaataccatctatatctgatgactgcccaactggtatcttcagccttcgctacccaattagtatgtcagcagcctacctggcaaatccaatcaacgctaancagnntnactacaacaaacngactctcctcc

SEQ ID NO: 590263 - DNA, 251 bp, Homo sapiens
  misc_feature (186)..(186): n is a, c, g, or t
  misc_feature (200)..(200): n is a, c, g, or t
ctaggcgggtgtccccttcctccctcaccgctccatgtgcgccctcccgaagctgcgcgctcggtcgaagagggcgaccatccccgatagaggaggtggcctagagccttcagtcactggggaaagcagggaagcagtgtgtgctctttattcactcccagcctgtcctgtggcctgtcccactgngtgccttgctgttntccctgtccacatgcatgctgtacagacaccaccattgcattttcatagtg

SEQ ID NO: 590264 - DNA, 467 bp, Homo sapiens
  misc_feature (423)..(423): n is a, c, g, or t
gttgccgtggttgtgggttgacgtggttgtgggttgacgtggttgtgggttgacgtgggtgtgtgcagtctcggtgaggcaggccacaggaagagccgccagccatgtgtgggctgcccctgatgtgcactgggacctgccttctggcctgcagcccagtcatgttggcacggcccccagccaggcctggggctgctgactggctgtctctgccccaggttctgcctcttgggagtcctggccctggtcatcagctgtggcgcctgggattggagctggctgtgtccgtggtgagtggcagagggggtgaggtccccggttgctgaacctgggcactgggggagggacgaggggaagcacactcctctcccatcccatcttccggggcactggttcccgagagcgttggggaccaacaatggncacagtccacctgtaaccccagattcaaagtcaccctcctgagt

SEQ ID NO: 590265 - DNA, 572 bp, Homo sapiens
cacagtggttcacgcctgtaatcccagcacttgggaggctgaggcaggcggatcacgaggtcaggagatcgagaccatcctggctgacacggtgaaaccccgtctctactaaaaatacaaaaaattagctgggcgtggtggcgggcacctgtagtcccagctacttgggaggctgacgccggagaatggcatgaacccaggaggcggagcttgcagtgagctgagatcgcaccattgcactccagcctaggcaacagagcaagactctgtctcaaaaaaaaaaaggagaaaaaactcaggaaagttatagggctctaccagtgtactattgggacacctcgggaggagaggaacttgtccaattttaacagtataaactttatggtttaagtagctaatatttaggccaggcgtggtgggcttaagcctgtaattccagcacttcaggaggctgaacgggtggatcaacctgaggtcaagattttgagaccagcccggccaacatggtgaaaccccgctctaccaaaaatacaaaaattagccgggcatggtagcgggtgcctgtaatccca

SEQ ID NO: 590266 - DNA, 522 bp, Homo sapiens
tgatgctgaggtgctctagatgatccctttcagaggtcatggactctggagagagaaaccagaccatgttagagggcagaaaccactccagtggtgacacactgtggagtcctggcccacagcaggacacattcattccaaaataaaaaacctagggcacaggtccattcctccttttaagaaaaaggtgggcaacggtctaagaatggggagaatgatcccctttcaagcactccgtaggttttatgggcaccaactaattggcagagtttattggaaaacggaagtaacctggtctttgtggccatttaccttacacgaaaaagaaccctaaggtcgacctacaaactacagaggtgctacgttctctttctggggttttcatttctgggtggtttgaatctggtgttatttttctactaagttaaaaaccacttgttggatttaacaggttttttgtgtatttttttttgcaagccagtgaatttggatttatctcatgggtaaagttcccaagtaaaa

SEQ ID NO: 590267 - DNA, 163 bp, Homo sapiens
atgtgaacattactcatgtcatgatcaccaaacattatttacctatgaaattgtgaagaactatacatattcagcaacatgttataatttggtcctctattaacagacccaattgccaaggagattttacacaaattcaattcacaagcatgtacacaagaga

SEQ ID NO: 590268 - DNA, 449 bp, Homo sapiens
  misc_feature (431)..(432): n is a, c, g, or t
gatgcagaatggtataatcttccaaataaccaatgcatgatattacaaaatcacacacaggtaaaagatccattcaagccaagcacgatgtacacactctgtcatcctagcaactcaagatgctgaggcaggaggatggcttgaggccaggagttcgaggctacagtgagctgtgactgtatctgtgaatagccactgcactccagcctgggaaacaaaggaatatgctgtttccaaaataatttttaaataatcacaaaatgattcctaaatgctccaaagttccctcctttctcaaatctattttctaaataaattaagaaactttcagggacaatggccactcttcatttttacttcttcccacagttctcctgaagtgtatagcagacactgatgtgtgctgcccctagtagctttcggccactttnncaggatgtgggtatttt

SEQ ID NO: 590269 - DNA, 357 bp, Homo sapiens
ctctcatttctaaaatagggacgtggccaggcacggtggctcatgcctgtaatcccagcactttgggaggccgaggcaggcggctcacgaggtcaggagatcgagactatcctggctaacacggtaaaaccctgtctctactaaaagtacaaaaaattagctgggcgtggtggtgggcacctgtagtcccagctactcgggaggctgaggcaggagaaaggcatgaatccaggaggcagagcttgcagtgagctgagatcacgccattgcactccagcctgggcaacagtgttaagactctgtctcaaatataaataaataaataaataaataaaaataaacccagatgttgccctc

SEQ ID NO: 590270 - DNA, 681 bp, Homo sapiens
  misc_feature (1)..(1): n is a, c, g, or t
  misc_feature (71)..(71): n is a, c, g, or t
  misc_feature (174)..(175): n is a, c, g, or t
  misc_feature (324)..(324): n is a, c, g, or t
  misc_feature (336)..(336): n is a, c, g, or t
  misc_feature (372)..(372): n is a, c, g, or t
nggtggcctagtcaggctcgggaccggtacatttgagggtggcaaactcacggatagtgtatgaaataganatacatactatcagcaataatgttaggtacattttttctcctcaaatacatatttggagctatcattttccttatcccttcctacttgtgcagcagttgattnnccagatattatgttgaacataatgctcagaaacatatttaacatcatagttgtatatattttaaagtagaataaataatggaagcaacttgatatacaagtttatactaaattttcaactgtgtgaagatacatttaagggcattactntgctaataatcnacacattcttttttctatttaaataaacaaatggtntgtggttcacagctttcatccagctttggtgataatcaattttgaaaatacagtggactgaaaagcaaatttattctttcgaagatttcatttaaatctctgtactatgcatttttgtttcagtttgtaaatgtgtaacatttatagttaaataggacaaagcaggccctatgactattgttttcaaaaaattaatatataaataattcagaggggtttttcatttacttttgaaaagaaatttctttaacaggattgcacctatcaatttcttgtagaataaaaaaaaatctttcaacaaaaaaaaaa

SEQ ID NO: 590271 - DNA, 173 bp, Homo sapiens
tgctcagcaagctgaccacggcgggcatcaacggccagttccgcacgccgcgccacatcatccgcctgatggtggagctgatggacccgcagcccactgatcgtatctgtgacccatcctgcggcacggcgggctttttgattgaaacctacgaccatttgctgcgccagtac

SEQ ID NO: 590272 - DNA, 101 bp, Homo sapiens
ggaattttctcactgctgtttttgtcaggtttgtcaaaaacagcagtgagaaaataattccataatcaattgtgctgggataactggctagctgtatgcag

SEQ ID NO: 590273 - DNA, 497 bp, Homo sapiens
tgattccatgagagtctgggtatacaccagatgccatccgaaccaaaatccgcgacggcatttggccgaagcacaccgtatggaaaaaagctccagacggtcgcgtccttatagatgttgaggggtattactcatgggtagagatgggggaggcgtccgcgccgtgtctgcaagtagtatcgagatcacgttccaataccagggcgtccggtgccgtgagcgtgtccagctcaagcccagcgccgctaatataaagaaggcagagttgcacaaggctgcgattgagcacgccattctcgcgggtacattcgattacgctctaacctttcctaactccaagaaggctttggctttcaagactccggaagatagccagagcctgggcgtttacttggttgagtggctggacaagaacaacggctcagctcaagtcaagcaccgccgaacactaccgggaaatgatagatggtctgctgataccaatgttcggccactta

SEQ ID NO: 590274 - DNA, 165 bp, Homo sapiens
aaggtcactgaccggtcatagtgcaagcagagatgatgggattataatggcttccgtgagcatgcgtatttctccagtccgacagctgctggagtgcctgccatggtctcgggaatcacggtggcatgctgcactgatgtgtgggtggccactccatgtcagttg

SEQ ID NO: 590275 - DNA, 949 bp, Homo sapiens
tccaaatgacttagatttaatcatcggaagcaaactaatgggaacccttacaatagagaagataattacttgtcagggtcctttgggaaaactgaccggggacagaaggggactggggggctggccccccaacctggatcccttctgaacaaagactgtccacagtggtccctgggcactcgggctcaggaaagggggagactctgctgggtcctggtgctattgaatgtatgccttgcctagcacctcactctcgggccagcatcaggagccccgctcttgcccggtctctgggtcatcgccttttctatttgtgggggcgcctgaaacagatggtcatccaattccgcagtaagcaaaaatctggccggtctcccatctggcctggtcttaataagtctggcagtcttcacaggccaatgggtctcccatatggcccagttccttcatggtccaccaaatgtaccctgtctcaccatttacaccccaggtgtctcacaggttctcctggggtggtcgctgggcccagaaggggagggtaatgtaacgacggatgggtcgctgggcccccaaaaggttcctgggaatcagcgggtaccgaaggaatggacctcatagggcctgggcaacaggccctgtatggcgccattggtcccacaccatgtcatgggcctggcgatatctccctggtacaacggcttggtgcccacacgccaatcttcggaggcacaaccccttggagacacaagcttgaggtgtccagggaaaacctttggggacacacactttggccattgggaaatcccgggaaaggttgggaatcaaattcggagaagaaatctattggcatcgcccccccggaggacaatggggcgccgggcatggggtctaggcatcagtgatgacagcaaggacttccttcaaattcttgattccacaggctgaccgg

SEQ ID NO: 590276 - DNA, 442 bp, Homo sapiens
catgcagcataatacatctcaacaaaaaatccaaaaggatcttttaaagtataaatggaatctctagtttaagatccttcagtgacttctaaccactcttagaatcaaattccttcaggaggtaccccttgccaacttctccctacctcccattaatacccctacggctataatatcctggccacagtggcctaaaaagcagtctaacagcagtgccaaattctcactttcagggtctatattgggagacagagattataaacggaaccaattttctaagtaccaaaagaaccaggtccacagaatctcactttaggaacatgtcatgagatgtggcccagggagtttcaatgtcagcaagaagctaatatgctgcaaaaaaggaaaagacttcaagtactatttacaggacgctttccagtaatgccattgggccagcggg

SEQ ID NO: 590277 - DNA, 780 bp, Homo sapiens
  misc_feature (18)..(18): n is a, c, g, or t
  misc_feature (65)..(66): n is a, c, g, or t
  misc_feature (84)..(84): n is a, c, g, or t
  misc_feature (96)..(96): n is a, c, g, or t
  misc_feature (100)..(100): n is a, c, g, or t
  misc_feature (109)..(109): n is a, c, g, or t
  misc_feature (112)..(113): n is a, c, g, or t
  misc_feature (116)..(116): n is a, c, g, or t
  misc_feature (119)..(119): n is a, c, g, or t
  misc_feature (124)..(124): n is a, c, g, or t
  misc_feature (146)..(146): n is a, c, g, or t
  misc_feature (149)..(149): n is a, c, g, or t
  misc_feature (159)..(159): n is a, c, g, or t
  misc_feature (162)..(162): n is a, c, g, or t
  misc_feature (164)..(164): n is a, c, g, or t
  misc_feature (174)..(174): n is a, c, g, or t
  misc_feature (188)..(192): n is a, c, g, or t
  misc_feature (208)..(208): n is a, c, g, or t
  misc_feature (223)..(223): n is a, c, g, or t
  misc_feature (225)..(225): n is a, c, g, or t
  misc_feature (262)..(262): n is a, c, g, or t
  misc_feature (264)..(267): n is a, c, g, or t
  misc_feature (272)..(272): n is a, c, g, or t
  misc_feature (296)..(296): n is a, c, g, or t
  misc_feature (307)..(307): n is a, c, g, or t
  misc_feature (349)..(349): n is a, c, g, or t
  misc_feature (359)..(359): n is a, c, g, or t
  misc_feature (362)..(362): n is a, c, g, or t
  misc_feature (364)..(364): n is a, c, g, or t
  misc_feature (374)..(374): n is a, c, g, or t
  misc_feature (415)..(415): n is a, c, g, or t
  misc_feature (426)..(426): n is a, c, g, or t
  misc_feature (474)..(474): n is a, c, g, or t
  misc_feature (481)..(481): n is a, c, g, or t
  misc_feature (498)..(498): n is a, c, g, or t
acccccatcttccaaatnatctctggtttcacggggaagaaaaaacctagggctgctgtgaatgnnccctctgaggtccctgantcggccccaggnaganctgtaaganatnncgnagnggggntccgtgcctgacggcgatgatnctngaggcaacgngcngngcagaaaganaagtcgaggtagtnnnnnggagttaggctttggngggatgggccagaantncaggagggtggagtattgacgattgcagagtcagggntnnnnggggnggggggtcccaagtggggaggganttggggttttnttgttagagctttcttctctcggtcactgagggcggcaaatngccgctgctnttntngtttacgctntttttgttcttgctgcttttgttgttgttcctcccgttgcngcggggctgcnttttgctcccttttccgtgtagcctgcggtgcttccatttttggtgtnaatggtngtgggatctgagttttnttgtaattgtaggtatttggattctttttcatgaactttcggaacttattacgtgttgatttgttagccgcaaaagtataaggtggcggggctggagagttctggacagtggggtcagcacctgcttccagcagcagacgaaccactgagcctcttccagctgcagctgctgcatgcaggagagtaaagccaccggagcccaagggggcactgagcagagacagaactctagggtctgcagggctgggagctagctgcagctttagcactccaacatctcca

SEQ ID NO: 590278 - DNA, 145 bp, Homo sapiens
  misc_feature (105)..(105): n is a, c, g, or t
gggacatactgcatattcatcacttggaaagcatttatagaattctcctgatacttgcctttcagcatgtcatttcattgcagattaatcacttccagtagaggntataggtggaagctcctcggctgcacagttaaatggattt

SEQ ID NO: 590279 - DNA, 153 bp, Homo sapiens
aggctctttggggggaggctcccccttgagaccagggaggtggaggctgcagtgagctgtgattgtgccactgcaactccagctgagaaacagtgagactctgtctcaaaacaaaaaacaaacaaccttgaaaagtgaggggaaaattcagat

SEQ ID NO: 590280 - DNA, 193 bp, Homo sapiens
ttccattttttaaaaaggtttttttgggggccccccggcccaacccccggtgagggttgtgtggcatgagcttgggccccgggcttcccgggggcctttgccgcaggggtttttgggcccccatccttggggttttatttgcagtgggggggacagagggccctccccccaataaacctttcctgaaagcaga

SEQ ID NO: 590281 - DNA, 763 bp, Homo sapiens
  misc_feature (97)..(97): n is a, c, g, or t
  misc_feature (160)..(160): n is a, c, g, or t
  misc_feature (163)..(163): n is a, c, g, or t
  misc_feature (168)..(168): n is a, c, g, or t
  misc_feature (170)..(170): n is a, c, g, or t
  misc_feature (178)..(178): n is a, c, g, or t
  misc_feature (183)..(183): n is a, c, g, or t
  misc_feature (190)..(190): n is a, c, g, or t
  misc_feature (200)..(201): n is a, c, g, or t
  misc_feature (208)..(208): n is a, c, g, or t
  misc_feature (229)..(229): n is a, c, g, or t
  misc_feature (232)..(232): n is a, c, g, or t
ggcgggcgcaaggtcggcgtcgcacgtgtgaaaccggggaacccatggaagccgagtccggcgacacaagttccgagggccggccaggtctacctgnccggcgggggccgcgtacgcgaaggggaggagctggtcatggacgaggaggctatgtgtctancancgagngnagactgcnccccntgtctcnagctttgacnntagtccngggatcacctgtggagacaancgngacagagcttcctcttacactttacatgtgtgtgctgggaccccaaggctgagagcgcccagagcaaacaggactgatgatgcttcggaatgcacaaatcgtgcatggggaccaagagcccgcgcaacccttcagaaggggcacgggactgaacggaacgacccgagggcaggacacgactggcaagcagggatgaaagcaacgacgccggaaacccttcaagcttgggaatgcgttgggccccatgggtggccccaacttaatgcggtgcgcactttcaaacgcgcgggaaggtttccggggcggttggctcactggggccttcgcgcgctttgaccaaggaatggcccctttgttggaccagccttggggcgcgtgggtggcgctccacggaacgcacaggggggccccaagggttgggcaagcgttggtccatgggcggcctcgcggaggcggcggcttccttgccaggcgtgcgtgggagtggtagccccccagggggcccttggggaggcccttttctcccgggga

SEQ ID NO: 590282 - DNA, 371 bp, Homo sapiens
aaaaaaatgtatttgaagcctggaatcaatatttataagatgattgtgttcctggttcatatatgctaattgataagtagtcagttacgttcaaagaacactgtccatttagggtaaataatccttcaaatgcaggaaaatatagaataaaaaacgggtttgctgtactgaaattaaaaattttttaaagaattatttttcactattcctttagtcttagctctgtaaataatttgcaaaatcacttaacagtatgaaaaaacagaacaggaccattggtgacaagtattttctctggcatattgagagataaacagattggcattatgtgtctcacataacaagcaataaagaggacagaaaacaaaaaa

SEQ ID NO: 590283 - DNA, 170 bp, Homo sapiens
  misc_feature (123)..(123): n is a, c, g, or t
aatagacaatgaccgtgtggtgtgcgcggtggcactgcgctgggaacatggcgttgacgtcagacataaggagctcatcggcaaatacgccatgagagactatgtcacaggcttccaggaggngacacacagcacaacactgcaaacaagggcatgtcggatgcacccag

SEQ ID NO: 590284 - DNA, 1109 bp, Homo sapiens
  misc_feature (124)..(124): n is a, c, g, or t
tcttctccaagaacagtctgtgcactcttggcccaaggttgggagtgcagggggtgtgactctgtggcctcgcgtgaaaccttccaacccccgcgggttataggcaattctccgtgccttcagnccttcctgtgagtatagcgtgggattgtgcagggcacgcacacaccacgctgtgggctgtgaatttatgggtgatttatacgtgtgggagacggggattttcgccgaggtgtggccaggcgtggctcgtgaaacactcctgtgaccttcatgtgaatctgtgcctgtgccttcgagcagcttcccaaaggtgtgcgtgggattatacagggcatgtgaggccactgtgacaacctggggactatagggtcatatatcgctacaagtgtgggaattggcacaattttaaaacaaactggggggaacatttttaaacaatgtggccggtgggtatacctcagtctggtgtttctcgcccagtcttcgcgaaatgtcatttccacacgcgagagaaaatatttatatttaacgagtggggtttacacgaaactttagaggggccgtgagacccatgtttgagaaacacttgtgtatagagagatccgtcgaataaagggggtgaattaatcaacgtcgggagcaacacaaagggctttattagaccacagcgcttattagaagacacccaaggtgggccactcttaaagacccagaggtttcctcaccaagtgctggtgtgcgcccccagagaacccacatgtgcgcgtactcgaggatattccaacccctgtggggagaaacccggggaggaaaacacgggcgcccagaggggacgtcactacaaaggggacccccacaaaggttcacaacaagggcccatgcaagcgtaggaacaatcaccaagcgaagacagattctcgtgggcatggtgggcacaaggggggagcccattactatccgcagaggggacaacaataagcggggacatgggctcgaaggttcacaaaagcggtctgccaagatgacagcgcccacaacgtggcgatcctctcaaagaatgtaaaatctctcgcacagaggggggccccaggggcaaaatacatccg

SEQ ID NO: 590285 - DNA, 1200 bp, Homo sapiens
cgcggaacagtgactgctgcgataatagctgaggcagtagtgcagctttcagagggtccgggctcagaggggctaatgattacggagggttctgccgcacgggactggtgccgggggcctcttgaccccggaggccatggcacgcgcagaggcaggcgttgaactcatggctattcacaggtcctccagtggcgtctctcagccaggtcgggactatctgtcacgccacgctatctcatttgcctgaagaaacaataccagctctaccgctgctcttcagcgcagcctctcctcacgcgcaatcatcaatgcaggcttcgtgctcgtgcacgacagggagtgtaccctgtgcccgttagtgtcgacgtctcactccccctgggagcctccgcgctatcaaacccccatcgcggccctaaccactcctatcgcctcgcgctcactccagcaaacacagcgcactgcctcggacagccccaatggaaaccacgccacaccgctgcacagcgctcgccagcacgcgcaaggcagcagcgagcagccccaacacggttcctccctcgcatcgcactcccctcagcaatccaagcccttccggggcaaccaaaccggtcttccccccttagtgcattcaacacccaccatgcacgtgggcaagttgggcctttctcggcgcggctccttccaatggggggcacttgcggcagcgcacgcaaacgcggttccaggcgtcttttggaccccccctttggggttcgctcattgctgttccccaagtggggcccctctcccgggcgcgcaacaaaagggttcccaaggcacacccatttcgcagcggacagctacccttatcacccttggcgccaccgggagcaagaagcgagcggaaccaacgtctaccaagggtcctcctatcccattcttcgaaacagccaattcggcatggaaccccaccgacgcaactccgcaccaaaccacacccgggctcgcagcccatcctcgcaaacaaccgcgggactcccccgatccggcacacggtcccccaatcagcaccgcacaaccacatggggccccaggccaacgaccttcgagcaaccgtacaccaaacccctcagcatcgggaacctacggggcccaacacacagcagcaatccacacaccgccagcccccggggaaacccctcggggcccttgggcaca

SEQ ID NO: 590286 - DNA, 253 bp, Homo sapiens
gaccggcccgtttatagcgggatctgccggcacaccatcatccaactcgacacgatggtgccacgttgctgacacaagcaagccgtatggaaactttctgctagctacaaagattcacacagggaaaggcacggagctctgcggcgagactgggaaggtcctcagccattcagcaccatgcggacgagctcttcatagttgatacaaccattgctgtcctcatgccctgccaccagcatctccgctttggaaa

SEQ ID NO: 590287 - DNA, 138 bp, Homo sapiens
tgtgtgatatatcgtgcctcaagctggtgccccgcggaagcgacagattgctggtggggcaaggaagccgtcgagaaatcgctgcttgaactgggccccatgagcggcgcgcaaaagcgcctgatggcctgtgtcctg

SEQ ID NO: 590288 - DNA, 352 bp, Homo sapiens
cccatacccactccacctgactaccagacaaccttagccaaaccatttacccagataaagtatacgcgatagaaattgatacctggcgcaatagatctagtaccgaatgggaaagatgacaaattataaccatgcataatatagcaaggactaacccctataccttctgcgtaatgaattaactagaaataactacgcatggagagccaaagctaataccctcgataccagacgagctacctaagaacagctgagcacacccgactatgtagcagctggttgtacacgatagaatcttagttcagctctaaatttgcccacagaaccctctaaatccccttgttatctgatg

SEQ ID NO: 590289 - DNA, 331 bp, Homo sapiens
cccagctgttctctaccagacaattgaataatatattaaaatctttgaagaagaggaagttgaatttatcagttgtgcctgtcccagtagtttgcagattgtgatcctgccaacattgttcatgactttagcaagatacttacagcctatttagatctgaacctggattagtgctatgtgatccctctgtacacttccattgttctgccgacccagagaccgactgtagtcacttattaacatcaaggctggaatcctatttgcctcattcctatctgattcatgagcacctggtttttactgatcgccttgaatcccttggtcccctggg

SEQ ID NO: 590290 - DNA, 193 bp, Homo sapiens
gacaggtcttgctctgttgcccaggctggagagcggtggtttaaccacagctcactgcagcctcgacctcccaaggtagggactgcaggtgtgtacactggggtgcaccaccacacccagctaatttttaaatttttttttgtagatattgtctcaactcgtgtttggcccagaacgtggttcttgtgaaatc

SEQ ID NO: 590291 - DNA, 436 bp, Homo sapiens
ccctccctgtccacgcatcccggccctaactttttgttttataaccattgattatactagtgcaaatttggcagaaccatagtaatatagtcttgactgggagaccgcgtcacgatggtcactagccagccttccacccaacatggagatgagctctcctgaagcatccttcgcagatggtcatccgccctttctattgtgaacctaattggagtcactgtgagttctctgtcatgttagactgaaatcttgtatctgctgctgcccattgccccatgtgtaccttcaggagtaagacagaaaagtgatccaagggccctttatctgaaatctgtggtcttatcttcctataatctctgccactgacagtcaccttcaacctcaagcagcggtcttcatgcttgtggatgggtttggagagctggtggaagggagg

SEQ ID NO: 590292 - DNA, 425 bp, Homo sapiens
atattaaaaccactaattgttggtagcctgtaaagatcttaaccatttaacaggacacacattattttcataataaatggccactggtgggacatgggactgactaattggaatagagttggaaataccaccttggaatgatgcaaccattattggataatttaatctaagaaatctatgcatgtgaattaagttaaaatagggggtttaaatccaatttataaagcattagaaggttacctaatctcttctgggttaaatgtgataggaatgtatgggaatgtgaagaaattatggaaaattaaaggactcagcctctttaggaagttggctaaaatggaaaggttatgttaaattaattaatatcttcgttaatccaagcatctaatgaccaatctggaataataagcattctgcctttgcaa

SEQ ID NO: 590293 - DNA, 904 bp, Homo sapiens
  misc_feature (366)..(366): n is a, c, g, or t
  misc_feature (419)..(419): n is a, c, g, or t
  misc_feature (440)..(440): n is a, c, g, or t
  misc_feature (708)..(708): n is a, c, g, or t
gattgtgctccgtggcgggtcaatgctccgttggctcccgataccgtggtaggcttgagccttgcttaaagcaggtagaccacaaggctccctctgtgctctgactttgcagagtgagatcgtgcgcccgatcacttccatccgctcagggtacataggcccaccggggtccatgagatgcactccaagagatgaatcgtagcgaactctggagactaggggtgtagcacaccgaggaagcatcgctcacatacgttatcgaagcgagcgcctctggctcagagcctggcgttgagctgtgttaactcgaagaagccctacaacgctgggccgcagatgggcttctgtagcgatcgcatctgtggnctttgttatctcctgtgctcgtttgacggaggcgttcgctgtccctccgaggngtgctcgtctttgtggaggcntcgtgcacccctttcggaactgccgcgacgggaacccctttgcgcaaaggaggggcgtgtcccagcgcataggtcggacaatcttgtgtctcgcttggcctagttatagcgcattggggttcgctcgccggaaagtgatctcgccgagtgagatcatactaattcttggtccctacgttatacacgcggattcacgcagtacgaggtgtcgatggagtggtaagaagggaatcagtcactaccgtacaccatacgcatgaaaggcgcnagccagggttgttccacacgaactctggaccaaaacgcacgttttgtatcctatggaggaagagttccacgccgacatgactatttaggcgtaacccctgggcgggcccggtaggttcaagtttggggcacctctgcctcgcaatttccccgcccgaaagggcgtattgggaaacgggaaggggggatgttcgtcc

SEQ ID NO: 590294 - DNA, 820 bp, Homo sapiens
  misc_feature (4)..(4): n is a, c, g, or t
  misc_feature (444)..(444): n is a, c, g, or t
gctncttttcgatccgccatctgcggtggagccgccaccaaaatgcagattttcgtgaaaacccttacggggaagaccatcaccctcgaggttgaaccctcggatacgatagaaaatgtaaaggccaagatccaggataaggaaggaattcctcctgatcagcagagactgatctttgctggcaagcagctggaagatggacgtactttgtctgactacaatattcaaaaggagtctactcttcatctggtgttgagacttcggggtggtgctaagaaaaggaagaagaagtcttacaccactcccaagaagaataagcacaagagaaagaaggttaagctggctgtcctgaaatattataaggtggatgagaatggcaaaattagtcgccttcgtcgagagtgcccttctgatgaatgtggtgctggggttttcatgggaagncactttgacagacattattgtggcaaatgttgtctgacttactgcttcaacaaaccagaagacaagtaactgtatgagttaataaaagacatgaactagaaaaaaaaaaaaaaaaaaaaaaatggggggggcggcaaaaatttaaacaaccggtggggggggcccagaaggaaaggaaactggcaaagtcgccaaggaccgggtcaggacaggcgggtgccaccaaaaaacgcggcggccgggtttatgaaaccagaggtcggggtcacggtcacccaggcacgtctaccccccggcgcgcggggacaaaaacaaggcacaacaaagaaaggaaaagcaagacacacacataaccaaacaaaaaaaaaccacacca

SEQ ID NO: 590295 - DNA, 146 bp, Homo sapiens
gaactgctgcctatatcggggaatgtggcttgtgttcacaaggaggactcactgagatcagggacatgttgctggccaataaggtccagctgctgccctgctggtgccattgccccatgtgaagcactgtgccagaccagaacact

SEQ ID NO: 590296 - DNA, 624 bp, Homo sapiens
  misc_feature (4)..(4): n is a, c, g, or t
gctncttttcgatccgccatctgcggtggagccgccaccaaaatgcagattttcgtgaaaacccttacggggaagaccatcaccctcgaggttgaaccctcggatacgatagaaaatgtaaaggccaagatccaggataaggaaggaattcctcctgatcagcagagactgatctttgctggcaagcagctggaagatggacgtactttgtctgactacaatattcaaaaggagtctactcttcatctggtgttgagacttcggggtggtgctaagaaaaggaagaagaagtcttacaccactcccaagaagagatctctcgtcacaattatgcgcattcgtcagagcagccttatgatgaatatgcatctggagtgattataacacgtgactttgactgacattattgtggcacatgatggatgacttactgcctcaacatagcataggacaagcagctcgtatgaggtaataactacaagtaccattcctacattatctttatttattaaacaaacatgtcgagcgtattgcaccagaacattttactttggacaactattgcctgctgccttaattggtgacaagttgctcccgtcctaagacttatgggattcacttgcg

SEQ ID NO: 590297 - DNA, 760 bp, Homo sapiens
  misc_feature (384)..(384): n is a, c, g, or t
gcaggacatgcaaggtccagcggtcaaactaggacgcctcgtaggctacagggagacaagactggagacccagaagcctgaaagtggttcttgaccgactttgtccactcaaattaaggcatcatgcagctggaagatggacgtactttgtctgactacaatattcaaaaggagtctactcttcatctggtgttgagacttcggggtggtgctaagaaaaggaagaagaagtcttacaccactcccaagaagaataagcacaagagaaagaaggttaagctggctgtcctgaaatattataaggtggatgagaatggcaaaattagtcgccttcgtcgagagtgcccttctgatgaatgtggtgctggggttttcatgggaagncactttgacagacattattgtggcaaatgttgtctgacttactgcttcaacaaaccagaagacaagtaactgtatgagttaataaaagacatgaactagaaaaaaaaaaaaaaaaaaaaaaatggggggggcggcaaaaatttaaacaaccggtggggggggcccagaaggaaaggaaactggcaaagtcgccaaggaccgggtcaggacaggcgggtgccaccaaaaaacgcggcggccgggtttatgaaaccagaggtcggggtcacggtcacccaggcacgtctaccccccggcgcgcggggacaaaaacaaggcacaacaaagaaaggaaaagcaagacacacacataaccaaacaaaaaaaaaccacacca

SEQ ID NO: 590298 - DNA, 487 bp, Homo sapiens
ttctcgacagcaacattttgggcagaggagtgtgagacatactttagaagtgcttgatgctcctggaataaatgtggcatcccaggcatagatgatcgcttagagaaggcaggccaccctgctgattagggcagagggtgaggcagtctgtgccttggaccctttggcctactctgccctttcagtgcgcgggaaaggggtcagctgtgtacattcagaccactccccgttttagaaccagaaggtggctggcattcgaagtggctgagggcacaggttttagaaggctgtagttgaatatggctcctaagggcagccccatctacaacagaaacccgatcaaatgaatctgctattgggatttctccttcctttcaatatgcaacaggcacttgaaggaaagcgggaacatcccagctactgaacctcaggagcaccacagaggccggacacaaaggggcgaggcaataacatgttgccagtcggc

SEQ ID NO: 590299 - DNA, 562 bp, Homo sapiens
  misc_feature (495)..(495): n is a, c, g, or t
acgttcccccacggtgtccagtgcagaggagacgaagcctgtcctcaccgcggctcgcggggcccaggcgggctctggaaagccggtgcggtcctgggcaggaagcccggcccgtggagcaggttttcgttctgcttcagcaataaataagggtgaccacagggacttggctttgggtttcttttccggtgaaagggtgggttttaaagtgagatacacttttccgtagaacaagtgttctatctttaaaaacccaaatggcagcaccgtggattacgggtctcagaacaactcatggcgcatcagattggactctctgattttcggtctatgggccaaatggccctttaacggcacctgaatccttggtgtactgatgccttggagctgggcacctggggagagtgtggtgtggcggttaacggttcttcctggccctggctaattacagtctcgggtgcccagcaagcccctttggcttccttccgtgacggntcacgttgtcggcctgggctcagcgtggacctgccccatgttgaagaacctggcctcaagtggactt

SEQ ID NO: 590300 - DNA, 296 bp, Homo sapiens
gaattccccccccccccccccccccccctttacagttggtgggggccatgaggtggaaagtagttttcacgggagcgaggggaaacgggggaaccgcccaaagccatcgggtgacctgtggaatgtgtgaatcccctgaaattgtttcctgctgtggtttaaacctggggggattggtagggagaacctgtccctgggttgggagtgagggtgaatgtaaaaccccacaggccataacgagacagttagtcaagactttcattttctggagaccgatctcttactcttgccaagga

SEQ ID NO: 590301 - DNA, 833 bp, Homo sapiens
agagtttgttttttttttttcaaacccatcaaaatctacttatttatgaatccaaggggtgggcagcatcactctgttctagcattcttggtgggagatggtctgggtggcctagctggggagtgagcagcagcccatccccggttcactttctctagcccatcattacctgtgaactggcagtgggggcagtcagggcaaatagaatggggctgggggtttctccttctttgcagttcatggtttggcccggctaggaattagaagacagacaccatgtcccaggacagggtaacttcttctgcatgatgtgtggtagactcccttggctggctggtgcagggatactgagaaaatacatgaacagaaacggcccaggtggaacagcacgtaacctagtgagtgactgtactcctttctaggaatgctgattcagagtgcacctcttggactaggtcccaggatcccctgtgtccctggagtagggactaactatagcacaaagtaatatgtgccaaggctattggtgaaaggttgggacttctaaaggactaagggattggtggggtatggcttaagtttggaaccaaatcctagagccagctgataatattgaataatctagagggagagaataagggatgtaccaaataagtgggggattcccgtccttatgaaggtatgcatagggtaatggaaagatggtaaagtttttcaagtttgtgccgtcagttttgtggggacatgtgtatttgcacgtggagggtttacattgcattttgtaagtccaataatgagtaactgggttagaaaaaaaagaaaaaagagacaag

SEQ ID NO: 590302 - DNA, 181 bp, Homo sapiens
gctgttctagagtatcaccctgctacgagcgcagcctgaaacatgtacaaaacaaaatgatgctttttccattttacaatctctgatttccataacaaacaaaaaaagggtgacattctttttaaagttaggtagcttcatgaaacaaagatttccatctgtaaataaatcactttcttgg

SEQ ID NO: 590303 - DNA, 850 bp, Homo sapiens
  misc_feature (6)..(6): n is a, c, g, or t
  misc_feature (84)..(84): n is a, c, g, or t
  misc_feature (93)..(93): n is a, c, g, or t
  misc_feature (140)..(140): n is a, c, g, or t
  misc_feature (192)..(192): n is a, c, g, or t
  misc_feature (197)..(197): n is a, c, g, or t
  misc_feature (201)..(201): n is a, c, g, or t
  misc_feature (211)..(211): n is a, c, g, or t
  misc_feature (226)..(226): n is a, c, g, or t
  misc_feature (256)..(256): n is a, c, g, or t
  misc_feature (258)..(258): n is a, c, g, or t
  misc_feature (273)..(273): n is a, c, g, or t
  misc_feature (295)..(295): n is a, c, g, or t
  misc_feature (323)..(323): n is a, c, g, or t
  misc_feature (342)..(342): n is a, c, g, or t
  misc_feature (471)..(471): n is a, c, g, or t
  misc_feature (475)..(475): n is a, c, g, or t
  misc_feature (479)..(479): n is a, c, g, or t
  misc_feature (488)..(488): n is a, c, g, or t
  misc_feature (529)..(529): n is a, c, g, or t
  misc_feature (532)..(532): n is a, c, g, or t
  misc_feature (540)..(540): n is a, c, g, or t
  misc_feature (547)..(547): n is a, c, g, or t
  misc_feature (636)..(637): n is a, c, g, or t
  misc_feature (810)..(810): n is a, c, g, or t
  misc_feature (812)..(813): n is a, c, g, or t
  misc_feature (839)..(839): n is a, c, g, or t
ccaatntcctgggccacctgcagcagggtgcgctccaaccccctttgaccggaactatggaccaagctgggggtgaagccatgntgtggttgncggagaagtgcgcgaggtttaccgcaagggacgggtgttcgccaatnccccagactcggcctgcgtaatcggcctgaagaagaaggcggttgccttcanccccntcantgagataaanaaagacactgatttngagcaccgtatgccacgggaatagtggtgncntgacgctgccggctnatgttgaagatgctggcacaanaccgcatcagtatggccgcctacgtgtnaggggagctggagcacgtnacccgccgcaccctgagcatggacaagggcttctgaggccagccatgcccacgcccctccccagcccccacccatgccagcgcagcgccagggctcagatggggcctgggctgttgtgtctggagcctncaancagntgggggctncgtccctgctcatcccatcccctgcctctatccctggcccnctnccaggccnccctccngctggtgtcttgagaccagcctgccaggccctccagcaggaggacagagtgccctggggcatccaccttcctgcccaggggacgtggcnntgtcggtgtttggaggctgctgcccctggctttggcgccccatgggccctcagcgtctccccatgctgggctcactacatgggccagcccttgctctacctggccggtaggctgtggcgcctaggttgtgttgagagggggatgccctggcctgcctcactgtgacctgctcntnnccacgtgcagcacctgtcactttttntagaaataaaa

SEQ ID NO: 590304 - DNA, 852 bp, Homo sapiens
tggtgctttaccccacccttggcctccccggaatgttcctagtggggcctcttttctcccttgcagcctatcacagtgaaaactcattgggggtcatcaggcagtctactaaaaatagtctcataaacactaactagggcacctcgggaagttgacaaggacccacctcctgcgtctacctcgtggacctccatgtggctgttatgttgagaggttgagctatgggggatggcctgcgacgcactcatgtgtgatcttctactactgaaatcggtcctcggaaagccgagtgctgactggcaagggataaacgcacactagtgatccgttgtgtctggagaaggcaagggtagggtcgaggacgtcagcaagagggtatgtctccccgatagcactctcgacgtaagagggagacatagggtgggcttgcgtagtgggtgcaacgtcatcaggaattgatccttcgctataggtatgcccaggtgagacgtggtaatcaaacagttgggagacgctattgatgtgctctcagattggaatcgttgatttgaagagatcaatttaagaaagggcgatgctatggatgagactgcagattcttgatgcatacaccgtgcatcttttatggaagaaggtctcgaaaggttcacgagttggacagttcaacgctaggaaattccgaggtacgatttctgaagaagcattgagcttagaggcgacacttttggttgaaaaattgccacaaacgtactaattggaaaagtatctaatatagttgaacctgggtacattaggttgggcaagggtgcgtaggtaaatactacaacctatttgaaaggtagggcttgaatg

SEQ ID NO: 590305 - DNA, 1135 bp, Homo sapiens
ttgtgtccttatggtcttttgtgctacttcgtagttgtggttgcgccctcttgtcttgcgtctgtccctccttgtgtggcgtgtgtgttgcccgacgatccttgtttgcttgacgagttttgtggggatccctggagtggtgcctcgtcctggatttcccgtgcttacactcggggtcgccttttctcttcgtctgtcccgtttcccctctggggccactatttccccctgtcgatctttgtgtttgtgagtatcccttaccctctgtgaccagcgcttttttgtttacccgtggtttcctccccatgcgttgccttgtgaggccctcccctcgcccgtgtgggtggaaaattgtgggaccccctcgcccctggggtgtaattaatcactgggctctttcgtggccttcttttgtatcccgctggtgtaaccgttggttttcccccaggagtggtcccattgcgtgccccttggccgcacccgtcgtcgcttaccccaggcgcatagcactccccgtttttgtgtgactttggtggccccccccttggctttccacggttgggcactccatctatccacgcctgcgccacacttgtggtgccctcgggttggattatgccttgggcacaaggttaccccgaggagtcttgtgtgcactagcttgaggcctacacccaccacgcccactttgctgagggcctcgggcttcgccctggaccacccaagtttgaccctcgatgttattgcccacgcgtgcctcttgtttcacactcggtaacctcgggttgaaggggattggagcgaatgtgcgaagttttcacgagggcccgctgaaagatattggctggccctctgagaaaggagttattgatggaagttgtgtgttggagatttctgtttgaaaggaagaagggtgatggaaagaaaggagaaggaaatatcctatacttatccacttccttttggccctgcacgcactgtcactgctccccggatttcaggcttcacgctttactgacacgacgtttaagcttttctggttatgagttgttttcaccttggtgatcactgtctttttccctgtgtacctgtaatatttttccatcatatttcaaagttaagtcatttacatcca

SEQ ID NO: 590306 - DNA, 220 bp, Homo sapiens
agagagagagagagagagagagagagagagagagagagagagagagagagagagagagattggtctgtcatgttcgtttgttctctctctcaagacatagggtcttgctgtattgcccaggctggtcttggactcgggcctcaggtgattctcccacctcggcctcccagggtgctggaaaggcatgagccactctgcctggcccgagaccctgtctctt

SEQ ID NO: 590307 - DNA, 337 bp, Homo sapiens
ggggtgctctagaggatccgagctccaacaagatctcagcatccctgactttgcatttaccaacctttcaagcctggtagttctgatcttcataacaataaaattaggaggctgggtcaacactggtttggttggctaaggttacctggagaccttaggacttggattataataacttgggggcatttcctcagggtattaaaggccatcctagtcttaaaggaggtaggatttcatagtaattctatttctggtatccctgatggagcctttgatggtaatccactcttaagaactatacatttgtatgataatcctctgtctcttgatgggagct

SEQ ID NO: 590308 - DNA, 833 bp, Homo sapiens
actcaccctctaggaatgggggattcatgtcttaaaagatcattacaagttcttcagtatatgctgaaatttttttctgttgcagtgctggaggtaaataccaagagaactagtgctttaaaagcaaaagctggttgttaatggagtaaggatgcttcagcgatttagggagggaacttttaaaagggggctccacatttctcctgttctccttcaacctccatttctacacaggaggtaaatgattttcatcccaatctctttacttgtcgtatttagctttgctcagacatgattacttctcctttacgatttctgttggctgctatccctctgtgttcctcctgaatctagagttatagatgtcatggcatagattagagaaaaccttaaggaagttcccaggcaagatggccgaataggaacagctcctgtctgcagctcccagtgagaacaatgcagaaggcaggtgatttctgcatttccaactgagattcccagttcatctcattgggattggttagacagtgggtgcagcccaggagggcgagcagaagcaggacggggcgctgctcacctggaaaggcacaagcagtcaggaaactccctccactagccaagggaagcgtgagggaccctgctgtgagggatggtgctatctgggccagatatatgctcagacaaaatacaagaaaaccgagcgatcaaaggcggcgggggcaacagggcacgatttggaccggtcacacgggtcccgaccagtttgggacaatggaaacgcgggccccaatgaaagaaataataaaacaggaacgtaaaacaggaaacgcaga

SEQ ID NO: 590309 - DNA, 212 bp, Homo sapiens
tatgtacacgggagaggaaggactgtcctgtttattgggagggaggagggggatgctggtgcagcctgctcagtgagtcacccagggtctgagtggctgacttgccagctctgtggccatgctgacgccagctgctggagtagttgggcagggctttggaaacaccttcccaccttgcccgggaaacaatgcatttgcaacacgggtctctc

SEQ ID NO: 590310 - DNA, 443 bp, Homo sapiens
  misc_feature (114)..(114): n is a, c, g, or t
atgctggtatgagctgggtcttaacactgtattattattcaaccatagtgagtatgagacctggagtcaattgtctcatctgattgatgaggtacagattatctgaataaaatntctgagctggttctgagtcagtaatcccaacacaaactactgctttgtactgaattctgtatgctttgcatgtccttcaataactgaagattttttctccttctttctccaggtctcagtttcataaaatctttcttatttgtggtccctgtgattccagaacgggtgctgctgtttctttcttcatcacgagtctttttggtagcttttaattccttcttctgcttctctaacttctgtttctcccgctgggcttggaattttcgaactttagttatttggtagggttatggttcccatccttgcaaaacttattcagggagtcggcc

SEQ ID NO: 590311 - DNA, 140 bp, Homo sapiens
cacaccacaccgtgctacagggggacagagctgtgaccttaaccttggaagagccccctgtgttattagcccttacaggtgcaagtgtagagagtccaaggggttaaaacacatacaggggcggaaaagacccttctcgc

SEQ ID NO: 590312 - DNA, 368 bp, Homo sapiens
ggacgccgagaggtcgtcttcggtgtgcgaactttgtgcccttcccgccggcgcgaccccaggcgcgttgtgcgcgagctgatgcgtcaaggacgagccaaagacggtgcccgacgttgccgagtgttcgaggaagagtctcgcacgttgtcgccgcattggatgactgcccatcgcagggacgcgacatgaagggggatgcgcaaccaggattagggaagccccgtataggccgctctcacaggttgcccgtagtgcacaaggttgggaggcattttctcgcccgtgcaaacatgagtgtgatgcccccttccaagattgaagaccgacagataattggctcttacaagggtggacttgttgcacac

SEQ ID NO: 590313 - DNA, 495 bp, Homo sapiens
cagaaaacttgtatatccaagaatttataactgcagacctccaacttgaccccaggcagaaatgctgtgccacagattaattcaaattccactgtgacctccctcctgcctacatctgatgccttaactcctcctttccctgtctctggacaaaattacctttagttctcagcttatatcatgctgtttattcagcccagaacccagctcttccagcaaacctgtcctatattctaggcttgggtagatgcctctctattgtggttccttaatgcccaaggtatatctctattatttcatttaccgtattgtaccataattaccattttattttataattaccttttaaaatgtctgtatctactactagactgtgaaattcctgaagtaaggactatgcctgattcagctctgtatgtgtgggacctaacactgtgcctggcacatagtgggtgctcatataatgtttgttgaatgaataaatgaacgaacagt

SEQ ID NO: 590314 - DNA, 332 bp, Homo sapiens
gttttagctcagtgttttttaaaaaaagaaactgcccccccgccaaaaattgttttctttgttgggccaacccaatccgttctccaaaaatggccggggcttataaaaagttataaatatcgggtagctctaaaacaaaccccctgacccaaagggaagtgagcttgggcttagtatttcccttggaagcccgttttgtaatccctgacttatgggccaactggggcagaaattctataaactctttgctgtttttgaaccccgccttttgtttccttttgttttgttttgtaaaaatgataaaacttccgaaaataaaatgtccgtgttta

SEQ ID NO: 590315 - DNA, 116 bp, Homo sapiens
ggacagtcatcccgggtgcgtgcgcggtaggcggcaccatctcgatcacatggaagggccccacgggccgatcttgagctcgccctggtgcaactgccccgagtcgcgcaggaaga

SEQ ID NO: 590316 - DNA, 1128 bp, Homo sapiens
caaactccaatctcccgaaatgccgatcttcccgcctcggtctccccaagtgctgggattacaggcatgagccactgccctggacctcaaatacattttggaactcagaatttaccagtatttaaagatggtgtacaggattataccatctttactctcttgagatggacgtctcgccctgtagctccaggctgagagtgcagctggcatggtctcggctcactgcaacctaccaccctcccaggttcgggcaatatcttctgcctcagcactcccaagtctgggactgcaccacatccgccaccacgcctggctaattacctattattcactggagacggcccttcagccatgtctggccaggactggtctcgcactctcttgaccttggtgatcccgtccggctcgggcatacccaaagtggaagggcgactacacgacgtgagccacccgcgccctacccagcctcagacccaacatgacacgcatcacctcccgtgaccgtccgggcacacccataaccgcaacaacgcacccaccagcactcgcgcccagaggccgcccaccgagcagcgcatgaggacgcggcacacgtcagcccagacgcgcaaacccaaacgagaagcagaagacgcaaacgccgcgggccgggccgccggacacggcgcaacaccgagtccacacacccaacacacccccacgaccaaacccacgaacccccgccccccgaccccgagacgaccgcaaccccacgcgacgcgaccaacaaacacaggcagctacacacgcccccaacaagaccaccaaccagcgcaccccccgcgcgcacccgcaccacccaagggacgaacaggcggcacacgaccaaggcgcctgaggccagcagcgcccccaccacacacgaccagcgccgacgccggccgacgccgaccacgcgcgcggccgaccacccgcccgccggcaggcggcagcccgccgcacaccgcacgccgccacgccacgcgcaccacccccccacgccccccgcaccgccacgccgacacccccccacgcccggacgcacgccggcacccgcccccaccccccccccccccccgcccaccccccgcgcccccccgcacccacgcc

SEQ ID NO: 590317 - DNA, 213 bp, Homo sapiens
tcagagctttcttcatgttgtcagcaacagagctgtctctgcaggttcgtaagcatcgcgacggtttgcatatcttccagtgctatcggctctaactgtcagagctgggtcaacgaacatacatcctggggaccatactggccatcaggagaaaggtgtaagtcagttgtatcataaaccagattgaggaggacaaacagctctgccaaagag

SEQ ID NO: 590318 - DNA, 179 bp, Homo sapiens
accatgggtccactatgaagccttttatctgagaggcgtctgtgagttgagcccctgctgggaaacgctgctgtcactcaggctgtgcatgtgaagaggtggcctgtggtgctggggacaggtctgggtagggcagacaggtggagggatggtacccacacctccagcctcaacgtcct

SEQ ID NO: 590319 - DNA, 677 bp, Homo sapiens
ggcatttgtaaaatattgaaagtggttgagatagtggtataagaaagcatttcttatgacttatttgtatcattgttttcctcatctaaaaagttgaataaaatctgttgattcagttctcctaaaaaaaaaaaaaaaaaaaaaaaaaaaaactgcggggttttttgttggggggcgggaaagaaacagcggtaatcggaaaagggggcgactggggcccatagcgggtgtgccgtggaagcccaggttttcctttggtgacaaaggggggaagactctgcccgggtcccccataataggagaggccggcataaatttccaaaaaacgccagggttacccgtggcgattaatagactccccgaaaaaaagacacaacaacaaaacaacaaataaaataggatataaacaacatagtggcacaaaaacaaagacgggagacggaagaaacagaggactacaaacaaggaggagaaaactatgacaactagatggcggcacgacgtataatagaaagcaacaagaacatcatgagagcaacgacataactaaggctaacgcaacagaccaaacaacacccaacaaacatgagtgaatagaagacagcgaaaagaacaaacagaaaaacgataaagagctcagagagccagaacagcacaacaaccgaaaagaagaagac

SEQ ID NO: 590320 - DNA, 683 bp, Homo sapiens
ccggcccttcccggggatcccccggttccctagtttctttttttaacccccaagcgcaagatggggaagaggtttttttcgcaaacccaaaaggcagtttaattctgctcctcgtgcagtttgttgcccagttctttggttcagtatcccgcccgataattgtgggggagtcgcgggcacttataggcatcaccgaaacctttcttttataacggcctctctcaattttttaagtaccagggagccattttagcccaactattctaaccactcttttaaagcccaccagcacaccgacatgcccgagcagttcaactctaagttcgcaagcaaatttaagcctttccctgtccttggagccattgaaggcaagaaaggtgccactcgcctccttggtcaagctcttgcaagcattcaactaggccgcatttttgtgtaaagtctgtttcaaaagtgggatttcgttgactttatctttttactcagcaataaagcatttgtctatatattggtgtatgatggagacctatacctgtacattttgtttctctcagggaatcctgaagccacgactgaaatgtgaggtatcgagcccatagtatggaacttcacttttacaggtaagaaaagagttttgtgtttgccttttttgtgatcttctgaataaatatgggatagttttt

SEQ ID NO: 590321 - DNA, 360 bp, Homo sapiens
agcggggaacaatcacttgagtgggatagaacacgtcaagactttgaaaaactatggaaaagggatgactgaatttggcaatatgagaaggacatgagatttcaggggccagtggaaaatgatatggttgggatgttggtcctttccaaatctcatgttgaaaggtcatccccaatgtgggagatggggcttagtggaggatatggggtcatgggggacagattctttttttttttttttttttggagagagggagtctcgctcggtcgccaaggtgggagtgagggggcgcagatctgggttcagtggaagctccacctccggggttcaggccattctcggggctaagcctccggagta

SEQ ID NO: 590322 - DNA, 935 bp, Homo sapiens
  misc_feature (12)..(12): n is a, c, g, or t
  misc_feature (25)..(25): n is a, c, g, or t
  misc_feature (27)..(27): n is a, c, g, or t
  misc_feature (49)..(49): n is a, c, g, or t
  misc_feature (86)..(86): n is a, c, g, or t
  misc_feature (98)..(98): n is a, c, g, or t
  misc_feature (104)..(104): n is a, c, g, or t
  misc_feature (110)..(110): n is a, c, g, or t
  misc_feature (116)..(116): n is a, c, g, or t
  misc_feature (154)..(154): n is a, c, g, or t
  misc_feature (165)..(165): n is a, c, g, or t
  misc_feature (215)..(215): n is a, c, g, or t
  misc_feature (231)..(231): n is a, c, g, or t
  misc_feature (244)..(244): n is a, c, g, or t
  misc_feature (250)..(250): n is a, c, g, or t
  misc_feature (266)..(266): n is a, c, g, or t
  misc_feature (273)..(273): n is a, c, g, or t
  misc_feature (279)..(279): n is a, c, g, or t
  misc_feature (294)..(294): n is a, c, g, or t
  misc_feature (298)..(298): n is a, c, g, or t
  misc_feature (315)..(315): n is a, c, g, or t
  misc_feature (322)..(322): n is a, c, g, or t
  misc_feature (338)..(338): n is a, c, g, or t
  misc_feature (359)..(359): n is a, c, g, or t
  misc_feature (381)..(381): n is a, c, g, or t
  misc_feature (408)..(408): n is a, c, g, or t
  misc_feature (417)..(417): n is a, c, g, or t
  misc_feature (420)..(420): n is a, c, g, or t
  misc_feature (424)..(424): n is a, c, g, or t
  misc_feature (469)..(470): n is a, c, g, or t
  misc_feature (473)..(473): n is a, c, g, or t
  misc_feature (480)..(480): n is a, c, g, or t
  misc_feature (483)..(483): n is a, c, g, or t
  misc_feature (485)..(485): n is a, c, g, or t
  misc_feature (487)..(488): n is a, c, g, or t
  misc_feature (491)..(491): n is a, c, g, or t
  misc_feature (494)..(494): n is a, c, g, or t
  misc_feature (504)..(504): n is a, c, g, or t
  misc_feature (513)..(513): n is a, c, g, or t
  misc_feature (518)..(518): n is a, c, g, or t
  misc_feature (557)..(557): n is a, c, g, or t
  misc_feature (590)..(590): n is a, c, g, or t
  misc_feature (621)..(621): n is a, c, g, or t
  misc_feature (627)..(627): n is a, c, g, or t
  misc_feature (640)..(640): n is a, c, g, or t
  misc_feature (651)..(651): n is a, c, g, or t
  misc_feature (680)..(681): n is a, c, g, or t
  misc_feature (700)..(700): n is a, c, g, or t
  misc_feature (785)..(785): n is a, c, g, or t
  misc_feature (916)..(916): n is a, c, g, or t
ggaattcccggnatttgaaaacagnancctcattctaccccatgtcacnagaaatgaaacaggaccctatgaatgtgaaatacggnaccgagatgttngcatgnacagtnacccantcaccctgaatgtcctctatggtccagacctccccagnatttacccttnattcacctattaccgttcaggagaaaacctctacttgatcctcttcgcgnaatctaacccaccggnagagtatttttgnacaatnaatgggaagtttcagnaatcagnacaaangctctctatcccccnaatnactacaaagcatagagngctctanactcgctctgttcgtnactcagccactggcaaggaangctccaaatccatcacagtcgnagtctctgctccttcaggaataggacntctccctcnccncaanccaatatagcagccgtgaagtcatttctgtatttcaggaagactnncanacagttnctntnannctnccncaaaccactnacaatcccnatcantccaaaattgctttttcttcaaggagatttatggaaaanactctcacaaggactcttgaatacaagttcctnataacttcaagatcataccactggactaagnactttnaaaattttaatgnacaggctgatnccttcatgaaattctagacaaagaagaannagactccatgttattggantaaataatcaaaagcataatgttttcataattttctatttgaaaatgtgctgattctttgaatgttttattctccagatttatgnactttttttcttgagcaattggtaaagtatacttttgtaaacaaaaattgaaacatttgcttttgctctctatctgagtgccccagaattgggaaactattcatgagtattcatatgtttatggtaataangttatctgcaatagttcaa

SEQ ID NO: 590323 - DNA, 250 bp, Homo sapiens
gtgaggtgtgcatgtgggtctactaagagcttctgtcccttccttcccattgcaagttgcacccagactagacagctgtagtactaggtctcttatccccgtcatcatgtgctcctatactaacgtctctcccaactttaaaacaaaaacaaacccttccctatatcttgtgtgtgtgccagccattagactgtatcgtccttgccatctcaccgttatttgaacaacaagcacgactcacgacaacctg

SEQ ID NO: 590324 - DNA, 855 bp, Homo sapiens
gtggggaggggaggatggggaagctgatatgtctgcatacgttacatacctatatataacacttgtgcgtatagccatacgacgcatagctggcagggtcatccgaagtagttactaatcgtaagagtcatatatatagcatgaatagtaaactcacgttggtggacctgcgctcctgagcccgactcgaaaattgaggcaaatggaagaagatacagctcatctgtcctaagatcagaatcagtgaagagatgatattctattgtcttagctgaaggttagtaaagtagttatctggacttattaaggcctttcctatttctgtaaccactttattattgcgggcaatcttgaccagtagggagggctatggggtgactccacttcttttcaccatgggtgtaccctgcttaggttaatgaatcatagcaagggctcatcactgccaggtgttcaggtggcgtcttggtggtagggcatgggacgacgcgaggttgactaggacaaccatatgtcagctgtaccttgtcacacatcttgaaaaataagcgacgataatagaactagtgactaatttgcccttacagttcctgcttggtcccacccactgaagtagctcactcgtagtgcgggccgtattagaggcagtggggtacgttagactcagatggcacagtattctaggtggcagtgttaggatgtccagtttacaaaaataatgaagcaattagctatgtgattggagtactgtcggggatgtgtgtgtgggggcatttttttaactggttaatggagtttacacaagaatgcctggtaggaggacctagcaggaagtccgggaattgaagtttaaga

SEQ ID NO: 590325 - DNA, 889 bp, Homo sapiens
  misc_feature (833)..(833): n is a, c, g, or t
  misc_feature (844)..(844): n is a, c, g, or t
ggtgcggtggcatgccggtcttacccttttatgattaaaaataaccaagactttgtggtacaagggtcgaggaggcctaggggatctaggaataaaatcgtggggttcaagcctattgtatctggaactttacaaagatattgctaaatgctaccacaagcagcatatgaagagacactcatttgatatggcctacaacattcaggaagcatatttaagaaaaacagtcactagctataggaaaatacataaattcataggtgagcaagaactttggatactcatcaagcatgggcataacatagggatactaagggtccaaagaacagagaatagactgaaattgcgggccaaggcacttacatgaaagcaaagctctgatagcacagaggttcctcaggtgactgaagaaataccgagacttaagggaggttttaatcaagccgaaggtacgattcaagaacttaaggctaggaaatgaggcagagcctaattaaatattaagcttagatccaagatgaccaaagaggggaaaaaaagatgcaggagaagtagatagtttgggggcatgaacaatccctagttcaagttcatctgtgggcagggggttctcacaaaatgtggtgcggcctaagaaaaagctgttaaagcgggggagaaaaacgcaaagttcagggctggaaaagtggtttaatttagtcccaaaattctagggggattctcatacagggggggttggaggcagtaagcagtagggaatgattaaaaatggaggggcgttttaatagagaggatatttaactcaagagtcaggtaggggaagggaacagggnttaataaggtnaaatgggaaaataccttaaaagctgttttaaaacccggaacattt

SEQ ID NO: 590326 - DNA, 378 bp, Homo sapiens
agcgggcggttgtgtctgggaaggacagaacatggcggcggatccgaacaagaccgaaatccagactctagcccgaggcttcgtgcaggtccaaccaactaggcctggttcgactgcggcgccaagaatccgagttgggccagcatcacgttacggtgttttcttgtgcattgactgttccggggtgcaccgatccctggtgcgtccatctgagcttcatcaggtccacagagttggattccaagtggaactggttccagcgtgaggtgtatgcaggtcggcggtgaatgccaatgcagacggcgtttttgtcgccaacatggatgcacagccaatgatgaccaactaccgaaatataatagaccgagtctgcccaga

SEQ ID NO: 590327 - DNA, 518 bp, Homo sapiens
  misc_feature (327)..(327): n is a, c, g, or t
gggaagggcccggatgctgcggccatcagcccgaaccaaagccccaccagcagcctaatttgggagggtccccctcccccctttttccgatggcccttttccggcaaagttcccccccttgctccccagcaaatctctccaggcccaaggtgcacgcctattatatcagtgaggatgaagaagaataatgtttcctcccccctttcctgtcccccccttttgtccccataccttcagaagctttttggtgaattcccaattggggcccccccccttaacctaagggccgcttccaaggaaagccccctgggggaaaaagacctaggntggggggaaccccaccagcctgtcctgcaagtgacatccctcccccccccgaaggaggggggctgccccttaaaagcctgctttgcatccctttaccccccccccaggggtttgtttccctgtttatgttcccgtggtttccccagggaaattgtccttttccttaattttttaaaaaatttgtttttcca

SEQ ID NO: 590328 - DNA, 890 bp, Homo sapiens
gaggtgatataatttatggggactgccatggatgcggctccaagggatgcagatatgacatattgcagatgccatccgcggcggccatgcccaaagctaaaggagctgaacttgatcatactgtgaaatcaagagggatgctgcacacatggctgttgctgcaggccatggcagacaaagctgagctggagaagctggacctgaatggcaacaccctgggagaagaaggctgtgaacagcttcaggaggtgctggagggcttcaacatggccaaggtgctggcgtccctcagtgatgacgaggacgcaggcaggcaggcaggcaggcaaggcagcaagcagagcaaagcaacgcaggaagccagcacagcaagcaggcaggcagcgcaaagcatcgcagggcaaagcagcgcagcgacagcaagcaggcagagaggaagaggaggcaagcaaagcagccatcaagaagcagcagcggcaaggagcagaagaagatcaaggacacgccgcattcaaaagaggaacaagaaaataacatgggaaaccacttacaacaacatgggagggaagaaccagggacaaattaccccgatgaacaatgaccaatatacacacaaacacattcacatgaaagaaacagttcatcacaaatcctttcacattgagacatattaatccacatcatttcaaagatacaaagattgcgatgaggccataagggacccccaaagaaagcatcccagatgaatgagtaagaacccacaaaaaaagaattgaacaaggtaatgaaccaccggaggaaagggttggtcatcatgacatatcactaaaaggaggtaaatccataggtaatacaaggaaaaaaaatacatgagacaagatggaaataaa

SEQ ID NO: 590329 - DNA, 206 bp, Homo sapiens
accattctcttaaaatccagctttcccctttccctgagagaagagcacatgttggtctcctctttagtgtgaacgcagattgccaggcccttttctcctatgcacaccatgatgactaggcaggggatctggctgcctgcatcatcctcccattgtgctgacagctggccctactttcctccccggggctccccgggatacagggc

SEQ ID NO: 590330 - DNA, 369 bp, Homo sapiens
tatatcttaaaggagtgtgaattaatgtcagtaatttatctttgaacacttgatagaattcaccagtgaagtcatctaggccagtgcttttcttttagggaaactttctgaatattaattaaatctctattatttataggtctgttcagattatctgtatcttcttgagtcggtttcagtagtttgtgtctatcttgaaatatattcttctaagttaatgtcatcaattatctgtagtatttcctcataatcctttttatttctgtaaattggtagtgatgtgccctctttcactcttgaatgaagtaatctgagtcactgcccttttttcttggtcactctaactaaagatgtgtccattttgttagg

SEQ ID NO: 590331 - DNA, 1046 bp, Homo sapiens
gaggtgatataatttatggggactgccatggatgcggctccaagggatgcagatatgacatattgcagatgccatccgcggcggccatgcccaaagctaaaggagctgaacttgatcatactgtgaaatcaagagggatgctgcacacatggctgttgctgcaggccatggcagacaaagctgagctggagaagctggacctgaatggcaacaccctgggagaagaaggctgtgaacagcttcaggaggtgctggagggcttcaacatggccaaggtgctggcgtccctcagtgatgacgaggtacgatggatggaggaggaggacggagaagaggacgaagaggaagcacgacagaagatggaggaggaagatgaggaagaggaggaagaagaggaggacggaggaggcagaagatcctcagcagtcgagggctagggagagaagtcagccatgccctctcggatgattctggaccctaacactggggagcctagttcccgtgctgtcctccccactctccgtgcgagagcgtcatcgcacgcttcactgggcttttaccctcgtccagagaagctgcgtgcgccatagggcccaagagctccgtgctgatagcccagctagactgacacgtctgaccccgagaaggtggtctctgccttcctaaaggtgtcatctgtgttcaaggacgaagctactgtgaggatggcagtgcaggatgcagtagatgccctgatgcacaaggcttacaacgtcctcgtcccttcaactccaacaccttcctcaccaggctgctcgtgcaccatggtctgctcaagagtgacgacaaggttcaaggccattgccaacctgctacggccccctgatggcgtctgaacacatggtgcccgcccggactatttccccaaggcgccttgcacccccttgctgctcggcgttcggtgacgcgagtccaacacgcgccctggcatccttgctccttcggccggccaacagcctgctgcccacgctgtcaccaggtcttagactcaccggctcctcgcgtcc

SEQ ID NO: 590332 - DNA, 857 bp, Homo sapiens
  misc_feature (434)..(434): n is a, c, g, or t
  misc_feature (523)..(523): n is a, c, g, or t
  misc_feature (783)..(783): n is a, c, g, or t
  misc_feature (839)..(839): n is a, c, g, or t
ctacttcctgtgctcttgcggagacgcgcgcgtcggagtgtttaacgcgtttctgggccgccgtaagcccggcctaggggcagctttgactcgagagccggctataggcgcatggaaggttccctggaacgggaggcgccagcgggggcgctggccgccgtgctaaagcacagctcgacgttgccgcccgaaagcacccaggtccggggctacgacttcaaccgcggtgtgaattaccgcgcactgctggaggccttcggcaccaccggcttccaagcaaccaacttcgggcgcgctgtacagcaagtcaatgccatgatcgagaagaagctggaaccactgtcacaggatgaagaccagcacgcggacctgacccagagccgccgcccacttaccagctgcaccattttcctgggatatacatccaacctcantcacgttcagggcactcccgttaaaccatttctgcctcccttgtgcagcacaaacatgggtggacgtattgggtgaccacacgctggcnggcgtggaggaagacctcaatcaaggtgcctggcggcccacaatacttggggcgaagtttacgcctcagggggaaggagctccgggagaacggggatcaataggatcggaaacctgctggtgcccaatgagaattactgcaagtttgaggactgggctgatgcccattctggaccagatggtgatggagcagaacaagagggtgtaaagtggacgccttctaagatgatcgcccggctgggcaaggagatcaacaacccngagtccgtgtattactgggccagaagaaccacatcctgtgtttagtccgcacttanagacggctcgctgggcga

SEQ ID NO: 590333 - DNA, 861 bp, Homo sapiens
  misc_feature (396)..(396): n is a, c, g, or t
  misc_feature (403)..(403): n is a, c, g, or t
  misc_feature (410)..(410): n is a, c, g, or t
  misc_feature (426)..(426): n is a, c, g, or t
  misc_feature (430)..(430): n is a, c, g, or t
  misc_feature (445)..(445): n is a, c, g, or t
  misc_feature (477)..(477): n is a, c, g, or t
  misc_feature (527)..(527): n is a, c, g, or t
  misc_feature (787)..(787): n is a, c, g, or t
  misc_feature (843)..(843): n is a, c, g, or t
ctacttcctgtgctcttgcggagacgcgcgcgtcggagtgtttaacgcgtttctgggccgccgtaagcccggcctaggggcagctttgactcgagagccggctataggcgcatggaaggttccctggaacgggaggcgccagcgggggcgctggccgccgtgctaaagcacagctcgacgttgccgcccgaaagcacccaggtccggggctacgacttcaaccgcggtgtgaattaccgcgcactgctggaggccttcggcaccaccggcttccaagcaaccaacttcgggcgcgctgtacagcaagtcaatgccatgatcgagaagaagctggaaccactgtcacaggatgaagaccagcacgcggacctcgccccccccccccccccccccccnccccccnccccccnttccctccgcgccccncccncccccctccccaccncccccgcccccgccccccaccattcgctaccntttgtgcagcacaaacatgggtggacgtattgggtgaccacacgctggcnggcgtggaggaagacctcaatcaaggtgcctggcggcccacaatacttggggcgaagtttacgcctcagggggaaggagctccgggagaacggggatcaataggatcggaaacctgctggtgcccaatgagaattactgcaagtttgaggactgggctgatgcccattctggaccagatggtgatggagcagaacaagagggtgtaaagtggacgccttctaagatgatcgcccggctgggcaaggagatcaacaacccngagtccgtgtattactgggccagaagaaccacatcctgtgtttagtccgcacttanagacggctcgctgggcga

SEQ ID NO: 590334 - DNA, 656 bp, Homo sapiens
  misc_feature (564)..(564): n is a, c, g, or t
gcccaagatcgctgattgcgtacactgatattgaacacctttggatagtattcctggacacagttgatccagagctgtgtggtattgcgcgcgaccttactccatgatagatgaccatcgtcatgcattgttattactagagaggcttgatccctcaaactccgaatggacttactgtgggcttatactcctatctaaatgactgtcttggcttaatcctcattgttgacctactgcgagaactctctgagctagtacacgactatactggtctcaagttactgcctacgtcacgactggattgctacatcactaccctatactaccgatgcatatgtacctgatcacagtggggctcactccgccaccgacgttgctccatatctctctcattgacacgatatcacactctgaggttcatacatctataatgaattcggattcgaggcctcaacctcgacatcattgccgggttttcctgttgcaagacagttgcacagaggctgaacacagatccaatggtgctggagtttataagtctcaggggtgtcccatgcccatgtngtcctatttgacttgatatcaatgtactgtacgagatcttctacgtttttctggctccagcgtgtaacctttctatcgccttcgtaagatcc

SEQ ID NO: 590335 - DNA, 335 bp, Homo sapiens
ataccatcatgtgatattttgtctaacagtgcctggcttatctcacataagataatggcccccagttccatccatgtggctgccaatgacaggggttttattttgttaagggcctaatcatgttacactgtgtatatataccacattttctttatccattcatctgttgtggacacttaggttgattccatattttggctatggctattgtgaatagtgctgagataaacatgagagtgtagatatctattcaatatattgatttcctgtcttatagatatatatccagtactggaattgcagggtcataagaaagttctattttctatttttta

SEQ ID NO: 590336 - DNA, 442 bp, Homo sapiens
tgtattatatatccacttttaaatatttatttaacttatagtattaataatactttatagatcttagatctataaagatctagaaaaagagatacaaagatatatagatctatacctatatcgatcgatctctcgatctctagatatattctatctaaattatatctagattagatttattcaactaataattagattaaatatattattatataatatagattaattttagttcaaacataactatgttaattaaaatataaaattattatttaaaataatcagaagaatttcttattaaagattattttcattagattaaaaatatttagagtaacaataataaaggttaaaatataagctaattataataataatctatacaatatttgtataaaattaagtaatttattttatactcaataagtatttaatttattat

SEQ ID NO: 590337 - DNA, 1299 bp, Homo sapiens
ggctggaggaaaacaacagtgacaagaacagtgggccacaggggtccccgaagaactcccacaatgccacaggaggaggcagcagagaagaggccccctggagccctgccggaactcacaacgaggactaatcataagggatcatggttgaaggagatctttgcagaggcgtacacggaggttgaacctcaagcggatgacgcgaacgaggtggcctgccagctattttatcccaagactgaatgcaagagtccatccttgtgcacatccttgacgacagtgaggcaccatggtcgttgaagaacgaaaggaggtaatcgaaacacgaaaacccggtcacaaacacagagcaccttaatgggaaaccacatgactcgggcgctgaacacaagcggattccacgcagccaattgcaccacaggattgaaagcgaaaagctctgagatacacaggctctaagaaccaacgagtcccatcagcgatccaacgaacccctcggatagaaaggaaaccaaggagaacctacattcaagaggaatctctgcagagccaagacctcggagggagatccaagcaaagatacacaggcgggcacacgggctccaaagtggcaagaacacaccaagaggagcaaccaagagaaaccctcccagacacatggcaccagaagatccccgcattgcagcggcagacaaaccccagagagagcaccgagcgataaaaccattaccatgaaaagcgtaggaaaggaaacgcaagccaaacccgttgcaagcgcctacaacttaacaagaaagcaccccaaccacttcgagcaagaaagactaaaggaagagacaagcaatggccgggcccaccggacaccacccaccagcggcaggccccaaggatgcgatcacgagaacccaaggaccaaccaaaccgagcacaggcgcgcccacacaacacaagcaccattcctgaacctcacagggaaacaaacactaaatcggagacggcccacacgaaggcaaaaacccgaaccatcaaagagagagccctacgcaggcgagtcgagagattccacgaaagcacacacgaacaaaaagacagagcacacgcgaacgccactccataacacgcagccaacactatcgggaacaagagcactggaagctacaagcgaaaaccactgccaccaaccagccgccgacaggggcgagggagacagcaccgagacgacgcctaccgagaacgacgggaatcgagcccacagaaagaaccaaaggcgacaccccgatagtgagcgcacaacataca

SEQ ID NO: 590338 - DNA, 222 bp, Homo sapiens
atcccaccatgctcacagacatgatgaaagggaatgtaaccaacgtcctcccaatgattctgatcggtggatggatcaacatgacattttcaggctttgtcacaactaaagttccatttccattgacacttcgcttcaagcctatgctccagcaaggaatagagctgctcacactagatgcatcctgggtgagttctgcatcctggtacttcctcaatgtgt

SEQ ID NO: 590339 - DNA, 1485 bp, Homo sapiens
gtagattgactttcttctaaccatccaacgaactacacttgaactcgacctattaccctatcaattgctactcattggagcctcgcattcgctacgctcctacgttactagacctcatcccttgagtgtccgacccacgatgcatgcagtcgggatcgagggcaacacttttcatagggtatactgaccacgttcttgacaataccggtgtactccgtctcaggacctcaagtgcgatttgtgtgaactagctcatgtaatgtcaatgaccctatctagcccctagtccaagtcccttcatgcacgggcgttgttgagccccctttggacgtcacgtttcgcgccctgggcatcacctcttggtatgcgcacccgggaatcattggcttgtgtgtctccctccggtcttgcacttctccctcataaaaggacttcctttggacttcttgtaaactccttctcgcttccgtcgttccactgtcgtcccattgcctgctgcctttgcttagcttacataatgttgcgcattggcgccagggagtcgcacgccgcagactagggtctgggcatctaacgtccattacacgcttgcgccatataacccaggcgtcacacatgcacttcgcacggagccccataggggagcccgtccctgggtacgcagacgctatatactccacattacgtttcctacacttattaagcacaccatatgcccaatgcggtttgcgcttttggcgctttccttaactttctaataccaaggggacccccacttcgaaatggtgttctcccatctgccacttcccacaaaacctatgtattcccttgttaactactacaatagggcgccccctgcccttcaataaaagcttcccaagttttatcccttaaggagttgccccccgctagcttacccggtacctttgcattatccccgatgccacttcacattgcaaactttggcgaggctccactcaaccttttcggtccccctaatttctaaacatgctccacaatttcccctttagaacttggccttagtgacaattccaactttaattaagcctacaacttaaaagcaagagcaacgctgggaaaaagccttacaacagcaaaaccaaacctttttctctatactcgaaaccccccagacccgggaacagagcaaaggaaagaaaaccccccacattattcctaaattaacccacaacacagaccagtaaatatccatgggaatttatctatcacaagcaatcagcccccccattgaaagaggtacatacataattctcgctaatattgtgcattaacccaaaggcagacctcttccaggacaaatcataaagtacttgctgccgcaataatttgtggtaacacccttaacacatagattccccgggggaaagaaaataggcgaacccacattcgtgggagcaacactatgaaggataatgagagctagagacagctcgatatcacatc

SEQ ID NO: 590340 - DNA, 1445 bp, Homo sapiens
tgccagccctgcctggcaggttccctgtgtcagctgtcccatccctggtctgtggatgttcatcgtccagtgctggcactgatgcctgatgtgaaacatgtgaccctgagctgaagccaatgcctgtggctgtgcagtgtgtgtgcttatgatacgcttgtgttgtgttgccaactatcctttgtgacctatgtgacttgatgcctgtacgcctctgtaaagcccaacttcctcacctttgaaacagctgcctggtatcagcattaattgaagattagtcatgtgacaggcctggtgtgctgagtccgcacatagaagaatcaaaaattgtccaaaattgtaacttgtgacgagacaatgtggtgcaagctattgtgagaactatcttgcaattgtcccatcaacctctacagctgcctcactgacaactgtgatgtgacatgacaccagtgaacagcacatggacaatgtgaaccccccaactggacccacccaaaaccttggacacgtctacaccctggaaggagcgtgcatgccagcagactgaaacgagcatccatgaactgacgaaaccaacatgctagcaaacgaacgccaattggacacgctcacatttacactaccaaatccattgaaacacgtgggccgatctcgctgctggatgctttctgcgccctctggaccatgatgacaaccaagaacattcaaggaatcgtcccacgtcactctcacgtagctcacttcatccaacgacggccaccttagactctcctaacttgggctcattttaggtcccttgtcgacatatttacgaccacatttgcacgctgaagcaacctcactgtcggagagacacacaaacacagtggacaacatcgtcaacagtgtcaacacatgtatggtccatccagtgtgtcataaatctcctcagtgtttccccatggtgaaccagacgagccgtgtgcacacgacagacagtgtgagtcaatgttacagagactacccacaatccatgcgacatgcaagctgacaacaccgcccaccaaatctctaaccactaggactgaggagaccactgcattcgccaattggcaatagccagataacacacagatcccacatcgcaccagtacaccttactagatagctagactagtcacgaacagccagcccgacgtccctactccagtacgcagcacgactacaccgggtgacagtgacacaagactttacagtggcactactacccacatagacaatgtctacgactctctccagctcagaggaactgcagcccaagcagtctatagtccagtcagagtgctcacaccataccacactagttccagctccaccctcgactctactcgagaccacaacaactgtctacactaactactactttgcacagcagcagactgccgttgctgcattagcccctgccg

SEQ ID NO: 590341 - DNA, 95 bp, Homo sapiens
  misc_feature (15)..(15): n is a, c, g, or t
  misc_feature (43)..(45): n is a, c, g, or t
  misc_feature (61)..(61): n is a, c, g, or t
  misc_feature (83)..(83): n is a, c, g, or t
gggggattgaatctnatgaaattatatgtgcatgcccttgatnnnggagatcctcatgcangatttggattgcgcttggcaangcatcagaatgg

SEQ ID NO: 590342 - DNA, 191 bp, Homo sapiens
ggcagagtgtaatactgttactctgatgagatataaataaatataattaaatacaatacctatgaaaaactgtccactaaaaaaataccaaataaatttgtagactcataggcaggagacattatacttaattttataaaaatagccgaaccttttggtaagagggaaaatcccatgatttgccataaatg

SEQ ID NO: 590343 - DNA, 112 bp, Homo sapiens
acattaggttagaagccacactccattctagctgagagttgcagatggggaataggcaggtactgagcaaagttttatttgctcactctgtcttccgcgctggagtgcaggt

SEQ ID NO: 590344 - DNA, 238 bp, Homo sapiens
cgatacacctttcctgccatgttaagcccccctccgtgggccctaaaggtccaaggatggaatttcttgtacccaaaagtattcctttttcatataagaagtgttttctctccataggatatgtttaaagtccaggcatagacattgaaacattcctgtataaggctaaaaaattaaaaaaaaaaagtacaaaaaacaacacaaaatgtaaaagtaaacactcgagactagttctctc

SEQ ID NO: 590345 - DNA, 555 bp, Homo sapiens
  misc_feature (517)..(517): n is a, c, g, or t
tgaggcacccccgtgggacaaatgggtactgcctccgtttcgcagaaaggagcctgaggccttggcgcctggaccagcacccaggtttcctgttccagcatagcatcctgggaccctctgctgccttggtccattgacccctgtctgggaaagagctgggcggcctcccctgggctgagcactgtagtgagagtccaggggctcaggtccgtccttcctgcccagctgggaaaggtcctggccctgccacccgtttagctcaggttccttccctgcttccagctcctctttcaggccatacctgagaatcctgtgtctctttggctaccaggaagctcccccagggccaaaagacagtggttttgtcctgacagttactggcccctctttccctgggctgccaggaagtgcagggcccgtttggctcagtttctccctggagtcttcctgcacattaaggcctctctgggtgtcctcctgttacacagatgaagaaactgaggcaggggaggcttangcttctggacgtttcttttcccaggggcttaagaggag

SEQ ID NO: 590346 - DNA, 430 bp, Homo sapiens
  misc_feature (51)..(51): n is a, c, g, or t
  misc_feature (112)..(112): n is a, c, g, or t
aaaatccggggggatgccccggagacaccctcggaataccttgaaatcccngcccaagcaggcagaagaaagccagatgaaccctgatgatattagcactgtggtatagtgnccaaactgactgtcattagaaagaaagaaagtagtttgcgattgcagtagaaataagtggtttacttctcccatccattgtaaacatttgaaactttgtatttcagtttcttttgaattatgccactgctgaacttttaacaaacactacaacataaataatttgagtttaggtgatccaccccttaattgtacccccgatggtatatttctgagtaagctactatctgaacattagttagatccatctcactatttaataatgaaatttatttttttaatttaaaagcaaataaaagcttaactttgaaccatgaaa

SEQ ID NO: 590347 - DNA, 259 bp, Homo sapiens
cgtggtggtggtccgtggtgggcgaggtggtcgtcgaggccgagctggtcgtgcaggccaggcaggaggctggggagcaagagggagccagaattatcaccaagggggtcaatttaaacagcatttccagcatggaggttatcagtataaccattctggattttcgacagggaagacattccactagttgagtctaccgaaccttacattttgctagagctcaagtaccagaaactttagtttcagaagtcctgaaatt

SEQ ID NO: 590348 - DNA, 901 bp, Homo sapiens
gactcagtgaaaaaaaaaaaaaaaaaaaaaaaaaggggtaatcctgtgaaattgatatgtcaaggagccttgatggtgatacccatttggcaatatatccttttttcaaacccattgtggtatgcctaaaatatatccaattttcattggccagccgtacccaataaagtctgagggggggaagaaaaaggggtctcttttcccagctttccccaaattattttcacctatatttattttcgccttctccgtggtaaggccacctttggattctcttctttggataacctggtacaccacgcacaacttcttctttcccttccgtggtccccgtcaatttcttctctaggacgctctccctggtggtaaggagatttacgagaacaagtgtggaagtgtagatctgtctcagcgagattttagggagaacagacacctgtcgacacagggaactccggggaacggtcacaccacgtggcataaattggaccaaagtgctcccttgggacagaattagatcgcggagagggacgccacggaaaacctttcttattcgcataagttcgctggcgacagccagcatgtttgttaacacgttggtggtaacaaaacccccaaattttgggggcgagaaaactcaaaggcctgtgtgcgccacaaataggatatatctatcaacacaaagaaagtggctcttcaaagccaacctgttgaaccctgtgtgtaaattctacctcaaatttttaccaaaacacaaatgttactcaaataaagaggggggggaaccccccttaagcaaagtgtgagagggctcttaaaccatagttgctcccaacgttgaaaatagtggtatggggcttggtggcacccccatccttgaaatcctccatctgtgatcctg

SEQ ID NO: 590349 - DNA, 865 bp, Homo sapiens
tggggcacccaaatgccccccgggtcaccggctctcgcgtccgggggttcgcgaccctccgcctgtgcccccgttctcccctggttgggtgccccccaccggccaccgtcaaagccgatatcgtcgtggtgctggagaggaaggtgtttgcccgccgtctcctggttcaatctcggcagatcgcgcccatgtttttacaagcctttgctggggagaccccacaatgggtcaataatggtctgcctggccacaccacctccatttgggtgtgtagacaacgctgtccaaagggcaacacaccccaggggcccactagttcagggtctggcaacaattgcaacccgcacgattctccgcggggggtgcatcgccacaaagcgcaccggggcccacaacaaagtcgccggcgggcatgcggccaaaggagctccaccagatgtggcccacgcagagggctccacaagagggccacaacggcagatattacacctcgcgtaggaatcgccgcgccgccccccgctgtcctggaaaccccaggggtgagaagcaagcgggctcctgcgccgaccgggttgggtaacacacacagggggccatcactacaagccagcacactccgcttcatacaaacgtggggtcaaggagaacacacaggtcgatgtcaccgcccccatatagatcagatagattctttaggtggacccaccttggcgtctgtatttatcggtgtgcgctggcaccgactaatgttgatagtgtttcttaaacgccgctcacctttttggcggggaccaggcttgtcccccaacgacacgctcccaatatgtcggcaacccccgtagaaaataatacaagacaaacaaac

SEQ ID NO: 590350 - DNA, 420 bp, Homo sapiens
  misc_feature (401)..(401): n is a, c, g, or t
acaataggccatctgcaggctgaggagcaaggagagccagtccaagctccaaacttgaagaattcagagtccgatgttcaagggcaggaagcattcagcatgggagaaagatgtaggctgggaggctaggccagtctctcttttcacatttttctgcctgcttacattctagccatgctggcagctgattagattgtgcccattcgggttaagggcgggtcttcctttcccagcccactgactcaaatgttaatctcctttggcagcaccctcacagacacacccaggatcaatactttgtatccttcagtccaatcaagttgacactcagtattaaccatcacagtaacgtacaaaaagcaacatatattagtaagatatctggatggcttttttaaaantttcttaaaactttgtttt

SEQ ID NO: 590351 - DNA, 1196 bp, Homo sapiens
  misc_feature (1196)..(1196): n is a, c, g, or t
atgacggccggatgtagtcgagtgcgtggagcccgaggggtcgcactggttggacctgggtatgggcgaacctgcgagtgagcttcctagcgagaaggattatcgaggcaagtgcgcatctcaggagaacccgtgggctcagcagtgcctggtgggactgggtgccagagggaccgaggtcctgcaggagtctcgtcgggacggcatactcggccgacggactaatggcagtagagagtagccacagtcaaccgaagattagagagcctggatatagtgtttcaatgggaccatttgacatgatgtcaaaagttctcgcttgggcgggacgcattctagtccttctgtactgcacttggtcgctatagttacacgctgacatccagcagtcatgcagttaggaccttgtcttttacgcatgtgtgcggacctcattatccatttacaagggcaactcgaaggttctctctagacaccgcaactctaaatggtcgccagggttgacagggcaaaggccaagtgaaccacccagtttggcacaggttcaacaaagacggacaacgcctagtggattttcataagtgtgccaactttctagatgaggcgttacatccgcgaggacacctatatcacatctgggctcaagctggtcgaggatccatggagcgtggtacacacggtgcctttcccaaaggtgaaggcgggttggagacgcaaacccggaataaattccacagttgagaggggcacatttactattactctgtggcgcaaatgacttcatacccaatccggttccctcgcggtttgaccgccaccaaggagtataacgcgcgcgtagaacaccaattacattgccgaggcccaggcccgccacataaccatgggttactctttggacataaaggatagaagcacgggggcctggccgtcgcaggcgaacaactttgttgccaaggggctaagctgccgcattctaattcacccctttggaatatgccccacgagggaggaccatctgggcggcacaattcggttgatcactgcgtaggcctttggatgcgccttaaagaaactcgctgaggttcactgaggatagggccatagggttaatcctacactgcaatgttgcaatacgatcgccttcacgcgactacataggggtcttgtcgaaatgtgcccacacccgtatgggn

SEQ ID NO: 590352 - DNA, 566 bp, Homo sapiens
cattaaaatgtgtgtgaataaaaaatacagtggatcttgaagacttagtttggaaaaaggatgtaaaaaatcccattcattttcaaattgattacatggtgaaattaaattgggttatataaataaacaagtatttggttaaaaattaaatgcaacttgtttatttttccccttttttaaatggggaaactaaaaaaattaacatatgtggcttaggccatatttctgttccccagcattgttttagattatggtaccaatatataaggcctggcataggcaaattcaaaaaagttttttattctaagggctttatggctttacccaggcttttttgctgtgagttttctattttcaaagtgttggtttgcgttatatctaagagcctagaagctgcctgatagactaactgcctctgggcccttggaaataatttatcaaggcaacatcgcctcctgtggggttttaaatttaaccatcctgtttattcttcattttgtttcagcaggtgtctgagggctgaacaaacattccttctttctttttttttttggagactctgtccc

SEQ ID NO: 590353 - DNA, 575 bp, Homo sapiens
acggtgccttcgccgaacttttgcacagcgccatgccggcgccatccttcaccctcgcccaccgctggctgtatgcacggccgtccaccagccatgaatttggcgtgctggccgacgccgacctgggcttgtacgtgtgtggcgactggtgcctgtcgggccgtgtggaaggtgcctggctcagcggccaggaagcggcgcggcggttgatcgagcatctgcaatgaaccgcatcaatcccgccaagttgctgctgtcggagtggacagcagcccgcccgcagcacaaggaaaaacatttcctggtcacccagttgctgcgcgacgaagaaggcgatgtgcaggaaatcgaactggaagcggtgatgagccatcgcgttcagcgcctgccctggcaaaccctgcaaaacgctgaagactggaaaatcggctggaaatagccattccgcaaatacctgtacaaattatttgacttgtacagcttcaaacctatgatgagattaagttgtacagaaatttatctctgtacaggaatttcaccgaggtttggccatgtccagcaccgggtaccgagct

SEQ ID NO: 590354 - DNA, 173 bp, Homo sapiens
ctatgagcggctggacagagatcacagatcaaaatatgacaagggttctgcgggaacacaggctctggcttctgatggttgttggcaacgcttaggttttgtgtcactgtgttttctctctctctctctctttttagggccgtgcctgcaccatatggaagtttccaggctag

SEQ ID NO: 590355 - DNA, 123 bp, Homo sapiens
gcggctgggaccctgtacacgtatcctgaaaacttgaggtcttcaaggctctcatcgctgctcaagtacaagcggggctcaaggtccgcgtgtcttccgaacccacccaacttccattttggc

SEQ ID NO: 590356 - DNA, 1084 bp, Homo sapiens
cgggctggactcatgtcgcgcacggtggaaccgatcctcagcaacgccatgcaggcgtcacgagtgcggacgccgtgtcagcaaaccttccgggcaaactggctaagctgcaccgctgaaagtggactacagcatggggcgcgcgacgccagagctccgtaaccccattccattacgagaaggcgtattcgctcaccgtccgcaagagtttggaagcgcgtcactcccagaggccaggacgcgaacaatggacggtacaagtctgtcgagggcgctgtaacgagccaggcgagtgccaactctggacagcattgcgtgaacaggtcccaagtcctgagagccgtctagcatccttgagcaggagatcgatgggcctgtatgatgtggcgcgtccctgagtcattgggcctgcatggatgggtgaagacccatggtaggcaaaagggatgcatagacggaggcttcgttgatggagcgtgcatcttgacgtgtcgttgccccgctaggacccattcatgcgaatatcgccgcgtatcaaaagcgcgcatgcaagggatgaaggctgggtgcatggtcgtctaggcatctatccggcagtcgataggctgcgtccgtggcaaatggcgtcaatcgtggagagagcctccgagcgattcgtgaagagactagagtgctcctcggcgcatagagccccttcatcaagcccgatcttgatgttcctggcggccgctagtcctgaagccaaacgggatcacggtacatgccttggtagtaagcccatgcaatcgtggggggcttggggacctgaagggcgaagtaagtctccccttcgttaaggaacctgttcgttcccaactcagaaggggaataggtgacaccgtccgttctggggtcataattccgccacaaaggcattgttggggtccccctagcgtgtgggggccttcccgtaactcaccttgtgtaggcttgtcaggttctttgaagccccaccagggtaaactggtgcgaatggcgcaagagaagtggttactaaggcaaatccttggacggaaaggtggaacgccaattagaaagcaccttc

SEQ ID NO: 590357 - DNA, 329 bp, Homo sapiens
gggacagtcttgctgtgtcgcccaggctggagtgcagtggcggtaatctcggctcactgcaacctccccctcccaagttcaagcaacactcctgcctcagcctccagagtagctgggatcacaggcatgcaccatcaacgcccagctaatttttttgtatttttagtagagatggggttccaccatattggcctggctggtcttgactcctgtgatcgacctgcctcagcctcccaaagtgctagattacacacgtaagccaccatgcccagcctctatatcttccaacattgttacaaaggttctggattaaggttgtctacaatctt

SEQ ID NO: 590358 - DNA, 918 bp, Homo sapiens
ctcctatctccccatatatatcccgttacgcccttcccccgccctttcttccctctacgaacacacgctaccgtcgactttacctgggatgaaaaaaagaagcaccacctaaaccagactggatggaacacttcctgccctctctcgtcaccttcctactggagcttgccgttctactacgcggactgtggcctaactattttaatactgttgccttggcaccattcctgcgatattaaagattcggactgtgtcccatttaccatacttctatatctctttatctagcaattcataacataaaacatcctgtcaccatccccttattcttaaatttccttctccttcatcacggctgactgcatctgctccatctctccaaatactaatcctcctttctatcaaccatcatatttaaccccgcatccccttcacttatcttttactcccaatcgcttatcatactcatccccctctatattattcttccccccccattataccatgcccatccccatcacttaatctctctacaccctcacactcattaccactcctttcacactccacatacctaacctcaatcttccattcccatcatcttcctcctttcctcatcttcctccgtctacccctaccccaaatatctcaatcaccccatactattgaccacttcactcgacgatacttccccgattttacctgaactcattattcactccaaaaatatacattcatctctcatctcgaaacccaacatcaagcacaattaacaaaccgacctacacctcaccctgccctccccccgttaccccaccccatcacacaacgaaaaaataaatgacatccatctccacatcaatcctacttcaccacccaccaatccctcctccccgcaccaccgcgtccctcaatcct

SEQ ID NO: 590359 - DNA, 181 bp, Homo sapiens
  misc_feature (63)..(64): n is a, c, g, or t
ctcccattctgtgcgttgtgttttaacctttctaatgtgtccattgaaacaaaaaaggctttnnttttcacaaagttcaatttatctacggttttcttttgtcacttatttgtatcatatctgagaaaccgttacctaatccaaggtcaggaggggttactcctatgttctcttttgagag

SEQ ID NO: 590360 - DNA, 296 bp, Homo sapiens
tgctgagctttactctgcactaggccatgtgtaagtgcctttacatgtacccattacttattaggaatgtttgttacatccagtcactaaacactcaagcaccaagtacttaggccagcagtagctgttacggcagtgataagacctagtttttatcctcagtaagctcagaggcacctcgtttagtctttctcccaaaaaccctctgaaatgagtattacttccactttatagatcttcaggtttaccgagggaagtaacttgtcccaaattcgtgaagccagttcagcaatcat

SEQ ID NO: 590361 - DNA, 505 bp, Homo sapiens
  misc_feature (33)..(33): n is a, c, g, or t
  misc_feature (58)..(59): n is a, c, g, or t
  misc_feature (175)..(175): n is a, c, g, or t
  misc_feature (189)..(189): n is a, c, g, or t
  misc_feature (195)..(195): n is a, c, g, or t
  misc_feature (203)..(203): n is a, c, g, or t
  misc_feature (250)..(250): n is a, c, g, or t
  misc_feature (353)..(353): n is a, c, g, or t
  misc_feature (355)..(355): n is a, c, g, or t
  misc_feature (358)..(358): n is a, c, g, or t
  misc_feature (361)..(362): n is a, c, g, or t
  misc_feature (372)..(372): n is a, c, g, or t
  misc_feature (378)..(378): n is a, c, g, or t
  misc_feature (380)..(380): n is a, c, g, or t
  misc_feature (385)..(385): n is a, c, g, or t
  misc_feature (387)..(387): n is a, c, g, or t
  misc_feature (390)..(390): n is a, c, g, or t
  misc_feature (393)..(393): n is a, c, g, or t
  misc_feature (395)..(395): n is a, c, g, or t
  misc_feature (405)..(405): n is a, c, g, or t
  misc_feature (407)..(407): n is a, c, g, or t
  misc_feature (414)..(414): n is a, c, g, or t
  misc_feature (423)..(423): n is a, c, g, or t
  misc_feature (428)..(428): n is a, c, g, or t
  misc_feature (430)..(430): n is a, c, g, or t
  misc_feature (433)..(433): n is a, c, g, or t
  misc_feature (435)..(435): n is a, c, g, or t
  misc_feature (440)..(440): n is a, c, g, or t
aaaagatgacaggacacagagccaacccacaanccaaatattcataactgtcctgaannacacagagcccaaaaaaaggggccagccaccccacccccgtaaatactctggctgtgttataaatatggcaagaaataaacatgaccaataccaatagacttcttgaggctactanaagttttgagaaanaaggtncaaaaaanaagaatgctaacacttaagcacagactagagcttgcttgggtttctncctgcattacaaggtaaaaatttgttaatgtttgtttttattcagcttgggaaagctttgtgccatgaatacgtcgcatttaataacaagcaacacacggcananagnaannactttaattnaaaaantnacatngnagnttntnatatcagacntnacaaagntttgagttnatttncntgnanaactngggtttgtctggcttttggttttctttttctttaaaaataaatgtacagtaaaactacaagcaaa

SEQ ID NO: 590362 - DNA, 930 bp, Homo sapiens
  misc_feature (930)..(930): n is a, c, g, or t
cacggtggctcacgccatgtaatcccagcaatttgggaggccaagccgtgtggatcatgaggtcaggagttcgacgtagcagctgatcaatgtggtgaaagcccgtctctactactagtgcgaaaggaagagctccctgcatgtcctgcattgttgcgcggccacatgggtgtgaaaaagggatctcagacggcccgcatggagggtgaaggtacgagcttaaagccgagtggttgtggctgcataggacctcttgctaacttgggttcaaatattggtggtgagagtatctcggccaacataaaaatccccggggggtaaactgagagagttctatgctaggccgggcgcgggtgggtcagaacctgtaagcgcagcaactagggagggccacagtgggtggcatcatgaaggttccggactccgaagttagccaagcatggtgaaaccccgtctctagttaaagataacaaaaaattacgctggcttgaatggcaatgcgcctgtaatcccagctactcgagaggttgacggcaggaggaatcgctttaaacccaggcggcagaaggttgcagttgagccaagaattcggccatgattcacaagcctcagcaactatgacgttgagactggccccaacaacaaaacaacagaaccctgcattcaaaaaatccggaggagattttcagcagggccattataatagttaacacagggattacgtgggttgcaatagcttgacacgtttgtggtgggacttcaaggcacacaagtggatggaaaaggacgccaccggccattcacatgtgagggaagccttatggccttagaagggtacggcagggcagacgaacagcgcagtgacccgccgtgtcacccatagaggcgccggaagcaaccagcgagcagtcgtgttgtagtggctaaacn

SEQ ID NO: 590363 - DNA, 345 bp, Homo sapiens
tatctgtggtaagctgacagcagttttacccaccattgcttctgcaccatcagtgcaaatgtcaaaatagtgaaaaggccaggtgcagtggctcacacctgtaatcctcagcctcccaaagtgctgggattacaggcatgagccactgcgtctggcatatcttagttttattatgcaaatagttttgaccttgcagatcctctgaaagggtctcaggaacccagacaattgtaaccagaccattctttaaggaaccactaaacagttttgtaggaggcatttctggttttcttcctttttccctttttggcatatttatttggctaacctttgtttaccacacct

SEQ ID NO: 590364 - DNA, 173 bp, Homo sapiens
ctacccacggaatactgtacggagcttgtcatcactggaaatcccatcaccatcttaccagtgagcgagatccctccaaaatcaatgtggggcgatgcatggcgcatgagtacgtctgtgtcagtccacatggctgtcttacacctaccactggatgaatggcttggggctca

SEQ ID NO: 590365 - DNA, 157 bp, Homo sapiens
tggaatagtgctgcaataaacatgggagtgcagatgtctctttgatatactgatatcctttcctctggacatatatctagtagtgagactgctggatcatatgatcaaattggctcttatccccagtgagttggccggatacgaaggctctcatcta

SEQ ID NO: 590366 - DNA, 164 bp, Homo sapiens
  misc_feature (68)..(68): n is a, c, g, or t
actctttaggatcccctcatcaaaccctgaaagcggggcctcacgatccttctgaccttttggggtgnaagcatcatcgaaaccctgtcatcgaaaccctaaatctctcattgcgtctagaatctcctatttttgaggctgatccacggctaagggtttgatga

SEQ ID NO: 590367 - DNA, 822 bp, Homo sapiens
gatgaaggtggccacactaagtgatatggtttgactgtgccccactcaaatctcatcttgaattgtagcttccacaattcccatgtgttgtgggagggacccgtgggaggtaattgaatcatgtggatgggtctttcctgtgctgttctcatggtagtgaataagtctcaagagatctggtgggtttataaggggaaacctcttttgcttgtctctcattttctctcttccctgcagccatgtaagatatgcctttcaccttctgctatgattgttaggcctccccagccacgtggaactgtgagtccattaaacttctttttctttataaattgcccagccttgggtacgtctttatcagcagcatgaaaatggactaatacactaagcaacggatttttaatgcagacaaaatagctttccattggaagaagatgcgatctgaggcttttatagctagagagaagtcaatgcatggaaacaaagcttcaaaggacagtctgactctcttgtttggggctaatgcagctggtgactttaagttgaagtcaatgcacatttaccatactaaaaattctagggcctgtaagacattatgtctaatctactctgcctatgtgctataaggggagcacatctgtttacagcatggtttactgaaattttaagtccactgttaagaacctattgcttagaacaagatgcctttcaaaatattactggtcattgacaatgcacttagtcaccccaagaactctgatggagatgtttcaaacggattatgtttccatgtctgctgatacatttaagtctgcaggccaa

SEQ ID NO: 590368 - DNA, 133 bp, Homo sapiens
acggatccctcaaacttcgacggacgcattcatatttatggtatatatgttctgtgaggttttcgtccttgtttgttggaaaaagttctttactattttagggagatcatccttggcctactgatttcaccag

SEQ ID NO: 590369 - DNA, 189 bp, Homo sapiens
tggtgatggctggagttttgtatgaattgaaaaactaaatggattatgagaaggcgaagaacaggtataaaaggactaagaattgggaggaactaaggcatctaattagagagtgtctaaggagattcagcatagttctgtcggcaaagattatttatttacttcaagagtttagagtggcagtttggg

SEQ ID NO: 590370 - DNA, 436 bp, Homo sapiens
  misc_feature (1)..(1): n is a, c, g, or t
ngactgtttctatgcatcttaaatacttgagtgctgtgaagtgtatataatgaagtagggaagaatgggctcccaaggggtttgtgatctggtggggtgttgaattaagccatacttgggagacgttccatagtgcaaggtgtccgtgtggctcaaaagtaaatcttttactccgagtactctggctgggtatactgctgccatttcaggttcagccatgtctccatttcagttcccaatatcatagttttccttgtcagggtcagaacctgtcgcgtcacttttttctcctcttcctcaaatccatttgctctcattatgtctcttgtgtccgcctttcctttccattcctccttcaggcaccctgatttctgccccaacttactacagctctgaattatggcaggtgctcctcatctggtcccggcataacttg

SEQ ID NO: 590371 - DNA, 371 bp, Homo sapiens
agcgggtcccgcgtctctgggccagctcctgccgcgtctccgccagggccccgccgggcgccgcccactttcggtttccccgcaccaccggagccgcccgcgtttgggaatcacctcaaagccccgggactgacatgggcttcagggcccgtccacagttaaggatccggttgccgagaaccgagggacacacgtgtgaacctgcacgtggtcgcccagaattacgagctgctccggtgccccttataggcaccccgcacagtgagttcgacaacgatagtataggccacgcccgagagaaatcctaccgggaagttatagcattcagcaggcactagacagtcccacgatgacgtggctggtctccgatg

SEQ ID NO: 590372 - DNA, 115 bp, Homo sapiens
tgcgggaaggaatcaggacctgatgatctgagatggaggacagaccaacgaggtgcacgaggccggcatcccgtgctggactacaagagctgatgatcgagatggatggacgagc

SEQ ID NO: 590373 - DNA, 115 bp, Homo sapiens
aatgcctctacacgctgccaggtggagcactgaaaggcagtcgttgccttccgtcaggagccctatgtctcagttcaatgtatgcttggcccagtatgttgtgctgctgaactgg

SEQ ID NO: 590374 - DNA, 175 bp, Homo sapiens
tccttcatcatacctaccccttcatcatacctaccactgtaggagatgtgcgtctgtgcgagaagctactgagggatgccgggggacaaggagctgggctgaggatgagaaacagaaggcagagacagtacaggcagcactggaggaggcccaaggggcaacaggtgtattgccc

SEQ ID NO: 590375 - DNA, 435 bp, Homo sapiens
  misc_feature (46)..(46): n is a, c, g, or t
  misc_feature (105)..(105): n is a, c, g, or t
  misc_feature (149)..(149): n is a, c, g, or t
  misc_feature (226)..(226): n is a, c, g, or t
  misc_feature (245)..(245): n is a, c, g, or t
  misc_feature (307)..(307): n is a, c, g, or t
  misc_feature (361)..(361): n is a, c, g, or t
cgtctcccaggaaaaggaaaagggttaaaatgcaccgaggctgtanctgggctacttgatcttgctgaaagtgtttctaaagatagcaccactttttttttaaancttttatatattaaaaaacgtatcatgcaccaactgtgaaatantgcccttgcgcaagaggacccggggaggggtcccgagaggttccccatgcaacactggaaatgactgttccagagancgggcagacctggcaaagnccctggcgcctgagactaccaccccactccgttcctgccagaaacgaccctcttgtgccgantgccatgcggcccctcgcagccaactcagccagtgttgggacttgcttcaaganccatgggggctggaggggggcagctgggactctggaatcttctttataataaaaagcttacggacaaaaaaaaa

SEQ ID NO: 590376 - DNA, 383 bp, Homo sapiens
tgtgttctcctctcgatgtctgacactgacaaatggctccactggaccaacaagccctccaacaagccctcctgtggccccacccagaagcgattcagcaattaagggggattttcccacacccctatgactgcattccccaaccaatcagcagcaagcacccattgccttactgcccccaccccttcctccaaactacctttgaaaaacccctaagctgccaggcgcagtggctcacacctgtaatcctagtaccttgggaggccaaggcagaggtcaggagttcaagaccagcctggtcaacatgatgaaactccatctctactaaaacacaaaaattagccaggcctgggggcgtgtgcttccagctacttgggaggccg

SEQ ID NO: 590377 - DNA, 1667 bp, Homo sapiens
agcaagaaacccaagaagaaagagaaaaaacacaaagagaaagagagagacaaggcagaagaagaaggagaaggagaagaaggctgaggacctggacttctggctgtctaccacccacagacgcggtgactcgccagagcaaccacgcaagcagaccaagagcgactacgagaacgacaacacaaggacagagagaacaagcaaaggagagagcgcgacgacgaggaagcgagcagaagcaaagaaagcagcactaccacagtaaatacaggaccagcacacaaatacaaacaagacacgcagacaacacgacagggacataacacacacaagtaagaggacagaacaacaaccgcacggcacaacacaacaagaacacagagaaggacaacgagagaaacacacacgccaaccaccagacaaaaaacacaacaagaacacacaagcaaaaacagaagcgagcacgacagaggacgagaagagaagaggcagcagaagacgagagcaacagagacagacaagcacagagaggaacgaaaagcacagaggggagaagacagaaggaaaaacagaggagcgcagatgacaagggcaaggagcgcggacgacgacaacagcagaagacagaggggcagcagagcgaggacggacgagagatacgagggcaggcaggcacaggacacgcagaacacagaaagcaaaaacaacaataggcaaaaagcaaaagaaaacgagaggacagaagccaaagaccgccaacaacaaaaagaaaagacaagcagcgaagcacaaacgagaaagcaaaaaacaacacacagaacgaggcacagacgaacagcaagacccgaatacaacaaccaccaaaaaagaaaacaagaacgagacagacagccacccgacggcagcccacgcaagagacaaagcgacgacgccgacacaccaaaacaacacgaagaaagaccacaacaaaacgaacgaagacacacgagaaccgacacgaacgacgagcagcagcgcagagaccgaagagccaaaacaaacaaacaagaaacaacacacaggaaaaaagaagaagaggagggaggagaggaggacggaaggaaggggcggagacgcagtgagagaaaaagggacagcaaaaagggacggaaaagcgaaaggagccaacaagagacaggaacagacgagagaaaggaaaggagaaggaggcgcacagagcgagagacaaggagcaagagaagacgaagcgcggagcaagccgcagcgagcaccgacagcgcaacagggggggggaacgcagaaggcagagacgcagacgagacgagacgaaaggaagccaaacgaaagcaagtcacgagccaggagcacagacagcaagagaagagagcgaagcagcaaaagagagagcaatagcgaggagcgagagagggagcgagagcacagcacccgggcaaaaggacgacagatagacggagagagcaactgaggaagcaagaacaggaccgagaacggagacaggacaagtacgagagactcacgcacgcaggagacgagaacaacccagaccgaggaagacaagagcaaggaccaacaaacgaacgaggagcaacccgagcgaagagggacagcagacgaacagatgcaaagaagacgaaagcaaagaccaa

SEQ ID NO: 590378 - DNA, 196 bp, Homo sapiens
tagccctagattatagttcacagtaaatactgtacgaataggctttcttagattgcatcacttctttttagaactttagatcctccaggacagtctcccgtatgatctttcaaatttcttgtttttttttgggtctgtttggttttttcctctcctaatttctgacttagttttctattctacttctaggagattt

SEQ ID NO: 590379 - DNA, 144 bp, Homo sapiens
ttattacataaatggcttttccaagagtcaggcaataacaaatgcaatgtgaggatgtggaagaaagagatccctcatacactgtttgtgggaatgtaattagtacaaccactgagaaaaaacggtttggaagttcttcagaaa

SEQ ID NO: 590380 - DNA, 501 bp, Homo sapiens
gggttcagtggacacaagggtgggtgtctctccacctcctcacatatgctaacaggaagcagaacattcaggtgcctttgcagaaagagatggcagagtgtcttgaagtcagaaaggggaggagtgaagaaatcctgcatctcagtccctcaaaaaaaaggtggctcaggcttttcaagctgtgagagacacatccgaggcctgggcactgtcgctggacgcagcctgagagtagctccctccttttccacctgagctcttcctcctaaacatcacagtagcgaccacagttccgatgaccacaatggctaggaaagccaggccagcaacaatgcccacgatggggatggtggactgggaagatggttcccatctcagggtgaggggcttcggcagcccctcatgctgtacatggcatgtgtatctctgcccttctccagaaggaccaccacagcttgccacttctggaaggttctatctcctgcgggtctggtctccaca

SEQ ID NO: 590381 - DNA, 877 bp, Homo sapiens
  misc_feature (1)..(1): n is a, c, g, or t
  misc_feature (414)..(414): n is a, c, g, or t
naaactggttgtgcgtttgggcccgtaaacacgctcgcgttttcatgggaaatctggtcgtgagtcgtttcacggacccagaacgcgggcgctacagctggcgctttcggagcagttgggccacccactaggtcccggcctcttcttagggttacaacagccgcgttctcggtgggagcgcccccccacagggttactccgccactgcagcccacagggggaaatctacacagttgcgacgcggcatttgtgcagtcaccaaaacactggtgtagcccacagtcctatgcggcgccgtatacaagtgcgcagcgctccaacccaggcgctactcttactcgggggtcttcctccgaacaacgaggagcacccaccccaccagcgctggggcgaagaaaacacggccctcccacngtctgtggagagaacacccggacggtggataatgccgccctcacgcgccaccactatggtggtcggcgcctcaccccacccggcgggcgcccgtcgagcggcagagagccaccccacacgccgaagacaaggaggaggcgccgcgacaccccacgactgcggacagtggatagaaaagtcgagagacccgccgccacacgggcataacaccccctccgccaggcgtgtcacaaatctcgcatagacgccgcccacactgcatccgctgctgtgcgccctaggccacacggcccgtccctccggaatctcgcccctcgccgccccaggagggagaagctccacgccccgccaccacaccggtggtgagggacaccctccgcctccggttcacatctggaagggaaaattaatttttaacccgttcgggaaaaaaaaaatcatacaccctgctccaaacaaaaca

SEQ ID NO: 590382 - DNA, 247 bp, Homo sapiens
ttattagtcctgatacctgaattattaaccatgatatctgagactcaaaactagtcagtgaattatttgaaaagtgtgtgcacctgcaacatcactttaagtcatttagtatcggccttctcaaacagctttcatccctcctggttaacagaaatgcgattgtcagatatcacatttcctttttaaaacttaatttatttaaacccaacaaatcatttgggctcatctcactcatctgtcaaacatc

SEQ ID NO: 590383 - DNA, 129 bp, Homo sapiens
gtgaagataaagtaagtgctgtttggctacaggatctctcttgcagttgcagccaggcgtgattccagcagcgcttacccggagcccgaagattcactatggtgaaatcgccttcaatacccctacccc

SEQ ID NO: 590384 - DNA, 347 bp, Homo sapiens
ggtcctccaaatctaccaggccatctccccagtttcccagttcttcctgtgtgcgggcgagagtggttgggccctcgggaacccactcagagcgagtctaaatttacggagggactctctgttagcagcatgagggcccgtcgttagacctatagaggtatctccgttgattcaagccagaaagtcctgagagcggatcggggcgcatctgcggatcggtcactttttcctcctctctgagtctcttaccccccaccacagcgacggcccagccgccacgatgccctggtctcgcctcctccatgctctcaacacgcccctaccttgcggcccagccccggctcccc

SEQ ID NO: 590385 - DNA, 244 bp, Homo sapiens
  misc_feature (213)..(213): n is a, c, g, or t
atatttatttttggtagatatgggtcttgtatgtgcccaggtggtgtccaactcctgggcaaccttgcttgcgctcccaaagtgctggcctcccaaaatacgggcgtgagtcaccgtatttttttttttttttggaaacagagtctcattctgtggcccaggttgaagtgcaggggcaaaatctaacctaattgtaacctccacctcccaggntacaagcaattcttggggcctacagcctccc

SEQ ID NO: 590386 - DNA, 384 bp, Homo sapiens
gggaatctaagttagtgcattttgaactgtcgcctgtgtgtgaggtgctgcaggaaattctagtttgataaggggatgccgagggaatttcctggcatggatgctgcttgcttactgcttataagttaatgtgtcaagatagggaccggttgctacaaaagaaatgtaagctggaaaaggaaaatgctaatttgacttccagactggccctggcccaatgccaggcctatgtcttgactgatcaagctcaaagctagtaatgcttcctccatagtctggtgggtgtaaatatatatagacatagctcttcttctccctttcccactgcgatttgcttattatgtctgtattgccatatacttggaataaaggtgtttaccctta

SEQ ID NO: 590387 - DNA, 817 bp, Homo sapiens
  misc_feature (349)..(349): n is a, c, g, or t
  misc_feature (378)..(378): n is a, c, g, or t
  misc_feature (404)..(404): n is a, c, g, or t
  misc_feature (435)..(435): n is a, c, g, or t
  misc_feature (588)..(588): n is a, c, g, or t
  misc_feature (599)..(599): n is a, c, g, or t
  misc_feature (601)..(601): n is a, c, g, or t
  misc_feature (605)..(605): n is a, c, g, or t
  misc_feature (607)..(607): n is a, c, g, or t
  misc_feature (626)..(628): n is a, c, g, or t
ctgctccctcttcagggggaggctttggagtttggagcttgcgtctgagtggcgtggaatatgcatctcctgcgggctgtttctgctcagctgagtctggtggtgctggagaaatactgtctgctttgaataccctagagacctctccaagcccagcattgttgatgtatttgggagctgactgcaccatcagaaaaatcttctagaaggaggcagtagagaaggggtgattttggtagctccagaaggggctccagcatctggagaaagaattctaggaagaggattccatgtcatccgcctttaagtctcggaagtaagcatgaagaatcccagtggtgaggagganaggctgaggagtcagaaaaagctcctacnagaagatggaacagctcctacaaagnggtggctgtgggtagaagcagccgcctgggncagttttcaggctttggagaaggaaagcagcttctctgttgaggaatattctgcaagtaggtgatcactttgaaagctggttactatccttccttctaggcctgtcggtggggaaggagggcagccgtgtttgctctgctcccatgaggcaanttcggtcaccnanacananaaacagcttcttatgtagnnngcaggggaattagcctagttttcggatattcacccagtattctagctttttaaagaacagcctgaagaggctgggtgcagtggctcatgtgtgtaacctcagcactatgggaggttgaggcgggaggactgcctgagcccaggagtttgagaccagcctggtcaatgtagtgagacccccatctctaca

SEQ ID NO: 590388 - DNA, 720 bp, Homo sapiens
gggcaccataccataccatggcaggcaggcagaagagagttttcattttagctctcttccactaacttgtggactttgggcaagacattaactaccctgggacttagtgttctcatccctaaagaagggtttagtctgtggtctccaagatgatttctagcattactgttctgattctagataagaggtagagtagagaggatactatgaaaaagaaccacaagataggacagggattttgcaaagaagaaatgagtgggtataagacactggtagaaggagaaaggaatcagagtccagagcttgagctcacattcaggggagttaaaggatgataaaaatgagtcgtgcatctgcatgtggtttttcgatttttatggtgattcatttttctgtattacagttttacatttaaagaaatgccttggtgtgcagatgtctgagtgtctgtatgcttggctgagagattcttggattcacttaactagagaaagaaaaacatgtttggatcgttgattattcttgcgctcctaatatttagacaactttggttcccaccctttcctaaagacttgggaaactaatggaagccagttacccatctttgacaaacattcgcagaggaacagaggcaccatgaaatgttgacccattctttgcaggaagactctcagaatctaggaaccatgccatattccaggtttaaaagacctggcaatg

SEQ ID NO: 590389 - DNA, 132 bp, Homo sapiens
catgtcgggttacccaaggtcttagccgggagttaacattgcagcgagctgtgattgtgccatggtattccagcctggtgtgacagagcaagaccccatctctaaaaacaaacaggctaagggacccttgtg

SEQ ID NO: 590390 - DNA, 555 bp, Homo sapiens
ctgccgtatgaacttaggattcaaatgacaaagcacagctgtgccttatagttccttgtggcatctgatgacctgatgtcttcttgattggccttgtagcaatatgtggttgctcagcttcagtgaaaaatatattgccttttcccccatatatatgcaatagcacacaccctttctgctttcaccaaggttgcccttgataataaacggatgtaatcctgcataagacctgggtctgaatgtcttcttaggaacacatttgtcagtgctgacctcgagagcttgctccactcgaccgaagggcaggagcctcagcctacaactatgttccagcacttgccacagaacactttgtggtggggcagaaccaggaggaagcaacatccaccccagccagaccctctgattccagttgggtggctcgatttctccccgttagggagagggcaagaaaatacgctttaatttaaaaggctgtcataaaaataggaacatacactcttccttcagctgacccaactcaattcctgtgctgagactaattcaccaggacat

SEQ ID NO: 590391 - DNA, 396 bp, Homo sapiens
tttaaagacaggggcctcattccctggttggctcagggctggaagtacagtgggcatggatcttgggctcactggcagcttcggacctccccggggctcagggtgattcctccccacctcagcctccccaagcaactgggaactaccccagctagtcctacccatgaccggttagttttttgtatttttaatagagacatggttcaccacattgccccaggctagtcctgaactcccggactcaagcagtccacccacctaggcctcctaaagtgctagaattacaggcgtgagccactgtgcccagcctgttacatctacattagatatatacatatataattattatatattttatatatgtaattatttcctaatgaaataacagacaacatt

SEQ ID NO: 590392 - DNA, 118 bp, Homo sapiens
ggaggtacaggatccaggaaaagtgtttgatgaagctaggactgaggcgcagcgagtaagcagcagttcgtggtgaaggtaggaaaagagtccaggagccagtgcgattagggttagt

SEQ ID NO: 590393 - DNA, 334 bp, Homo sapiens
cgttctaaatgcattcaaaatgacctgaatttccacaaatatctgcttaagattcatgtcattgttctaaacctctgtgtttacagggcttactgtttctgggtccggaactgaatggtgatctgctgtgaagtcagtgttcatgtaaccttattatggtcatgtaatcttattaggggatgatatccatctgtgcgtacgctccaggcatgctttaaaaggatgatcttggctcacaaacacactgacacggatggccactgatctgtggatgacagatgtttactgcaggctcatgaaacaaatccatggagtttgtaatcttttcattcaa

SEQ ID NO: 590394 - DNA, 197 bp, Homo sapiens
gaggatccccgaggtgccttagaagtgctatgttgcacactctgtctccttaacttatcacagtgcaagctttgagcagcatgcatgacagccaccggaaatcttcagagcagatgaggtctcacaatcaatggccgctagtgaggagccacacttacacgctgcactgacaatgtcacagctcgcttctgcctgtg

SEQ ID NO: 590395 - DNA, 270 bp, Homo sapiens
ggccgctcccatcccggcagccctgggtgctgctcgccccaccctcgcttatttgtagattcaaaacgatgtttttttttgtgcttttaaaagtagggagttcaccagtaacagccaggtgaagcgaacctgctgggtgatttgtttgcgctctgttttatggggcattcctgcgaaatgtgtcagcttttgtgtgaaatgcagccccagctcatgtggaccaaagtagaaaacccaatcccagagaaataaaaacatggttcagagaga

SEQ ID NO: 590396 - DNA, 144 bp, Homo sapiens
cggtactctaagatccggcgagcgcatggctgcacggtggatgctgctgctgtgcttgctgaggcgggtggtcggtgctgggcaggcgatggagaaggtgacaggcggcaacctcttgtccatgctgctgatctgctgcgcctt

SEQ ID NO: 590397 - DNA, 813 bp, Homo sapiens
  misc_feature (813)..(813): n is a, c, g, or t
tctctaattaccccgctacagatcaataatggtggactttgaaaagctggatgactacacctctgcctttcaaggtcatgatgttggattctgccgcctgagtaccaccagagggatagctggggcggagggatttgctcgcgttgaccgagattatgtgctgaaatctgcacagctggcaaaagctggagggtgcaaacatttcaacttgctatcctataaaggaggtgataaatcaaccactttttttatatctacgagttacgggagacgttgaagccaaggttgaagaattaaaattagatcgttactctagatttaggcctgaacctctgggccctgataggccatacattctcccaggtaaatgggtggatagaaacgtctttggcttcttaccagactcttgggcccgagggcattgtgggccctgtggctacccgggttccagcatgctgaaccaacgttgggggtaccgtaaccaagccagatggaactgctgggaaacaaggccctccttggacatggggaaagcgctaggctctctaagcccatagctcattcggagaatgggtgttaatcggcaacccttatagccatcaccaattgggtatttccaggtttaaaagagttacaacgtctcagcttcggtggttactatccggagcatacttgcaaaaggaatgatgcgcttccatagaagctgaagccgattgactagagaccttgaggacttggcaaataaagcctggggcattatcatcttgcccacagtggggggggggcccaaactcgttttttttgggaacctcn

SEQ ID NO: 590398 - DNA, 150 bp, Homo sapiens
catgggatggaggacccggaggctcttctagactaaaacgtggtacaaactggcatactaacattgagattcccgagattgagatcgcgaaatgagtgcaatagaaaatttcgcctaataagtaactgatgcacagctgatgtgctttgt

SEQ ID NO: 590399 - DNA, 203 bp, Homo sapiens
gaaacctaattacgcaagtcactgagcccccaacatgccctgtgatgcctggcactgatgccccggccaagggtcactcagagagagcccaccgttacctaagcttcagtggagtcatctcttgtgaatcaacttcataaccccaacccagggcgatgcctagaaacatcttctcaatgaaagagcaggagccaacccacccc

SEQ ID NO: 590400 - DNA, 189 bp, Homo sapiens
cctgccatatgtaaaccctgtctccgctagagatgaacaatcggccaggcatggtggcacacacctgtagtcccggctgattgggaggctgaggcaggagaatcgcttgaactggggaaggggaggttgaagtgggcctagatcacatcactgcactccagcctgggtaacagagcaagactctgtctc

SEQ ID NO: 590401 - DNA, 319 bp, Homo sapiens
ccccctttttttagccctttttgggccatatttcctggggcggcgccccttttaagggggaacctttaggtggggttccctttttgggggaaaaagcctttaggagaccccgtaccccttggggccctttcctccccggccctgtggggtgttttttttttggcgggggcccggttttccccctgggggaaaaattggggcggttttttttttttgggggggcggccccttgaattttttgggggttttgtggggccttggggggttacccccccctggttttttttttcggccttttttcctttaatttttttttgga

SEQ ID NO: 590402 - DNA, 174 bp, Homo sapiens
ttcaattgaccaagaaagaaattgacgtgatttccattcctagcgagtgactcttctggatacatgaacctaactccaaagttatcataccaaagtgtccgaaaaaccaggcattctgctttggctttgcatttgatgaaacagcttcgaacgaagttgtctacaggttcacag

SEQ ID NO: 590403 - DNA, 1752 bp, Homo sapiens
  misc_feature (200)..(200): n is a, c, g, or t
  misc_feature (932)..(932): n is a, c, g, or t
  misc_feature (1033)..(1033): n is a, c, g, or t
  misc_feature (1264)..(1264): n is a, c, g, or t
tcgttcgtcgtgatgttgtggctgtgtccacttgagtgatggcatggttgtgtgtgtgatgtgatgccatgtagtgaggtgcgtggtcgttggactggcaggcgctgtgttttgttgtgagtgatcgtgccggatcagtggatggttgccccgcctagtttgagcaactccccgcttgttgtgttggcaaccacaccacnacggtgctggtgggggccgcacccttttatgaaatctctgctggggggccgcccaccaccagggggtgtgcccgacacaagagaaagcaacagcgtcggtgtggttttgatgaccgccgcccccccccctggttgattgtagttagccgcgccggtcgcctcattaagggtttggccgagggccgcccccttggtgcgttggccgcaggagagtttctcgcgcccacccagcatgggggtgctcccctcgcgctcctgcttgtgtgtgagatgcgcccctctgaggcgccgccgcccaaaggttgtttcgttttgtgtggagcaaccccgccccggtttgttgtgagtaggccgcgctgtttctcggtgggagagtctctctcgctccctcccgcgggtgatccccccccgcggctgcactatggcggggcgcccacacgagtgttttcctctctgcggagaggccccccctgtggggagttgatgtccgccaccgaagtcgtctacgccgcgtcttcttgtatgaagagacactctattgttggttcgtctcccctcctccccgagaggggtgcgccaaccacagccgcgtctctggtcttcgtcgcggggcgcgacaccgactctctgctacggcgacgtctgtagtaatgtcggcgccactccttctctcccccctcgccccctcagcaggatgtgtgctgttctctggtggtgtgtgtgtgtcgtacncgctgcgtgggggagacacaacacacacacggcccctctgctgtgaagcgaagcaggtgttttagagtgcgccgctgctgagagagtagttcccccctccncccacactgctggagacactcttctgcagagaggcgcgctctctgatgatagaaaagactctctcaccccacagagagtatagaaagaaactctggcgtgtcacacagagagatgtcgtggcgccccacacacagagagtgtagtattgatagcgcgctctgtgttgtggcgcgctctcacacagattgtgtctctcgtgtgtcgtcacaccccacgtagtgtctcccccncccgacatactctctctccgcgcgccccgcgagtgtgtgtgataataaagagggacacacagagagaagtattctccccctctctccccgcggtcacacacacacccacccgcacacaacacactctgcgtgggcacacacacgctgtgagagagagagaggtgtgagagagcgccccacacacactcacacgtggtcccacacacagagagagagaagaggtggataaatattgtcttggccgtgaagctctgtgttgatgcacaccgcgagaaagtagaccaccacccagtggagaggctttgtggtgaaaaccacactccaccccgcgctggtgacaacttgtctttggggtccctcttgtctcccacagaaaaaatcgcgccgaatatgttcccgcccctaaaaatccacagcaccccccgggcccccccccccccccctttttagaagccccccttgtgaaaaatttttttccccccgttata

SEQ ID NO: 590404 - DNA, 291 bp, Homo sapiens
  misc_feature (46)..(46): n is a, c, g, or t
  misc_feature (54)..(54): n is a, c, g, or t
  misc_feature (117)..(117): n is a, c, g, or t
  misc_feature (125)..(125): n is a, c, g, or t
  misc_feature (130)..(130): n is a, c, g, or t
  misc_feature (151)..(151): n is a, c, g, or t
  misc_feature (245)..(245): n is a, c, g, or t
ctgggactataggcacacgccactttgcccagccctggctaatttntgtatttnttttttagagacggggttttttgctgtattgcctaagctggtctcaaagtaatcctccctggnctcaattnacccncctgcctggcctcccaaagtnctgggattacaagtgcatgctgctgcacccaacctatatttttaaaaggctgcttaaaagaatggttaagcaggccaggcatgatggctcacanctgtaagcacagcacgttgggaggccaggcaggcggatcaattgag

SEQ ID NO: 590405 - DNA, 151 bp, Homo sapiens
aactcttcttgtggtgaaggaaatcacctgcccaccaccccctgttatctacaatggggcacacaccgggagttccttagaagattttccatatggaaccacggtcacttacacatgtaaccctgggccagaaagaggagtggaattcagc

SEQ ID NO: 590406 - DNA, 101 bp, Homo sapiens
atccccgagtgtattccacctccacacgcattaatagtcccatttttcatctatgaccatttgtagctttgcccattgtcttattagtgcacatgggctag

SEQ ID NO: 590407 - DNA, 692 bp, Homo sapiens
  misc_feature (521)..(521): n is a, c, g, or t
atcttcctaatcaagaagatgtcgtgcagctgggagagctagactaagatgctcatgatgcagaagctactcaaatgcagccggcttgtcctggttattgccctcatgctggctctggaatcctcagatcaaggttatcctacgcagagcgccaggtaccaatgggtgcgctgcagtccagacagtaactgtgcaaactgccttggagaaaagggaccactgctcgaactactttcaggcgagtccaacaagatcccgcgtgtgaggactgacctttctccaaagacgagaatgcaggacttgaatcgaatctttccactctatgaggactactctggatcaggcttctgctcctgctccggatctgcatcaggatctgtgagtgccttcctaacgcaaatggaccaggattaccaactagtagacgaaagtgatgctttccatgacaaccttaggtgtcttgacaggtatctgacctcagacaggcaggactagggtcaacatggattagaagaggattntatgttgtaccatggttatatgagtactcttggacaaaggatttatagacattttaacatctgctaaagagcttaagtctatcatcctatgattctcatgaatcttacggatatgctttatgctgtatcgactatagtcctgaatccctgattatggcacacgtcatcaca

SEQ ID NO: 590408 - DNA, 117 bp, Homo sapiens
ctcccagcgcgtctattcgctgacacaccagatgccgattcagttcacctgaacatctggcttacttcctggcgcggtgatgaagtcaccgtcgcgtccgaaagtgtcacgcgtcgt

SEQ ID NO: 590409 - DNA, 570 bp, Homo sapiens
atggccttgccctttgttttactgatggccctggtggtgctcaactgcaagtcaatctgttctctgggctgtgatctgcctcagacccacagcctgagtaacaggaggactttgatgataatggcacaaatgggaagaatctctcctttctcctgcctgaaggacagacatgactttggatttcctcaggaggagtttgatggcaaccagttccagaaggctcaagccatctctgtcctccatgagatgatccagcagaccttcaatctcttcagcacaaaggactcatctgctacttgggatgagacacttctagacaaattctacactgaactttaccagcagctgaatgacctggaagcctgtatgatgcaggaggttggagtggaagacactcctctgatgaatgtggactctatcctgactgtgagaaaatactttcaaagaatcaccctctatctgacagagaagaaatacagcccttgtgcatgggaggttgtcagagcagaaatcatgagatccttctctttatcagcaaacttgcaagaaagattaaggaggaaggaatga

SEQ ID NO: 590410 - DNA, 1470 bp, Homo sapiens
  misc_feature (1108)..(1108): n is a, c, g, or t
agcggattagacgctgtccggtttcgcttacgcgcgcttgcgccgttccgagttgtctcgtgtgttgccctgcgaagtgtgcgagtgtgtcggctccataagggagccgagccgtcgtcagctcgtctcgcgttcgacatctggcatcagtgattctaatccttatccgggaccctctgtcgagccagctgagtgaacgaatcgtgcgtcccgagaatctatagaacgatcgccgaggagggactcgctcggagcgtcctgtgtgccgtcggagcggtggacgcgaggagggattgcgctgcacgatcaggtcaccgggatatgatgaaacactttgatagacgtcggcgtctgaatgcgggtcggcgcagatcgtctatctgcggaatgcatttggcccctgcaagtcgcgcatcgggataccctcggaatggacaggcaatcgctgacatctcacgcttggggttgatcggtgaattgtcggatctggttgaacactcgaattcaaacccgattgacactgagtaacacatcgggaacggttttttctaaccaaattatagtgcaatatgggcaccgttaaccaccaagtattatctgggtggaccaaattcttatattgaaagatatgttgtaaccattattgagaggagcgtacaccatttccaaattcggagaggagaacagcttaatgaacacgcaaaaccaaataatgaatcgcggagggactagacgcacgggttataaataattccccttttgttgtgcgttacacccctggtggaagtcttggtccaccgttatatctaaccaattctaggacgccaattccgatttccgctttggttcatttacaactttatttcaacgacaaacggagcaatacagcacgacgctttgtacaaatcctcgtaatatttctagcggactcgggacacacaaagcgcaggtaggaattattcgcccatggtgaatttgggtgcccaacgtggcgttggtctggtggcatcccgttaccttttggtgatatgctaataaggcccgttggtgtctacaggggtacagtagaggcgcatttgccgtcggccacaaaccccaccccgccgtntactccaatttgataattctactacagcgcgtcaacacatcgggctggcacgttggaggtatcatcactacgttacaggacctgttgcaggcacacaccttacatctctggtttttcatcgcgtcccattagcacactggctgggtgggctgaccgtgttagtgtcgtttggcgtaacttctacggtgccggaccttcctgtgtttcacctccctaggtgtaggacccttgggttctggtttccatagccccattttgcgttccattgtcgccaggcacccccaattccacacgccagtgtgtgacactgtggtcacactcaatctccacacttgtgggccagcgctggcacttgttgtaca

SEQ ID NO: 590411 - DNA, 269 bp, Homo sapiens
gcctggaagcacaatgggagatgacagtgagtggttgaaactgccagttgatcagaaatgtgaacacaagctgtggaaagcaaggttaagtgggtatgaagaggccctgaagatcttccagaaaataaaggatgaaaagagcccagagtggtccaaatttttaggattgatcaaaaaatttgtcactgattccaatgcagtggttcaattgaaaggattagaagctgcacttgtttatgttgaaaatgcccatgtagcaggaaaaccac

SEQ ID NO: 590412 - DNA, 401 bp, Homo sapiens
tcttctgcctcgctccgcctgcctgctgctgggtgctgtacgactctggtaaatagcaccattgtgatatgcaggatgatgatcctgcatgttaatgtggtttaatggagagggcggcgaagaggacccgcaggctgcaagggagcaacagcgatggtgagaaggcaaccaaagtgcaggacatcaaatacaacctgaaagaggcgattgaaaccattgtggccgccatgagcaacctggtgccccccgtggagctggccaaccccgagaaccagttcagagtggactacattctgagtgtgatgaacgtgcctgactttgacttccctcccgaattctatgagcatgccaaggctctgtgggaggatgaaggagtgcgtgcctgctacgaacgctccaac

SEQ ID NO: 590413 - DNA, 1081 bp, Homo sapiens
cgtgggagggaggaggaggggaggagagacgcaggaggagcagtcgaggcaaaacagaagagagaaagcaacaaacagactcacgtttgttcctcttttagtatgtattttctgtgtttttctcataatatttgtaggtctctctcctgtggtattacatgatagctttttttctttacagacacaccttttttaacgtgttgttcctctttggcggggtgtgtttctgcgcggcctcctctaatttctgctggtcgcaggctatctttttagcccccttggggggcgtgtgatgccttttgcccacagttgccgtgttgttttctcccccgcttgtgggcccacaatttgtcgcagcgggtgtacctctgcggttccccccaaggggggcccctcttcggctgtggcgcccacaactgtgcgccccctgtttttcattccccgccggtgggtgcctttttgccccggccccctggggtgaaatgcggttcccccctgttgtgtttcccccccaggggggggggacaattttgtgttgggccggccgcgcatgttggggggatcacaccggtcggtccccctccctgctagtttttgtgggcaagaccccccctttggcttttcaattactgtggcggtgtctttatatggaaggcaacacctcacttggccccgcgccccgcggggcggtgcccccctcgcttttcccccgccctctctcggggcgcggcttgtgccgccgctgcctcgttctcttgccccccgctcccccaagggtcttccggcccctccctgtgcccccacacctgggttatcccccgccctctttgttttctcaggcactccccccaggttttccccgcggttgcggtggggccacagaaccctcgctcgatatccccgccgctctctctgtgtgacccttgggcgcccgcggaggctccctgtggaacacccgggggccgggagattctcccttcgagccgcccgcattctccccgccgctctcccctcccgcgcgctcggcgccccggaggggggaggccccctctctgtcttgacaaataacaagaacagcatc

SEQ ID NO: 590414 - DNA, 446 bp, Homo sapiens
tagaggatcccgtgatgtatcgccaacaccacgttcccaagtcttcaacctgtacagaacgatgggctgcgcactgcccgtgtagacgctgtgggagagatcgggggattatcacagggaaaactcaactataaatttctgcaggcccggttgaggagcactaccagaacatctgacagcccaagccaaccctctcctggtgctgcctggggaggcaaatcatgctcactccggcggcacagctggctggggctgttccggggcatggaagattcccagtcacccactcactcagaaagccgggagtcatcggacaccttgctggtcagaggtcctgggggtggttttgaaccatcagagcttggacttttctgacttccccagcaaggatcttcccacttcctgctccctgtgttcccaccctccagtgttgggcgataacatca

SEQ ID NO: 590415 - DNA, 205 bp, Homo sapiens
  misc_feature (10)..(10): n is a, c, g, or t
  misc_feature (12)..(12): n is a, c, g, or t
  misc_feature (28)..(28): n is a, c, g, or t
  misc_feature (97)..(97): n is a, c, g, or t
  misc_feature (159)..(159): n is a, c, g, or t
atcttcgtcnanatcacgggcgttagtngaaccctaatctttcgggtatgacggcagttgttaaattcgttgactacggaaactatgacggggtgcntctgagcactatcaagcccattcaaacagaggcctgggaggaagaaggcacctacgatcacnctctggagttccgttggggaggtgatggccagccttgacgatccac

SEQ ID NO: 590416 - DNA, 152 bp, Homo sapiens
gcaagcactataccacatggagatgacacctgtgagaagccttgagactatttgaagagagaaatgctgggcctagtctccgggtgctccagcccccaagtgttccactctccatctcccccactcttgaataaacaactggcactgaagat

SEQ ID NO: 590417 - DNA, 710 bp, Homo sapiens
  misc_feature (16)..(16): n is a, c, g, or t
  misc_feature (252)..(252): n is a, c, g, or t
  misc_feature (343)..(343): n is a, c, g, or t
  misc_feature (363)..(363): n is a, c, g, or t
  misc_feature (401)..(401): n is a, c, g, or t
  misc_feature (409)..(409): n is a, c, g, or t
  misc_feature (413)..(413): n is a, c, g, or t
  misc_feature (427)..(427): n is a, c, g, or t
  misc_feature (449)..(449): n is a, c, g, or t
  misc_feature (487)..(487): n is a, c, g, or t
  misc_feature (508)..(508): n is a, c, g, or t
  misc_feature (645)..(645): n is a, c, g, or t
  misc_feature (673)..(673): n is a, c, g, or t
tccaagaaggggaganagggagacgcgggcggagagaccgacccgaggcgggggcgcggggcaggggcggcgcgaggacctgacagcgtgtcccgcggcggggcgggggctcggccgcgcgcccgcgggggaggccgccgctagagggcacttcaggagggacagccctcccggcaccccggggcccgagctccagccccggcctcgcggcccgcggcccgcggcccgggcggcccgagccccctccccggncgcgcggctctccgccttccccgccccggctggcgcgcggcccggcccggccgagcactgtcccggccccgaggggggcagagctcgggcnaaaacccgccctccagcganctcatttccctaaaaacgggggggggagtcggaagaanggagggangganaaaaaaaaaaaaanaaaaagaaggaaagggaaaagnaaaaggctggagcccgaggacgagcgcggagccgcggnaccaaacggggggcgggaganaggaaggaaggaggcgagcagagggaaggggaagaggtcggggagcgagggcgggagcggtcgcggtcgcgatcgagcaagccagcgggcgagaggacgccctcccctggcctccagtgcgccgcttccctcgccgncgccccgccagcatgcccggcgtggccncctgccgctgctgctcgggctgctgctgctcccgcgt

SEQ ID NO: 590418 - DNA, 544 bp, Homo sapiens
atccacgttcggcctctcacggtgatggtactcatcttgcccacctgcaaggcgtggaaagcctgctacctaagtcagactatggcttttctttacagtagaaaaaaaaccaaaaaaaaaggccttaccttttttccccccttttaataaaaccagactttctttcactgggaaaattttggttccctgaagttaattactacccctgttggagagcccttacacccaaacattttttggtgtgtgaaacatgactttacctataaactgaacacagttgccctgttatctccgaggcaccatgatatatatagttaaaatctgatggtatgaccccaaatcccccttctctctgtcctcacactcccctgctagttttctacccttatattttggcaaaaggtcaaaagaagaacaggtcctaaaacttacaccattggattttcctcttggctacggctatttggaaagggccctctgcatagcctgttttcacattcccttggcaatgcttaatatccttacactgtgggcgtgatgatct

SEQ ID NO: 590419 - DNA, 1222 bp, Homo sapiens
  misc_feature (23)..(23): n is a, c, g, or t
  misc_feature (27)..(27): n is a, c, g, or t
gtacgcgctaggcggaccgcgangggnagaggccagcactgaggaggaggacaaggagggggccgtggtttctgcgccctctgtcaagggagtgtcgtttgaccaggccaataacctgctgatagagcctgctcgcattgaggaggaagagctgaccctcaccatcctgcggcagactgggggcctgggcatcagcattgcgggcggcaagggctccacaccctataagggggacgacgagggcatattcatctctcgggtgtccgaggaaggccctgcggcccgggctggagtccgtgtgggtgacaagctcctggaggtgaatggtgtggctctgcagggcgccgagcaccacgaggccgtggaggcgctccggggggccggcactgccgtgcagatgcgagtgtggcgggagcgcatggtggagcctgagaacgcggtcaccatcacgccgctgcggcccgaggatgattacagcccccgagagcggcggggaggggggctgcgcctgcccctgctcccgcctgagagccccgggcccctccgtcagcgccacgtggcctgcctggcacgcagcgagagggggctgggcttcagcattgctggtgggaaaggctccacaccctacagggctggtgatgcgggcatcttcgtctcccgcattgccgagggcggtgctgctcaccgcgcgggcacactgcaggttggcgaccgcgtcctctctattaatggagtggacgtgactgaggccaggcatgaccacgccgtctccctgctgaccgctgcctcccccaccatcgccctgctgttggagcgggaggctgggggccctcttcctcccagccctctgccacattcctcaccccccaccgctgctgttgccaccaccagcataaccactgccacccccggggtgcctgggttgccgagcctggcccccagcctgctggctgccgcgttggaagggccatacccagtggaggagatccgtctgccaagagctgggggccctctggggcttagtattgtcggaggctccgaccattccagccacccgtttggtgtccaggagcctggtgtgttcatctccaaggtgctcccgcggggcctggcgtccaaggccagcggctgggcaccttctgtagtgaaggcaatgtcggtaccgaccaaaagtagggtccccctcgcgcgtctctatcaagacactcctgcacgatgcaca

SEQ ID NO: 590420 - DNA, 247 bp, Homo sapiens
gcctcactgagtgggtataactattaaaaacattattacaaacttcctaggctgtgacgagtactttgtagatatggtcgttacttggaaagtctgtctgggtggcccagctcggctcgaataaggaggcttagagctgtgcctaggactccagctcatgcgccgaataataggtatcttgttcccatgtctttgtggttcgtagagatatagtctacggtcggcgaacatcatacacgaggctgca

SEQ ID NO: 590421 - DNA, 749 bp, Homo sapiens
ccaacgtgcctggaagagttgagctcctgggaagagcatatgggaaggccaaaatgcgttgtgtgacaagaatggtgtcccccggttctatatccgcatcctggctgaacctagaggactatacttaatgagctattgggaagataaggaagggaagaatgaagatgaaaaatgaggaaatggccagggctctgatgcatcttgcgtgatgaagatcacggaaagtaaaagcgatgatatacagagtcaccagtatcacaaggctaaaatgagagaaggccacgagacagtctgctgggatgaagatgcatgagaaaaatgatggaggatatcagaatggcatcgttcgatcatgcagtgatgagtgatgagtgacgggaaataaaagatgatagagaaaatattcatattgaagaaagaaaatcaaggagagcataccatttctaggaggagaagccagcaaaagataaaacatcaacaaaacgatggtcatgaagaacgaaaagaagcgacaatcaagaaagaattccgaaggcactgaagtgacaaggaacatgggacacacaagagtacacacaaagtcacatgacgaggaaataccccagaagccatcacagatgaaagcgaacatgaccagcggaaacaagaacaccagacagccatggacctacagcaagcaattcccaggcaaacacaggcacccacaaccaaagacgactgaagagcgcaaaaaaggcaaagacacgaag

SEQ ID NO: 590422 - DNA, 214 bp, Homo sapiens
tcagacacattagctaccttagatggcggtgccacaaagactagtgcaagctctccagcgacctgaaggcgggccttggcaggagttcagcagcatatggcagtactgcaggtccagccgacccaggcagtcacggtaggcaccccgggtggcgagggagagctggccctcgtcactccgtgcccgctcgatcttgggccggaatattacgatg

SEQ ID NO: 590423 - DNA, 356 bp, Homo sapiens
  misc_feature (9)..(9): n is a, c, g, or t
  misc_feature (72)..(72): n is a, c, g, or t
  misc_feature (165)..(165): n is a, c, g, or t
  misc_feature (193)..(194): n is a, c, g, or t
  misc_feature (275)..(275): n is a, c, g, or t
  misc_feature (345)..(345): n is a, c, g, or t
cttttcttntttttttgagacagagtctcactctgttgcaaaggctggagtgcaatggcgtgatcttggttnactgcaacctccaccccctggattcaagcaattgtcgtgcctcagcctcctgagtagctgggattatagctacgaccaccgtgcccagctaanttttgtatttttagtaaagatggtgttnnactacgttggccaggctggtctcgaactcctgacctcacgtgattggctgccttggcctcccaaagtgctgggattacagntgtgagccactgtgcccagaccagaacttattttcaatttaaacttccttgaagtcttggtactcatggntttaaaaaaaa

SEQ ID NO: 590424 - DNA, 639 bp, Homo sapiens
tgcagtggctcgtgctataattccagcacttgggaggctgaggcaggtggatcacctgaggtcaggagttgagtctagcctggccaacgtgctgaaaccccgtctgtactaaaaatacaaaaaaattagccaggcatggtggcaggcacctgtaatcccagctactcgggaggctgaggcaggagaatcacttgaacctgggaggtggaggttgcagtgagctgagatcatgccatgtgcatgcctggacaatgagagcataagtctgtctcaaaaaaaaaaaaagggggcttacccttataatccagatttcacctctaggattcctttaccccaaaaaaaaaaaagaagaaaaaaacaaaaaacttgtgggggggcgcgccgtgcggaccccgggaaaagaagtttcaaaaacaccttgcggtgggggggcgccgggaccccatagaggtgagacggcaccaacggggccaaaagcgggccccgagagagaaaccgggggcaggggccgtgtcgcgcttgttctcccacaaaaaaaaagagcgggggaacacggggggctggggaaccaaccccagggcgctgggagggacagaggcttacacacaggggccccaggacaaaaatgacgggggggga

SEQ ID NO: 590425 - DNA, 771 bp, Homo sapiens
gagtgcggggtcggccgggtgctagtgccgggggccgaggcctgaggccggggcgggatccagagcgggagccggctgcgggatcttgggactcggagcgggatccggagcgggacccaggagccaggcgcggggccatggcgaggcgcgggccagggtggcggcgcttctgctcgctcgtgctgctggcgggcgcggcgcagggcttggactctacttcacgccggggacaagacctgcatacctggcctctgcgcgggcggacgggctggctccgctgggggcgcaagacacatacccccggacctcaatgagtacctgtacaccagcggatcttgccaagagctgggacctgggacgcacatgtcggatggcgtgtcaacgtaatgacaggcatcaacccgggaacagcagcaacagtaccacccaataactcgcggcctccttgctagggcccaaggcccatgcacccaagcaggctactggccggcatccggattcaacgagtcaagaggaacgggaagccggtgggcccctccacagcgccgtccagatggtcccgggggcaaggacaaccgtacaatccggagttggaggaggaaaacggcattgggatcccgtcgtgcgaacacgggcgggctacagtcgaccatcgtaccaggcggtaggggaagaaagagcaggcaaccaagagccacggggaatcccacttggacggaggaaccatggcagcaggacgaaacaagaggccaaggagccaaggggaaaagg

SEQ ID NO: 590426 - DNA, 451 bp, Homo sapiens
agcctcccgagtagctgagactacaggcatgcaccaccatgcctggctaatttttgcatttttggtggagacagggtttcaccatgttggccaggctggcctgaactcctgaccttaagtgatccactcgcctaggccttccaaagtgctgggattacaggcgtgagccacctcacccagcctggagtgtctcatcttccaccactaaatgaaacgatggaccctgaacagaaaaaggaacagtggtggaagaactagcaaagcccacagccttgagtttggccgtaagtatcaaggttaatctctcagttatggcagttgtcccatgaccgtgtaagatgccaggttaggggacactgggaatagagcattgggaaaccttcccactgtctttgcaacttttctgtaagtttaaagttctcccataataaaaagctaacttgaatccaaa

SEQ ID NO: 590427 - DNA, 206 bp, Homo sapiens
tagtcttcattcttcagcccagccagccagcttccctctcggaccacagttagggcattagaatctccagcagacagctggtagtaggaggcttcaatgctctagtcctcagagagaggtgacaaacatttacaaatatctacacatgagatagcggggcccataggaaatcaacatgctgaatataagtaacagcaaggaaaaaa

SEQ ID NO: 590428 - DNA, 446 bp, Homo sapiens
tggctggttgtaatgcaaggaagggacaaagatgaaatggaaacatgttccttttttggtcatgatatcactcctcagcttatccccaaatcacctgtttctggcccagcttattccagggctcaagcctactaaagaaccaagaaaaattctgtaatacaataaaattcgtctccaccctttttaatggtttaaaggatcaattcttctccaagcccatcactgaccttcctgctgaacttcaactggatgcaaaacaaacccacaaattctattttagagaattatggaagtcaaatgacgtatgtattcaggtcacagaaaatgtatgatgcatggtgccatttaaaaaaatatttgctctgtgaagatctgctttctgcattatggaagaaaagcaattcatatttttcaacggcttgcattaaaatcctacactgtgtaaa

SEQ ID NO: 590429 - DNA, 223 bp, Homo sapiens
tgcatgcatcgggtactggaggataccatctaaagtcgaccaggctccagcttaacgatatatggaggtcagcacggtgctcacgtgtcgaccggaacttgtacagggaggccatgcaccgcagagatgaatacacgtcgaccaggctccagccaaacgagatcgggacgtcagcacggtgctcacgtatccccacaacttgtccacgaacgcctgcaccgca

SEQ ID NO: 590430 - DNA, 475 bp, Homo sapiens
cacagggtcttccttactctccctcattatatttgtatgtcctttctttggcatgagaaccttggcttccaaaaaaagccacacatttactcatttgctcaattctgtaacacatatcacatagtttcaggattgctttggtcagaccactaaagtggacaattgtttgctgtcctttcatccacatgcaccactttgccaagacagagggcctaagagtcaaatactatgttcaaaatttacttggattggtcctcccttctctccttcttatcattcatgtcttccttcttcattcctgtgctcatgtattcgtttgaaatctactgaggtttattgtttcaggttgtttttggttatagctccctctccttcacgttcttgtttaattttattttttaatatgtagaaggttaacttgctttcaaaaatcaaaattactcaaaaactcaactcccattttccttccaccctg

SEQ ID NO: 590431 - DNA, 145 bp, Homo sapiens
gagctcggtgatcacccacctccgctctcacagtgcgggattacaggcgtgagccaccgtgcctggccagcttttgtttttaaataaatttagtgtccatataagagtgattggggtaaatcctttattttcctagactataaaa

SEQ ID NO: 590432 - DNA, 799 bp, Homo sapiens
  misc_feature (425)..(425): n is a, c, g, or t
  misc_feature (447)..(447): n is a, c, g, or t
  misc_feature (714)..(714): n is a, c, g, or t
caggaggcagaggtagcagtgagctgagactgtgccactgcagtccagcctgggtgacagagccagacactgtctcggggaaaaaaaaaaaaaaaaaaaaaagacccttccttataaattggcaaaaaaaccaaatcttcataaccttcattaaattactatagggaattccccaaccaattaattatcgggggaccctgtggacagggttaattccttttctcatagggccaaggtatccttctcacttcccattgtggtctctggaccagtgggacgattggacggggaaaaagtgtgtattgtgggtgggtccaatttctaatgtggtgcacgagatatattatcaacaatattaagaatatcacacggggtatatctcacctgtggccccttggaacacggggtgtgttctatacacactntgtggcacgcgtatatcttganaggtgtgagatttcccccagacaatactcaaacaccctcagggggcacacaactttacagattatattattccagggcgtgtaaaatctccccaaaaaagagagagcgagaagaagaaagagagtgggagtggtggaatgtggtggtgagtgagtagtgtgagtgtgaggtgagtgagtatatgtgtggggggagaggttgtaggggtggagaaaaaatagtggttgggtaaaacacaaaacagagaaaaaatcacatataattatnttttcggggcggggggaggaaatactatatgtgggtacaacacaaagagcaaagtgggggggggaaataggataatattaaaaat

SEQ ID NO: 590433 - DNA, 204 bp, Homo sapiens
  misc_feature (125)..(125): n is a, c, g, or t
  misc_feature (133)..(133): n is a, c, g, or t
  misc_feature (198)..(198): n is a, c, g, or t
gccagctgtaaagcacataaggggaactttgtgatgcaaacacaagtatcaacagctgaattgatcaagcagaaaaaagaatatcagagcttgaagactgtcttgccaaaataaggcaggcaganaagattanagaaaaaaagaatgaaaaggaatgaacaaaacctcaaagaactgtggaactacgtaaaagaccanacccat

SEQ ID NO: 590434 - DNA, 250 bp, Homo sapiens
aattttttttggtttaccaagaagggaaacaaaaaaaaaaagggaggtggggtacctataagggccaaccaaaaaaaaaagaataaacctttgacctttggttccccacctaaaggaataacaagaatttcccaatttggggtttaagtaatttccccttccccaattttttggaagaatttaccaacatttcccggaaccatttctttttaaagtttttaacccggggtttttaaaaaaaaaggtttta

SEQ ID NO: 590435 - DNA, 487 bp, Homo sapiens
  misc_feature (15)..(15): n is a, c, g, or t
  misc_feature (47)..(47): n is a, c, g, or t
cccccccccttgggnaactttttttttaaacaagggggggcccccgnaaccagggtgttttcccttcccccttcccgggggggaatttcccaaaaacagggtcccccccccccggtggggaaggggtttttttccccccccctttccctgggggggggggggagtgggggggggggggaaaaattaaaaaccccccccccccggggggggtccgggggggcttttttttttttttaaaagctcccccggggcaaaaggggggggggggggggggggtttttttttttttcccttggggggggggggttggccccccccccccccgggggggggcttttctttttcccggggttttttgggggggggggggggggccccccccccccggggttttttggtttgccaggggggtttggggggggccccctttttttttttttccgggccccccgggggggttttgggcccccccccccccctgggggga

SEQ ID NO: 590436 - DNA, 152 bp, Homo sapiens
ctcgaggccaagcattctgatgttggagcggcctgagctggaattagaaccccagctgcatgcagtggctcatgcctgtaatcccagcactttgggaggccgaggtgggcggatcacctgaggtcaggagtttgagactaccctggccaaca

SEQ ID NO: 590437 - DNA, 123 bp, Homo sapiens
cgtcacctgtcctcaagctcctggatgtctgctgcatcttcttcttctccgcctgcaggtgtggagcgctcctcctcctcctccagcctggctctaggtcatggcagatctcttctaattcct

SEQ ID NO: 590438 - DNA, 237 bp, Homo sapiens
  misc_feature (116)..(116): n is a, c, g, or t
tgtggtccgaaagacaacaacatggacaagatgtcactggcagaagtacccaaccagagagatgtgtctggcaatgttcatgctggtgaacatgtgggaaaacacccaatgtccanaataatgtgcctcattggcttggaattcatatccaaaatgtattaatgcacctacttggatacacatgaacagtgctgaacttgcttgccctcagtggagctcagtccttgttgggcgtga

SEQ ID NO: 590439 - DNA, 614 bp, Homo sapiens
gacctgactctctgaggctcatttggcagttgttgaagatgtccccgcagttttcaatcatgtctgaaccaatcatgagctccttgtgactggagcagcgtggtccagattgcgatattcactgctgtacagtgattggagagatggatctgtctttggtaaaggatcagcctatagattcttgtgctgttggagtatcacccccatgatgggctgtcctggagcggtgtcctacatggaactgcaagactgtgcccttcccctcctgaaagatgtcatcgttagacagataacagaagacgtgtgccttctaagacctggatgtggccatgtctctggtgggctccatgccaagacagggcaaggcatggagagaaaagcatttactgaagagcaggatgtgacaaatcttcaaatcccagggtgcagccttagataaatacgccaagaagtcagtcaaggttattagtcggtgggtaatccaagcaatagcatctggctgactgcttgcaagtcatggtccatccatcccctaaggatgaacttcatgttgcttgacctcgttggatcacaagcgagctaaacgctcaaagttgctcttaaacttggtgtga

SEQ ID NO: 590440 - DNA, 363 bp, Homo sapiens
  misc_feature (363)..(363): n is a, c, g, or t
gtaatcttagccttccaaagtgatgggaatataggcctgagctactgcgcctgcacgatattcgttatcttactccattttaactaatatgcatgtgagcgagactagactttttatattcctaacattgtatttcatagaacagacgttataaatagctttcttttatgcatcatggatcatgctttatgatgccattttattgatgaaattgatactaatatttctagagacagggtctaacttagtgtccaatgtatggtgcacatggacaaacatggctgactacaagtctaatctactgggttcaatgattccttccatgctaacccatggtgctgggacttcaactgtggcaccatn

SEQ ID NO: 590441 - DNA, 175 bp, Homo sapiens
  misc_feature (15)..(15): n is a, c, g, or t
  misc_feature (96)..(96): n is a, c, g, or t
gggagctccaacttngcagccagagaaagccatgttggcagcttatcaggaggcatggtggtagactaccctaacagtgccaaagcaaagaaattntacctctgcttgttttctgggccttcgacctttataccagagggctgagtgaaaatcaggatgaagttgaacccaggcg

SEQ ID NO: 590442 - DNA, 137 bp, Homo sapiens
  misc_feature (109)..(109): n is a, c, g, or t
gttttgcggtgcctttcctgtagtcaaaacaaagattccagcaaagcgcaggtaaaattctctcctctcttaaaaaattgggccaggcacggtggctcacccctatcancacagcactttgggaggctgagttgggt

SEQ ID NO: 590443 - DNA, 971 bp, Homo sapiens
actgcgaagtatctcgctgaccctgcccgcccgactagcggagattgagtgcgagacgactgaggcggatagcgggtaaggatgcccagggcgcgctgcggagtggtctactgctgactgtccgtcaggactcgcctgtggcgtccctgctcgcctcccagtccacgaatatctcagggaatgaagtccatcgtggctcggtgacacttatgcatgaacaaatctgtagtcagccatggaggaaaacagctggatccatgactttaagtcccacgtgatgtgtctgaaacgacatagcattttagacaacaaccttcgcacgtgttgaccattgcctgtgcgatatccaagggctatctttgtgtgatagcttttgaggcgagaaaccggcaaggcgtttaatgacgaggacctactaatcgcatgactgatagctgggtcattcctggttcgggtgcctttccccccttgtggggaaaccttccattttcgccaattgaggaattccagggaaaacccttcatttccggacagtcacaggaaatgcataagtggttacgcagtccccgtttagattagattatacggatccaatagggaaaacggccagacataggggaagccgggcgtttggagaataacggcggaagagagaatccctcggatcaaagaagctttgtgtgaatcaccacgggcggtaacgtcgaggatggtaggagcctttaaattttaccgcgtaattctttggagacggccttttgttaaattataatccctcccgtgcataaaaaagggttgtcctctgcggactaaaacgcccaaaagaagtacgccggacccttcacgggtttgcgacgggctcaaccctttgggtactgggaaagaacgtgacccaagggaaggagtccttctgtccttcctggcatggaccaggtggggtcccttgtgtacccaatgccccgcaaagaagc

SEQ ID NO: 590444 - DNA, 628 bp, Homo sapiens
gacaatgtagtatataatacatataacatacgaaatacgtgttttagtttttgttttagttttttgagatggagtttcgctcttgttgcctgggctggggtgcaatggtgtgatctcagctcattgcagcctccgcctcctgagttcaagcgattctcctgcctcagcctcccaagtagctgggattacaggtgcccgccaccacacccagcaaattttttgtatttttattagagatgaggtttcattatggtggccaggctggtctcaaactcctgacctcaggtgatccactcgcctcggactcccaaagtgctgggattacaggcatgagctaccgcgcccagcccacaaaatatgtgttaatcaactgtttatgttatcaccaaggcttctggctagcagtaggctactagtagttgagtaaaggggagtcacaaagttatacatggatttatgactgtgcatagggcagtgacccaatcctgcattgttcagaggtcaatactgtgtgtgtgtgtagtgtgtagtgtgtgtgtagtgtgtagtgagcagacacgaaacgaatatagagcaaaggagagtgatgaaaaaataaaatatacaagggtagatctaataacgaaga

SEQ ID NO: 590445 - DNA, 291 bp, Homo sapiens
  misc_feature (1)..(1): n is a, c, g, or t
ntctcaacagttcggatccagatttcatgtatgaactggatagagagatgatctaccaacagaatccgtaggagacaacttgctttctttggagtgactgcaaaggacatctgaaaatctgggagtctttcacatgatgtccttggataatgcagggtgcttcaaccgtcaaacgtgggaacatgtgggatacagtactgtgaagacgctaagcgaaatatagccaaactaatgcatgctgtgatcatcgtggtggaacaaggagaatgtggaattacgttggggttcgtt

SEQ ID NO: 590446 - DNA, 118 bp, Homo sapiens
gtgggataatctattttaatgaaactcattatatatatatttacaaaaagaataaaggaaaaagactccctccaaaatagatatttctgcttaataaaaagtacaactgagcactgtg

SEQ ID NO: 590447 - DNA, 321 bp, Homo sapiens
  misc_feature (72)..(72): n is a, c, g, or t
  misc_feature (75)..(75): n is a, c, g, or t
cctgtttgcattacaccaaagtgtattttcaccagctaaaggaagcttttcttttttttattttctgtaganggnctcactctgttgcccaggctggagggcggtgttgtgatctcagctctctgcaacctccacctcccgggttcaagcaattcttgtgcctcagcctcccaagcagctgggattacaggcatgcgccaccacacccagctaatttttgtatttttagtagagatggggtttcaccatgttggtcaggctggtcttgaactcctgggttccagagacctgacctccagtgattcgcccacctcggcctcc

SEQ ID NO: 590448 - DNA, 624 bp, Homo sapiens
  misc_feature (450)..(450): n is a, c, g, or t
cggctccttttcctccccggagttcatccgccacccccgggtttctgatgacatctttgaggggaaaccacaagtcccccctggttcctgtcccccggtcacaacccccctttttgtttattgccccgcccgccccgcggttcttgggtgtctctcccccggcggcaaatttgggaatactggtggcccccctcgaggtgggcaccactactccagacgattctccacgcccgaagttcttcgccgcggtatcaatgcccttcttccccccatcgcgccccctctttaaattatggcagggggccacccttcgacgacaactggcgggccgccagcgcagcataatgatgaggccctggtaacgaggatgttctctatcctgagtgagcgcgtggctttgtgtgccgtcccgctcgatctcctgtctgctcttctcactctcgtgagcgnctcatcagctcccgatagaacgatgctcctatgtcttgagtaggatagcgagcgcgcccgagagggcgcctctcggtgtgcgaaagaaatacttcttcttctcttgaccccaccatctcatagggttctcccacaaaaaaatgtcactccccccgccacaaatgacaaaaaaca

SEQ ID NO: 590449 - DNA, 150 bp, Homo sapiens
ggccaccttactaccagacaaccttagccaaaccatttaccaattaaggtttaggcgatagacattgacacctggcgcattagttttggtcccgcaggggaaggttgaaaaattttacccaagttaatttgggcgggctctaccctatat

SEQ ID NO: 590450 - DNA, 410 bp, Homo sapiens
ctagatgatcccctgcttgtcctgcctcgggttggagcgattctcctgcctcagtcctactgagtggccaggattacacggtgtccatcgccacgcccggctaattttttatattttcagcagagatagggtttcgctatgttggccaggctggtcttgaactcgtcctcatgtgaaccacctggcgtcagcctcccaaagtgctgggatcacaggcgtgagccaccacaactggccacactttgaatggatcttttagatgtgtctgatttcataaccacatacatcgatcatttcgaaaatattgtttcaccaagttatgcacgtcttccaagtgttgacacccttcattatataatatcctaaaaaaagcacatttgttttctgacctcatcagaaaagtccttaga

SEQ ID NO: 590451 - DNA, 969 bp, Homo sapiens
gcacctttcctcgaccctggacgtctaacttccggaggcccacatcttgcccactccgtcgcgccgtggctatgctgcgggatttcagcagatcgggagccctcaatggacatggcaactacaggcgtgcggccggtcggtgcggtcgcccgaaatggagctggtcccggatatggggagggttcgaagaaaacatccagggcgagcaggcttcatactgtgattgacatggagaactatgtgatgataccatcagagctcttagcgtacgaggatatgggtgagctggcgatcagcgccgtgcgcgaggaagaagttcacggcatgtatgccagcatgatgctagcatgcttgctgaagagcgaggatggagaagttccttgcgcatcgcatcgggctttaagggacagctgagccgggcgagtgtgggtagagatcatgaatgtggctatggcctggggaaaagggacaatcactccaaggggtccattcagacgtgtgtaatcgcctctaacaatcgaagctatcccatcaatgaccctcttatctttcgattgtgggacagccgtgcatcagagtgctgaaacgcgagtgggtccttgggaggtccactagatcgccctatccaaggatggtcatcgttccccccaggaaaaattcgcacggtgaaactcctaatggacctctcgatgcttgttctttcactctgggttgctattcctagctccattgggatggaaggacgtcatgacactattatccgggagggcaccctgatgggcacaagccaattggacacctgcttcggctactggctggaagtctcatccttcattacttctttgctttcctggcaacgccagttccctgcgaatgtgtgcagctggctttgctcttggcgattgttgctgtcttcctttgttccgtcccgcctcttacctctgttgggggtcccgcctgcacgtcgtc

SEQ ID NO: 590452 - DNA, 170 bp, Homo sapiens
  misc_feature (103)..(103): n is a, c, g, or t
  misc_feature (132)..(132): n is a, c, g, or t
  misc_feature (143)..(143): n is a, c, g, or t
ccaggcctgaggaaggcctcgggcgcgcggaacagacgggcaggcggggggcgcacaagcccagggcacgatggcagcagcgctggattccgtctgggcgctnctcggccccgtatccgtccgtgaggccgncgctgccaggnctagaggagacatgttgagaccgtgcg

SEQ ID NO: 590453 - DNA, 409 bp, Homo sapiens
gtggtgactctgaggatcccgagtgcaggtgcgtcgtccactgagctgtcttacgtctagatgtatagacgcatggggtcagctctctaggtttccttggaggagcaggaggacttccttatcagacagcctgacttcggttgcagagcgcatgcattttgaccacagtgtttcagctcttcccttttctcttgttccatttaggtggcttcccacacttctgactcggacgttccttccggtgtcactgaggtggtcgtgacgctctttgactctgatcccatcactgtgacggtccctgtagaagtctccaggaagaaccctaaatttatggagaccgtggcggagatgggcgccgcgaggcgtccagtgcggtaacgcacctgcaacgcacctgcactgggtaccg

SEQ ID NO: 590454 - DNA, 128 bp, Homo sapiens
cccgaccatgcctgcaccagcagcgtctgatatttgccggcaaacagctgtaggatggccgcactctctcagactacaacgagtgccagaaagagtccaccctgcacctggcgttgcgcctgcgaggt

SEQ ID NO: 590455 - DNA, 371 bp, Homo sapiens
aaaaaaaaaaaagatgaaaaaagttcctgtggatgttttgtgtagtatcttggcatttgtattgatagttaaaattcacttccaaatcaaataaaacccatgtgctagatttgatgtgtgcccaatcaaccttgttcaaattgggcacacatcaaatctagcatcatgggtgttttatttgatgtgtgcccaatttgaacaagggttgattgacacctgtaaaatttgttgaaacgttcctcttaaaaggaaatatagtaatcttatgtatttttttttgtgaagtgtttttctagcatttataagtgaaagctggcaggggtggtagttgggctcataatttattaaagtggtaatttagcaaaaaaaaa

SEQ ID NO: 590456 - DNA, 150 bp, Homo sapiens
cggcacacttgtcaattctacacacacacaaaaccctgttggcacttgattgagattgcattgaatttatataaactgttggggattgacatcttaataatattgagtcttctggcctataacaggtctgtcttcctaggattatgtttg

SEQ ID NO: 590457 - DNA, 878 bp, Homo sapiens
ggttccagtgccagaccaaggagaactattggcaagtggcggggaggacctagagaccagcgaagggagaagttgggaagctacgttctgttggccaccagacttgcatttcagcctctgtcataatgctctgccctccctcccccgaaggtctctgctggatgatgaccgttctcccctgtcccctccccgcttcctgacctctgatgaggttgggaagtgaccatttgtatgtctgggccctgccaaggccgtactgggtagtggtcagagggaggccgggctgcattcctgcacccgcatcgctttccccctgggtcatgctgtgctgcgttttgtgccgtacggttcagccaagtcccccctgcttgtgttccatgtgcttgcgacctctgtctcatctttcctcccgttcctctgtccccgtctcctctcccactgtacttggggacgtcagttcaggagtatggggccccttctctgtgagtccaggcgtgtccctgtctctcccttactgtcccttcagcctgggctgatcagttgcccgcctctgtggcttgatgcggttccccatgctctgtcctctgtcccccgaacgtgtctctatgcgtcaatttgggcttgcttccaggctcccaggtttgtctgctcgagtctcgttaaccaaaccgagtggcgtcttaccgatactaacggccgagtgcagtccgacgacctgagtcgccctaggtcagaactctggggaaggatacaggagccccgacccttcacttgagttctctggattggttctcagtgccttaaaaggaaacccggtgcttgtgtgtgttgtgggcgggaaggaaggaccctgggtcccagccctctttttccttccc

SEQ ID NO: 590458 - DNA, 816 bp, Homo sapiens
  misc_feature (188)..(188): n is a, c, g, or t
  misc_feature (307)..(307): n is a, c, g, or t
  misc_feature (394)..(394): n is a, c, g, or t
  misc_feature (582)..(582): n is a, c, g, or t
  misc_feature (660)..(660): n is a, c, g, or t
  misc_feature (701)..(701): n is a, c, g, or t
ggtggaatgggtggttcaagaaaatgcgagactgagagtgagtggtgagatcagcatgattatgatgtgagtaagattgtagaataatttgaacctaaggaggtgaaacactcaagagaaaaattgtggactctcgcacggtggaacctgctctcacaaaggttgatcttgcatgaacctgtgttccnggcgagtgtagaaagcagagcctactgtatggaacctctggagaatcatggtgcatcgcacatcggactccgagtgcttcacgagtcgatcagccatcgggtagactgcctgcatcggnagagatctatatcgcctccaagtgctcgcacttgtcggcccaggcgcatgtattggtctcccatgagcactatccgcaatagggacntcctaggcagggcgactagcgaaggcccaattgcgaagtcgacctagggagaaagaggccaaatgcctaggtcgccattcgctagtcccaacttggaaatcgggagaggccgacgtggacgtcattcaagtccccacgggcattgctccgaacccgatagagatacgcgcactcattgtcgagacctntgtgggcaccatctcttctagtcgacattgcacttggggcgcttccgttgagaccggggaccaactagcgcccaaacntccaaacgcgcaaacgaaccgttgagcgtgcgcgattcganggtcgttcgctattgctccttgaaagcgtgagtcccccaatggcgggctctcgagctccgtttgggcaccccccccggtttaggaaatccaatttcccctcaacgacggatctca

SEQ ID NO: 590459 - DNA, 922 bp, Homo sapiens
  misc_feature (4)..(4): n is a, c, g, or t
  misc_feature (80)..(80): n is a, c, g, or t
  misc_feature (83)..(83): n is a, c, g, or t
  misc_feature (115)..(115): n is a, c, g, or t
  misc_feature (120)..(120): n is a, c, g, or t
  misc_feature (256)..(256): n is a, c, g, or t
  misc_feature (271)..(271): n is a, c, g, or t
  misc_feature (290)..(290): n is a, c, g, or t
  misc_feature (296)..(296): n is a, c, g, or t
  misc_feature (322)..(322): n is a, c, g, or t
  misc_feature (725)..(725): n is a, c, g, or t
  misc_feature (732)..(732): n is a, c, g, or t
  misc_feature (737)..(737): n is a, c, g, or t
  misc_feature (739)..(739): n is a, c, g, or t
  misc_feature (742)..(742): n is a, c, g, or t
  misc_feature (750)..(750): n is a, c, g, or t
  misc_feature (757)..(757): n is a, c, g, or t
  misc_feature (780)..(780): n is a, c, g, or t
  misc_feature (798)..(798): n is a, c, g, or t
  misc_feature (810)..(810): n is a, c, g, or t
  misc_feature (823)..(823): n is a, c, g, or t
  misc_feature (842)..(842): n is a, c, g, or t
  misc_feature (870)..(870): n is a, c, g, or t
tttnccctgtcccacgatttggctattgtattgagctgctgacccttcttctttgtcccaggtgggtcttgggtgcctcnacnctccctcctcacctggctatgaaatatttcanccaanggggttttgcatttttggggagagtccccttagcgcagctccctgctttagatgctgtgtagggccatagcattgtccacagctccccaagctgggtggcttctccccgctgaattggggcctgcaggcaggtgcnccaggctgctagcanccttgggccactctgtttnctcgcncccccagcagctggggcatgggtaanttagcgctttgcgcgcgcatgttaatttattgcagttttttcaagggtcaactgaattgcgcgccacttcgctgggtaagaagcatgatgctgcgcttttaatttcagcgtgctaagatgcgctggcagcttgcccctagctggttgcctgctgtagtgcgctgctgggagctgtcagctcatttaaatgtgggtctgcagaaggctttaggtctgcgccccaacccccttacctttcacagaggaacctttcatcaggataaatgattattgctgccctgtgggtcttgctcaatactgttcatacctggagagagaaggtattgaaacatctcgctttatgtgtgactttcccaaatttttaaaaattgtttatggtttaggccccttaaatactgtgtancaggatnaagtntnccnttaccagntgggtcnccttggatgggtctgtcaacatntaagcctcagttccctcncctgtaaaaatnagggtagtccctncctcataagggatattgtnaggatggaaagcgaaagtgtgagaaatncctcccaatgcctgtacatagtgggtgctaaataaacccctttttgtttgca

SEQ ID NO: 590460 - DNA, 233 bp, Homo sapiens
gtttagcttagagcatgttctaacccaatgcaaggaagctaagaaccttgtaaaaaaggtagaggaattgctaactagaataaccagtttagagaagaacataaattaccctattggagcttaaacacgcagcatgagaacttcgtgaagcatacacaaagtatcaatagccaaatccatcaagtggaagaaaggtattatatatggaggtcacccaatgaataaatgtgaag

SEQ ID NO: 590461 - DNA, 107 bp, Homo sapiens
taagggttttttggctgtaagtttttttaatggcaaagaattcttttccatttttcttgggggggtttcccctttcccgacccaattccccttttaactgggattcg

SEQ ID NO: 590462 - DNA, 956 bp, Homo sapiens
cggtgacggggtcaccacattgtgcccatctacgaggggtatgccctcccccatgccatcctgcgtctggacctggttggccggggacctgactgattaactcatgaagatcctccaccgaggcgcggatacggttcaccaccacggctgagcgggaaatcgtgctgtgacaattccatggagaacggctgtgatattgtcgcccctgggactttcgacgcaagagattggccacggtgtgcttccagcctccttcccgtggagaaaggagtctacgagcttgcttgagggcgaggtcactcaccatttgggcaatgcagcggttccgctgccctgaggccacctcttcccagccctttcctttccgtgggggcattggaggttcctgtgggcatccacgaaaagctactcgtttcacgctccatcagtgaactgttgtgccgtgttgcaccctcccgccaaggacgtgtacgcgccaaccacagtggctggtctggcggggaccacatattgtacccttggcattggctgaacgggggtatggccagacatggagatcacggccgtggacccagaacaacatgaagactcaccgatcatttgtccttcatgagcgcatgtcacccggtgggctcgggcggcaccaatgcgggccacgatggtccacttccagcagaatgtgcatcagcaggcaggagtatggagaggcagggccctcaatcgtcaccgcaagtggcctccagcggaccaagactagcgtgggtcaccctttggccaaacctacggggcggaaccagagacagcgcggcccatgggacatggcggcggacgcgcaggcgcagggtcacacggacggcggcgacacgtgggggaaccagaaaggggcgagaaggcagtggttacgccacagagcgggagcgacaacgccttgaagcccacaggacgcgcaaaaactc

SEQ ID NO: 590463 - DNA, 1098 bp, Homo sapiens
tttaaaaggaaaaaaaaaaaaaaaaacaaacccacatgatttcaagggagtctgggcatccctgaaatccttctcccctgccaggtgcctgtcacctgtcttcactgcctcctttcccctgtcatgctcatcagcttatggcttctgtctaagcacctgaacagaggactgaaacctccactgcaggctgggtttaaggtcttgaatcatgtaagaatcttgcacagcactgctaatgtaaattccagtttgttttcccctctaggacaaacatttaccaaaattatgcaacttttttgggtggggacagagagattgtcctgtgatttctacccatttccctgaggcctgtggaaataaccctttattgtccttaaagttataccagaaaatacgaataacggttaataccaaatcttgaacacaacaaacacacacaacacacacaaaaaaaaaaacacaaaaacaaaaaaacaacaaaaaaagggggggccgccgccacaaaaaaacaccccccccgagggcgccccacaaacttcagccacccacccacatattctgtaaacaaagggggccccccaaaggagaggggcccaaaacaaaacacgcacaggcaaggaggcccgcccgaaaaaacaaccacccggcagatgagaacaaaacctgtacacggtgacaacccttgggaaaagaagcccccacccactctgcgcgggcgggacccaccacaatgttgggcgcaccacatcccctccacaaaatatatatccaccacctccaggacgacaaaacacacacacctcccggcgcctctatcactggcgcctacaccaccccagcacatatgccctcgccagtccaaaaaacctgtgccaccaccgccggactacatatcctgaacaaccactatttatacccacgatacttgtctctatcaaacaaaacccgtaccatcaactcaactccaatcccacccacccaaccacccaactcaccacacccacatccctcaacctcatcccaactccactaactcatcacctccctcaactaccacccctacaactcacacactcctcccacactcaacccacacac

SEQ ID NO: 590464 - DNA, 898 bp, Homo sapiens
agcggatctttgatgagggcagagctcacgttgcattgaagactaaacctcggtgaggctcgaggcgctgtctgtatccttccgctccctgctcggcggatccagccatcgagttgcaagatgcagaggcccggtagaacgacaagcctcccgaaaagcccaggtcagagagccaaagccgtcacgtgacgcctccaagacccaggctgcccgagtcgactctccgcgagacgctagccaatgtgccgcaaagacggcaggacagatgcgtcgaattgacgctgggaggaagcactgcagtcgtagagcgcgcctgagagccagcctcggagctagtgatgcagatgcggctgtgcagaagagcacacctgtgcgtagatgctgacgaaactgaggttggcaaagaacgcagctaaatgagaatgccatgggtgattcacgcggacattgtggttctacttggttgggccctgaaaagcaaggtagatacaaagcttggacatcggcacttagagggcaaggggcagtgcgtatcctaacagtctaacctcaacgtgaccactgtaaagacgcaaagctaggagacatagcgaagtctttgactgggagccgtcaggaacagaattctggcgaggctgtatagatagtgtggtccgcttgtaacaaagctttgcaatccaacgtagatgctttaacaattccatagccttggggcatgatagtcaaggaacgcgacgttgtgtggtccaatgccaagaccctggacttcgatgttagatgcgcacagaaccgagtgatgcacgatgcgccatacagtggcaaggcattcatgcctgcagggttatacaaatttgatttgcctcgaagaaaaacttgaacatgggagtggaaaacacct

SEQ ID NO: 590465 - DNA, 943 bp, Homo sapiens
gcagaggtggcggcggcggatgggtgccccgaacgttggcccctgcctgggagccctttctcaatggaccaccgctatctctacattcaacgaactggtccttcttgcgagggctgcaggcgctgcatccccggagtcggatgggcgaggactggcttcatccactgcctccaactgagaacgagccagacttgcgcccaggtgtttgcttctggcttgcacggagctggcagggctgggagccaagatgacgatcccatagaggaacataagaagcgatgcgtccggtgtgcgctttcctttctgtcaagaacgcagttgggaagaattgagcccttggtgaattgcttggaaactggacagcatgaaagatgccaggacacaaaattgcatgggggaaaccaataactaacgaacgaaaagaaatttagaggaaagctgcgaaagaaatgttgcgccgctgccatcgagcagttggtctgacatggattgaggcctctggccggagctgcctggtcccagagtgggtgagccagcttacccagggtttattccctggtgccaccatgctcttcctgtgggccccttaatcaatgtcttaggaagaggagatcaacacttttcaaatttagatgttttcaagctgtgctcttggttgggtcttgaaagtggcaccagaggtgcttcttgcctgtgcagtggggtgctgctggtaacgagtggctgttcttctctctctctctctttatgggggcctcatttgtgctgttttgattccgggcttaccaggtgacacgtgcggggcgaccagcgggtgccctttggaaagtgacggttggtcggtggcgcagccttccactgagtgggctggccctgtttacgggacacctgatggctctgaggccggacgaggggcctctggccggccccaaagggggggttc

SEQ ID NO: 590466 - DNA, 270 bp, Homo sapiens
tgcttacttacagtgtggggactgtgatgagcggccctggtccagaactctaccagcgccgaggtgttcaaggatcctgaggaagcccatgagtgttgagatgaacgtgaatgtgctggactttgtagcactttctgcccatgtctgcatactgtgtgcccaagaacaaggtaccaggtgacgctatgaggattatgtcgaaggacttcgggtgtttgacaaggaaggaaatggcaccgtcatgggtgctgaaatccggcatgttcttgt

SEQ ID NO: 590467 - DNA, 743 bp, Homo sapiens
  misc_feature (1)..(1): n is a, c, g, or t
  misc_feature (94)..(95): n is a, c, g, or t
  misc_feature (98)..(98): n is a, c, g, or t
  misc_feature (134)..(134): n is a, c, g, or t
  misc_feature (143)..(143): n is a, c, g, or t
  misc_feature (146)..(146): n is a, c, g, or t
  misc_feature (148)..(148): n is a, c, g, or t
  misc_feature (152)..(156): n is a, c, g, or t
  misc_feature (159)..(159): n is a, c, g, or t
  misc_feature (161)..(166): n is a, c, g, or t
  misc_feature (168)..(169): n is a, c, g, or t
  misc_feature (179)..(179): n is a, c, g, or t
  misc_feature (185)..(185): n is a, c, g, or t
  misc_feature (187)..(187): n is a, c, g, or t
  misc_feature (190)..(190): n is a, c, g, or t
  misc_feature (192)..(192): n is a, c, g, or t
  misc_feature (198)..(198): n is a, c, g, or t
  misc_feature (201)..(201): n is a, c, g, or t
  misc_feature (203)..(203): n is a, c, g, or t
  misc_feature (212)..(212): n is a, c, g, or t
  misc_feature (217)..(217): n is a, c, g, or t
  misc_feature (242)..(244): n is a, c, g, or t
  misc_feature (249)..(249): n is a, c, g, or t
  misc_feature (253)..(253): n is a, c, g, or t
  misc_feature (268)..(268): n is a, c, g, or t
  misc_feature (272)..(272): n is a, c, g, or t
  misc_feature (302)..(302): n is a, c, g, or t
  misc_feature (313)..(313): n is a, c, g, or t
  misc_feature (317)..(317): n is a, c, g, or t
  misc_feature (326)..(326): n is a, c, g, or t
  misc_feature (331)..(331): n is a, c, g, or t
  misc_feature (339)..(339): n is a, c, g, or t
  misc_feature (344)..(344): n is a, c, g, or t
  misc_feature (355)..(355): n is a, c, g, or t
  misc_feature (359)..(360): n is a, c, g, or t
  misc_feature (370)..(370): n is a, c, g, or t
  misc_feature (383)..(383): n is a, c, g, or t
  misc_feature (401)..(401): n is a, c, g, or t
  misc_feature (419)..(419): n is a, c, g, or t
  misc_feature (465)..(465): n is a, c, g, or t
  misc_feature (472)..(472): n is a, c, g, or t
  misc_feature (490)..(490): n is a, c, g, or t
  misc_feature (499)..(499): n is a, c, g, or t
  misc_feature (550)..(550): n is a, c, g, or t
  misc_feature (610)..(610): n is a, c, g, or t
  misc_feature (638)..(638): n is a, c, g, or t
  misc_feature (653)..(653): n is a, c, g, or t
  misc_feature (683)..(683): n is a, c, g, or t
nagggggcgccgagcgatggcagcagcgggcggcccgcgtagacctcgggcgctggggcctctgcgggggcagccggggacagcgaggccgggnngtnggagggtcccagctggcgcaggcaggctgccaggtngcccagcangtngnatcnnnnnttngnnnnnntnntctcgcagcnggccangnatntntttatnttntntatatattntttgnatctggcgcggtattttctcagaannntgggntttnttctgatcgcggccnttancttcacgctacgcaggctccgcagtttttnatggtcatctncatntttttcgcnttctncagcttcnatttnttgtactcttntggnngggatatgtnggatgtccaggtnagctgctacccagactcngggtctcgggccttcgcncccgacttacctcttttcttagggcgtccaggatgagggtttttancttagcnatagctctcgttatatangcactcggngccgcttctccatgaccggcttggaggactgcgggtcgggcaccggctgantcccgcgtccctcccgccccccggtcgcccccctcacgcccggacgggaccccaccttgnagtgctcggccgcgctccggggcttgtntggagtccggctggngctggccggcgctcctgccatcggcgaggngctcggtttccccggcgtgtctgcggccatggtgcgcccgcgcctccccgtgccgggtgg

SEQ ID NO: 590468 - DNA, 150 bp, Homo sapiens
cctaacaggctgagtctagtatataatctactgccatccatagggatatgtacaatggactcgggtacggcatatcgtagtttttgtacagcggcggttgacgacatgatgtgatgaccgcgctattgactaccgatcagctcgctcatc

SEQ ID NO: 590469 - DNA, 80 bp, Homo sapiens
ccactaacataaatgcccaagacgggaaaatttttctcttcttaccctttactcccagggtacccttctgtcgtcttctc

SEQ ID NO: 590470 - DNA, 297 bp, Homo sapiens
gcaggcttgactctatagcatcactaggctcgtggaacaatgggacaatgtaatgagctgaatgcccactggttgtgacctggacaaacccttcacgtgaggctatatgatcaaacagcaaactgtttatcataaatgcagaatgtgggcaaactcacttctgcttcagccgccagaaggttcgctgagggcaatcactccctggcgccatgctctttgaggttatctactgagacatctagagcctactgttcaaagaatgcaatcttgtgagcctgctgtgaatcaagctgctga

SEQ ID NO: 590471 - DNA, 137 bp, Homo sapiens
cccttttaaaaaaaccccttgggaaattttttgcctgggggtttttaaaaaaccaagggttttttttttttggccgcccaatccttttcccccctttataaaaaaattccccccaggcctttttgggggaaagtcca

SEQ ID NO: 590472 - DNA, 303 bp, Homo sapiens
ccatatgacatggtgcctcccattaccttcctccatgagtaaacgctttttgaggccctccccagaagcagatggcagctccatgcttcctgtacagcctgcggaaccatgagccaaataaacctcttctctttataaattacccagcttcaagttttgcattatagcaatgcaaaacagactaacaaacatagtgtgttttgttacttaaaaagcaccccctttcaaaattcctttagttatccccattttccccccctgatattagaaaaaagagagtaataaacatttctgaaccgaata

SEQ ID NO: 590473 - DNA, 1080 bp, Homo sapiens
cgactctggaggaagactggagcctgtggcgcgggtgcatggcccgtcccctggttccccggcggagctcggagggcgcggactggtgctgcgggggccccgggaggtcgaaaagtaagcatggggaagagctgcaaggtggtcagtgtgtggcctaggcgtcatagtgggccaaaacattcaattcgctggcagcaagcttgtctagtaatggggaactcaatgtaagtggggttcgggagcatgatcagagacgcatggaggacatctacggatggtgcgtcgctcattgaagacgagtacacaggagtggagttgctggagatagctgggatagctgttttcttcatagacactcgctggggggggaatcctggacgtatgtgggcccggaaactgcaccacggacaacgttgccatttcatctttttgactgacttggttattgagccttgacggctctccttggggatcccttaatttagaccgaccaaagccattaaagccaaggagaggcaagttccatcctttactcctaaagactggatagttggggaaagccctggtccttcggatcacgtgaaacagggcgaacgccaatgttggaaccaataggactttcacaaacaatggggaccccataggcaaaggagtaacggtgtttgctacctcggattacctgattggcggtttgccccctatgggtgactaaaccccattaaaggatggatcggtaaccttaattaagccaaaggggggaaaggtcctaatggggaaggttgcctcggatttgggttaaaggaaagctacgaccaaccggtaaagtatgggtagggggcacttaccggaatggttccaacccctttgggggaggaccggcctaacattggttttcccaccgcgcaacaggaactaacgccggtttcgggaaaagaaaggcctattcggattttggccgtggaaacgcgcgggatacggctaacaaatcggattgggcgggtcaagtgggaaaccttcttggaggccccagtgtccatttccatccttcatttccgaccattaggtgtggatttgttcccg

SEQ ID NO: 590474 - DNA, 343 bp, Homo sapiens
tccgtcaatcacctgacaccctcactcctcatcctggacaccctcactcaacctggacaccctcactcctcaccctgacaccctcactcctcagcctggataccctcactcagccgaggatagccgtcactcctcatgcctggatacctccatctgcacgcatgtagaccctcactcaccctggacgcgttcactcaccctgacgccctcactcaccctggacgaccctcactcaccctggataccctcactcctcatcctggacaccctcactcaccctggataccctcactcctcaccctggacactctcactcaccctgataccctcaatcctcaccctg

SEQ ID NO: 590475 - DNA, 178 bp, Homo sapiens
actgcgaaccggttcttgctgcatcataacatggtgaaaggcaaagaggatgagagaaagacaaagatggggccagactcattcttttatttttttggtttttttggaaatggaatcacactctataagccgggttgaagtgcagctgaccacaaattcggttcattgaaaccttgtg

SEQ ID NO: 590476 - DNA, 512 bp, Homo sapiens
  misc_feature (248)..(248): n is a, c, g, or t
  misc_feature (353)..(353): n is a, c, g, or t
  misc_feature (460)..(460): n is a, c, g, or t
  misc_feature (465)..(465): n is a, c, g, or t
caatatgctgaaaaactactcttcttcttagtcatgttttcacctgaagtttgtgacacaggttgtttaattttctgtatatatatccaatattatagtatgatagactttactttccataaaccttgccttgcagctaactttactggaatgcatttattctgtgaagttgaaaatatcctattgaaaaatgcagctctctgccatgcattgaggaattcgaaagctgtgacagaaaattgtgccanggcataggaatcacagttatgaaacgtcagcagggagctaggagtcaccctttcccactgagactcgggctgcagctgccacgtggcgggcttatgctccggagncccatcaggcccagcgtgactaggttggcctccctagcaggaaagttgcccagttagtgacagagtcgttgtcctctcctgctatgcctggacccctcgtcttcggnttcanccctgcccgttattggtcaggacaggcgccagtgttctcacctgctc

SEQ ID NO: 590477 - DNA, 127 bp, Homo sapiens
tgtaggtcaggtcagctcggctgtcttccccaggagcgtgctcagcgactctgtgggtaccttcatgctccactgtcagcccagtcaggccagtgaagcctatcagtgccctgcagagaatgggtcc

SEQ ID NO: 590478 - DNA, 600 bp, Homo sapiens
gtggttttaacagcaggccccggggtcgcgtctacaggtcaggatagatgggctgctcctctttcccccaccttccgtgagccacgagtgctaactcctttatggtctgaggaacactgcttcacgcacccctatccgtggtcattcagaactgtgactcatgcctgtgcaggttgatgccagaagatgcataccagaccacacaagccccctgataatctttactgccagaagaagagctgataggggccgcatccctgctttagtgcaaatacgctaccgcgaccacacttttattgcttgcgagatgttggcattcgcatgtgaaagcagacaatactgggcagaacagggtctcaaggcagtgaaagcactggtctgacattggttacatctttcggagctagggaaggattgataactgatcctaccgttgaggaataccacaagctagctattggatactcatctcagccttcgtggatgacttcgggatacttatgctttatacgtgccacgcatgcgctgataacttttcactggacccattgcggttctgcaggatgatgcatggtacactggtgactctacatttaatgg

SEQ ID NO: 590479 - DNA, 993 bp, Homo sapiens
gaataggacggtgcccttctgcggcacttttgcggccttcttcacgcgggcctttgaccagattcgcatggccgccatctccgagagcaacatcaacctctgcggactcccactgcggcgttgtccatcggggaagacgggccctcccagatggccctagaagatctggctatgtacggtcagtccccacatcaatttgtcttttacccaagtgatggcgtgctaccgagaaggcagtggaactagccgacaatacaaagggtatctgcttcataccggaacagccgcccagaaaatgccatcatctataacaacaatgaggacttccaggtcggacaagccaaggtggtcctgaacgagacacggaatgaccaggtgaccgtaatcggggctggggtgacccagcacgaggacattcggccgctgaccgaactgctgaagaaagacaagatcacatccgagtgctggaaccctaaccaccatacaagccctggacagaaaactcatcactcgacagcgctcgtgccaacaagggcaggaacctcaacgggcggaccatcatatatgaaggtggcatgggaggctggttccagatgcagtaggagggcgagacctggcatcacgtcaaccaacagggcagtcaccgggaaaacaagacggtgggagcagagcgagcgcgaaagttggtatcgacagggcatgcccctgcacgagccgtcgaggggccctcacccaaaggccctagggcgggaatgaacaggggacgccaaaccaacatcacggagatccgggcacggggcacacgacatcagccgcgcgaacactataatggacaccaaacgacccaaaaacgcgtgcagacaccatccagaccaaaagcgaagacgaggcgcataaagaacacaagaaacaacacagccacacgtcacagaataacaaaagagacacgccgagaaccagagaccgcaaagagaaaagacgagacaaaagcga

SEQ ID NO: 590480 - DNA, 151 bp, Homo sapiens
cgtaaatcccgatgtggatgttgccgaagttggcagttgccaacacattatctggagcagcagtggctgtcagagggagggggtccggaggacgtaaaaggcgcggaggggtcgcggtaggtgtgggagggggagcggttgcccgcggccg

SEQ ID NO: 590481 - DNA, 161 bp, Homo sapiens
ctctacacaacatgattttggtcgaccagatggaccctactttcttggccctcccctcgttgcttgattgaggttctggacgagcgattacccccccggttttgccgctgacggacccaaccttcgattactaccctccctgatggtggttgggcgtttcc

SEQ ID NO: 590482 - DNA, 991 bp, Homo sapiens
ccagttttggagtgcagcaaaaaccaagggatttgaggtatatttggctgaaatgagtgcagataaccagacttgtggcaagagaaatattcatggaagaaagcttaaagaaataaataagatggctgatcactgggaaactgcacctcgtcacatgatgcgtctagatattcgttcttgtgctgcaaggatgcctgctcattgacacgacggtagagactggacacgacttttgatgcaaatactcgaacgaaccacgaccacgaccgaccacacgacaacgatgcagacggaagaggaaagcgaactgggttacattccgaaaagcaaatgggagatggacacatctgaggcaaagctagacaagttggatggcttgaggactggtactaaaaggaaacgtgactgggaggccattgccagcagaatggaggattatcttcagcttccccgatgattatgatactcgtgcttctgagcctgggaagaacgagggtcagatgggcagacctggagggagaagacaggatgccgataggcaaacgggcataggttttgtgggtcggacagcattgatggggagaacgatcacctcgctgacacgtgggtcaacttggttgaaaaaagccctcaatcgaaccaaattttttttgacactcaggtttggaacggagcattattcctctcaagagtggtacgctcagacagggcctgaaagcaagcctcgcggacactcctggttttgcccgtgtgtcccagattcacagccagtagtaaggacaacgcgtcagcgcattaaaaaggtaccagggtccccaagatatcacatcgtgtgcccagcaaagaagtacttaacagcgtgagaggaacagagagagacaactgcgacacaagcgtgagggaggcctaaaaaacactactcaggcgccagcacaacacacgaggggtggagagaacagaggagagacaactcctcaacaatctctccctg

SEQ ID NO: 590483 - DNA, 320 bp, Homo sapiens
ggaccggcatcagaggaatataaagcaagggtggtgaatattatgcatattttctttttcattttttatttttttggagagatgagatctggtaatggtggcccagcacgggaaggcaggggctaatccacagggtgccatcagtaatacactaacagccttgcaacttctggggctcaaggtggctcttccgggccttcagccgttctgagctagcgtggaacttatagggtgcactttgactatattcgtgactggcttgtgttgcagatttgggcgtgcccaatctccataactctcctttccatacttagaaattc

SEQ ID NO: 590484 - DNA, 106 bp, Homo sapiens
tgcgaagatcacctcagatcccgtcatcgtgcgaacgatcacctagatcaccctctcgtgcaggtacgacggcttcctagaagtgtgaaaaccgtaggcttggatt

SEQ ID NO: 590485 - DNA, 176 bp, Homo sapiens
  misc_feature (105)..(105): n is a, c, g, or t
agagatcccctttgtctgctctgggcatataagggggagaacaggtcacagctgaggggagctgggcctattggtgtaggcagagcagagtggcagataggacantgtgacggtggggaaaatattcctcatgggacagaagatacctgccacatgtacccacaaactgtacacag

SEQ ID NO: 590486 - DNA, 274 bp, Homo sapiens
gttgaactgaagggcggtgacatggttagtgcttgtgttcccacccaaatctcatcgttaaattgtaaacctcataatcctcagtaatccccacattgtcaagacagagaccaggcggaggtaactgaatcgtggattcgaaaactcccatgctgttctcgtgatggtcagtgagttctcataagatccgatctgatggttttataagaagctcttccccacttcgctcagcactcactctgtcctgccaccctgtgaagaaaagagtgcttgg

SEQ ID NO: 590487 - DNA, 115 bp, Homo sapiens
gctgttactctatgatggatcccttcgatgtgggactcagagtggaagcatatgcatgaggacacggctgtgaatcgtgggctcgatgtctgacactacgcaggtggtcggaaga

SEQ ID NO: 590488 - DNA, 471 bp, Homo sapiens
ccgggcgctgccccgtcctgtgattcggggctggacgcagcatagcggggtgctgtgtcccgatgctccccgtcctcggtggagcttttggaatagtcccatatgtatgcgatcagggtccggcatatggcagtaggagctagtgaaggacaacgtatgctgctcccaccaccttctccctccttgggctccttcgacccctggctgagctcacaggaaaggactcaaatgtcacagcatctcccacagcccctgcatgccccagtgacaagccagcaccggtccagaagcctccatccagtggcacctcctctgaatttgaagtggtcactcctgaggagcagaattcaccagagagcagcagccatgccaatgcgatggtgctgggccccctgccccgtgaggacggcaacctgatgctgcacctgcagcgcctggagaccacgctgagtgtgtgtgccgaggagccgg

SEQ ID NO: 590489 - DNA, 354 bp, Homo sapiens
  misc_feature (206)..(206): n is a, c, g, or t
  misc_feature (303)..(303): n is a, c, g, or t
agcttttagcaggagttgggcaacagagaatccagagttatgttctcaggcatcaagaagagctggtaggtatctgccgatgctgactgaggggagcgggctcgtgttgttaatgctctcagcacctggtccgtggcaggcctgcagtgaatctgtgtgcagtagttaaatgtccacatcacatgtagggttgtccccctcttccnaaatccttgctcctcatctccacctgaaggaaggcctgggcagtagctatgggattaggccaaggtgctttccttaggaaacaaatccgggactgtncttcatatatcaaccaaagtgctaggatttacaggtatgagccaccacgcc

SEQ ID NO: 590490 - DNA, 292 bp, Homo sapiens
ctgcaaagcgcgtaagtgatcttatgggccctctttaacttaccactctactatcagtgtactgttacggggacctggggcccttaatttgcataagggctatcgaccttccctggggtaaaaaatgtaccccatttcttgccacctcacgggctacaccttgacctaacgtgtctacttgggtacttacgctcactttgtgctcttcatgaaggattgccgaagaccgcgatgtatagactgaacaaaacgttgcgaggtccatcgcattttatcgagtacaaaacaggct

SEQ ID NO: 590491 - DNA, 333 bp, Homo sapiens
tgtctaagctggttacgtgcgacgtcactcatgaagacagctcaatgggttctccctgaatgtgtcagttttcaggaatcccaataagagatgtgatattatctgattcaatgtcttgatctgtgcattctaatttctcttaggatcatcgttcacccctatttactgcaatagtcacttcctgagaagctgggtctttccctgtctcatttttactatgattttcctggttttccttaaaatattctttcagggtggaaagaagatcatcatctccttcaaggtcaatgtactggatttgttcaaaagctgaatctgcaagttctactggac

SEQ ID NO: 590492 - DNA, 378 bp, Homo sapiens
  misc_feature (26)..(26): n is a, c, g, or t
  misc_feature (63)..(63): n is a, c, g, or t
  misc_feature (67)..(67): n is a, c, g, or t
  misc_feature (94)..(94): n is a, c, g, or t
  misc_feature (100)..(100): n is a, c, g, or t
  misc_feature (117)..(117): n is a, c, g, or t
  misc_feature (125)..(125): n is a, c, g, or t
  misc_feature (139)..(139): n is a, c, g, or t
  misc_feature (202)..(202): n is a, c, g, or t
  misc_feature (241)..(241): n is a, c, g, or t
  misc_feature (256)..(256): n is a, c, g, or t
  misc_feature (266)..(266): n is a, c, g, or t
  misc_feature (305)..(305): n is a, c, g, or t
  misc_feature (320)..(320): n is a, c, g, or t
  misc_feature (331)..(331): n is a, c, g, or t
  misc_feature (334)..(334): n is a, c, g, or t
cgggttccgcaggaccacgatgactnatttcccgcgcaggaacatcttggagatgtagcggtntttnttgattgtgcttggacttcttcttgcnctttcnacttttgggtaccttanttcacatnttctttacgttctncagcaccatgttgcagttcctattgaaggcctttacgcggcccaggagtttcttattgttgcngcagttgatgagcacttgggtattgttcttgatttattnttttaactcagatanttgaccggtnttaaattcctcctcctcttgcttcttcagctcctcttgngttatcttacttttnggctttttgangangcttattatggttactacgctcttcgttcactcccgtttcctcc

SEQ ID NO: 590493 - DNA, 374 bp, Homo sapiens
ccacatttgcaggaggatcacttgagcctaggagttgagactgtggtgagctgctatgattacgccattacactccagcctggctggcgacagagcaagaccttctttcttttttttttttttttttaaaaaaaagggagggggagtagggggaaaaaaataatttcccttttttaaaaggtacgtgtcacaatttaaaagaatattagggtccttttaaaaaaatatgggtagatatcacctgctatcatgtaagggccgtaatggtgtccagcagtatttttttaaaaaagaaaagacagtgaccagaaacgggtacctagggatcctagaggcaaggagacacagagtccggtataccaggacagaccgtt

SEQ ID NO: 590494 - DNA, 215 bp, Homo sapiens
  misc_feature (117)..(117): n is a, c, g, or t
cccatggggaaagtctagttggggataaaactcggagaggttaagaatttgatccatgggaaattccaccattttaggagcaaaatgtcacgttctgcaaggtcatattatatgatnctgacctctggcggacagatttcatgaagggcctagagtagttaggcaacctggagggaggacatgttaaggatttcagaggtaggtaatttacaccc

SEQ ID NO: 590495 - DNA, 222 bp, Homo sapiens
actaccgatccttaagagacgtgttgcatgatcctcttatttatgcagaatgggactctcaagtaataaatgatctcaccagccacagccaaaaaagactttgcctggctaacagagtctctcgactaagtatgtaatatacaatgaaatacaattcaaagatgatgtacctataacgtccatttatttacacggtcttatatttacaaaacggaggcccca

SEQ ID NO: 590496 - DNA, 1363 bp, Homo sapiens
  misc_feature (477)..(477): n is a, c, g, or t
  misc_feature (1363)..(1363): n is a, c, g, or t
gccaatgccccccagaaggtgatcggaggagttctacaaccagacatggtgtccagccgcgtatggggacgacgcagtcctgcccaccatcgctcagccatcgctctggatccctctcaggtggccattctttttcgtgttgaggggcattgattggctcctttctctgtgggccctttatcgttaactcgctttggcacggcggaggttcataggctgtagtgatgagagcctgctgggccttcgatgtccggctcgtgctcaatgggcttctacgaaaactcgggcacagtcctttggatgatgcgtgatcctagggtcgcgcttcatctagtcgcgtagtagttactggtcgtgcctagaccacagagcttctgatgccgcaatgatatagtggggtggaagttgtctacccgactagatccggttctgtagggggcgccgtgcgcgcatagccatgctagcaagcatgggacnatcggtcgatcggctgtccgtcatcgcccacggtgttcggcctcggactccatgcatgtggcaaggaaaggatccttgtgtgacccatgctggcttggagcatcatcttcatccctggtccttgctggcagtgtcatcgtgccgtgccacttgcgtggcccgaggagtcacccgctttgcctggctgcatcgaagctgcacacgaggggagaaaccgggccaaagagtgtgctaaaagaacggcttggcggcgggggaccagctgtacgttggacccaatggaccctggcccgcgagcaaggcacgggaagaaggacgtcaggacagatcatgccggggaaaaacgcaccaggtgacacacaccatcggagacaggggacacggaacaccccggccaaccgacacagacacacgaacccaaaacgcacgaagcacaagaacaaatgcccgaacaggacgaccggcacaaccaagacggaagccatagaaaacaaagcaaggagaacacaccatgcagacaaacgcggaggggtcaccatccccgtgatctgaccccacatggagaccggggacgacgaacacagggacacagccagtcgagcggacccaaaacgagaggaacaaaccacgaacgcacgagcgagcacgagacaccccaaacgaacaccagaagaaagaagaacataacgaacaaacagcgagacacaacgggagccaacacacacgagaaagatcacgaggagcaaacgagacacacagagatcgcagcacagccagcgcgaacaacaagcacgaaacacaagcacgaagcaagaaagcacgaataagcaagacaaccgataaagcagcacacgcacagcgagcagaataaagagctacaacggcn

SEQ ID NO: 590497 - DNA, 640 bp, Homo sapiens
  misc_feature (151)..(151): n is a, c, g, or t
  misc_feature (154)..(154): n is a, c, g, or t
  misc_feature (164)..(164): n is a, c, g, or t
  misc_feature (187)..(187): n is a, c, g, or t
  misc_feature (230)..(230): n is a, c, g, or t
  misc_feature (253)..(253): n is a, c, g, or t
  misc_feature (285)..(285): n is a, c, g, or t
  misc_feature (317)..(317): n is a, c, g, or t
  misc_feature (467)..(467): n is a, c, g, or t
  misc_feature (483)..(483): n is a, c, g, or t
  misc_feature (485)..(485): n is a, c, g, or t
attcggccattatggccggggggataccagggcaatcctattctagagtccatatcaccattagggtttacgacctcgaggttgaatcaggacatcccgatggtgcagccgttattaagggttcgttggttcaacgattaaggtcctacgnganctgagttcanaccggagtaatccaggtcggttnctatctacttaaaattcctccttgtccgaagggccaggagaantagggcctacttaacaaagggcnttcccccgtaaaggatatcatctaaacttagnattataccaacaccaacccaggaccagggtcnaaaaaaaaaaaaaaaaaaaaaaaaaaaaccttgtcgcccgcttgggccaagccgattttagactggagcaggttaatgcttgcggccgaatttggggttaattgggccaattggccttatagggagccgatttacatttaattgcccgcngtttaacaacgtcggnantggaaaaaccttggggttaccaaattaaatggcttggaagaaaatccccttttggcaagttgcggaattaccgaaaaggcccgaacgaatggcctttccaaccagtggcccagcctgattggcaatggaaaatggaaggcgttttggttttcgcc

SEQ ID NO: 590498 - DNA, 485 bp, Homo sapiens
ggtgccatggaagtaacaaagacacaattagaacagttaccagaacacatcaaggagccaatctgggaaacactatcaaaaaaaaaaaaacaagaaaaacaaaaaaaaaaatttttggggccggccttaggagtccttagaagaaggtttttataggaccaatttcggttggggggcgggggccaaggtaggttatggtgtgaccctgtgggtaatatagcatgtgggttcacatataggagagagacctcgggggcgataatggagactatagtaggcttggggaggttctctcttcaaccaatctataaaacaaacgcgccgggggggagaacacccggagggctggtccttgagaacaacaatctcaagaaagtggagagatccagagaaggaacaatcaacgggagcctcatatcaaacaaagggggcgttcacaaaagcagagcccagataattcaaattttacggcccgcgcgcggggc

SEQ ID NO: 590499 - DNA, 615 bp, Homo sapiens
  misc_feature (442)..(442): n is a, c, g, or t
  misc_feature (458)..(458): n is a, c, g, or t
  misc_feature (460)..(460): n is a, c, g, or t
aattcggccattatggccggccacaggggttaatgcctgaaatcccagaattttggaaggccaaggagggtgaatcagttgaggtcaggaattcgggaccagcctggttaaaagggtgaaggcctgtcgttactaaaaccccaaaatttagttggttgtgggggcagacgcctgtaatctaagttacttggaaggttgaggcagaggaataattgggaccccggaagacgaaggttgcagtgagctgaggtaacgcaattacattcaagcctgggtgacagagtgggactccaaaaaaaaaaaaaaaaaaaaaaaaaaaaccttgtcgcccgcttgggccaagccgattttagactggagcaggttaatgcttgcggccgaatttggggttaattgggccaattggccttatagggagccgatttacatttaattgcccgcngtttaacaacgtcggnantggaaaaaccttggggttaccaaattaaatggcttggaagaaaatccccttttggcaagttgcggaattaccgaaaaggcccgaacgaatggcctttccaaccagtggcccagcctgattggcaatggaaaatggaaggcgttttggttttcgcc

SEQ ID NO: 590500 - DNA, 847 bp, Homo sapiens
  misc_feature (673)..(673): n is a, c, g, or t
  misc_feature (748)..(748): n is a, c, g, or t
gctctcccagattgtcccgattgtaactcagagggtggaatatcaaggtcgttttgtttcattccatgtgcccagattaaatcttgctttctttgtttggctgggatagaggggtcaagttattaatttcttcacacctaccctccttttttttccctatcactgaagctttttagtgcattagtggggaggagggtggggagacataaccactgcttccatttaatggggtgcacctgtccaataggcgtagctatccggacagagcacgtttgcagaagggggtctcttcttccaggtagctgaaaggggaagacctgacgcactctggctaggttaggacttgccctcgcggtggcaactttcctcaacaacgtctcaccaacccttgtatcaaacgtgggatctacgttagcaggcaggggttgcgaatcacacggatgggctctgcgctgtcgcaccgcgcgcttcccccgcacagtgctctgcccctgttgctagcactgtggcttctgcatatggagggcccgcctcgacaggactggtctgtcgaacccaccgcgctctcctgcgtggcttccatcctccttgctgcgtcctcacggcgagcttctgcgcatgctcctccccacctcgccagtcgccccaataatgggtgctacatgtgcctgcngcttttctacttgcgactgcactctgcatggacccctgtgctcctcctactctctcttgagtctctccactcgcncttgtcggcggtatggatctcttgcgctctcgccgtctctcatctccactccctcggtttgcccctctgctcttcttctgctgcctgtcgtgggagccc

SEQ ID NO: 590501 - DNA, 194 bp, Homo sapiens
agtccaccatcctgtggttctattcatggacggttttggtcctcataacgggactgtgtcctctgatgcttggtatagcggataattggtgaccagatgccaaatgtaaattttacactgtgggtttctagttttaaaatattcctttaactaatttggggctttttggctgttgtggtttggtttttttggag

SEQ ID NO: 590502 - DNA, 980 bp, Homo sapiens
gctctcccagattgtcccgattgtaactcagagggtggaatatcaaggtcgttttgtttcattccatgtgcccagattaaatcttgctttctttgtttggctgggatagaggggtcaagttattaatttcttcacacctaccctccttttttttccctatcactgaagctttttagtgcattagtggggaggagggtggggagacataaccactgcttccatttaatggggtgcacctgtccaataggcgtagctatccggacagagcacgtttgcagaagggggtctcttcttccaggtagctgaaaggggaagacctgacgcactctggctaggttaggacttgccctcgcggtggcaacttttcttaagaagttataaccaatttgtctattaaaagtgggaattaggagagaaggtaggggtagcgaattcagagataatggctttggtctcttgcttgtgggactagcctggcttgggactaaatgccctgcgtcgtgaagcagtgaagcttagtaataaatgagtggatatccctatcttgaaagaagaaaaggttcttactgcttggtccttgatttatcacacaaagcagaatagtatttatatttaaatggtacagaccaagacaacgtatactgtaatggctccgcgggactcaagcgagaacggcccaagggaaaagaaccactcagggtaccagggccaccaccattgaacccaattcgctgcgcttcaaatcaagtcatcatcgcggcacaagcgagggcaatgcggccaacacgggaaccggacaaagtgcacccaaacactcagagatggacagccacccgtgaaaagggggctcggtaaaaaacagcaagcacgacgagcaactcggaggttacaaccactgtcacaacaacgcggcgccgctcgtgaaggcagccacttacgagctgaacagcgcacaagaatataacacagaccgaagtaag

SEQ ID NO: 590503 - DNA, 130 bp, Homo sapiens
gccctccacctcagtcagcgagtcagcccatcccagaccgactcgggatgttcccccggagactgaagagtgcccctcgcatcacggccgatgccaatatcgactctgaagatcgagtcggaaaccatcc

SEQ ID NO: 590504 - DNA, 188 bp, Homo sapiens
aattttgtaaaaagaaattgtgaaaaatgggcttgtaaatcccccattattttattttatggtcccaaatcaaatccatcccccctatgttatttttaaaccaaatatataatccccccatgggtgtatgttaaatctgaacctgtatctgggctgattttttaaataaaaaagagtctggaatgcta

SEQ ID NO: 590505 - DNA, 869 bp, Homo sapiens
atttccgatctgcaaccctcttgtacaaaaccccgtttcccctccctttcgttttttgtcacccgttaatatgtaactcgtccccacaaaatccctcgtctgcccaatacgcctctttcacaccattatattgtgcctccccccccaagagatgtgtcaaacaaaattggaaacaaactgtgaacaaaaaaccatagttttttccctcccgaaatacggttcaccatttgccaattgttagacgcctcttaactcctggaaaaattttaacttccccgttatctagaaattttaatatcccgaaacttcccctcggggagaactcaatttatggtcctccgcaataagaactttacaacacaaaacacctcgggggtatataaaaaccaaaacaacgtgggcctttgcataatatagatgctaacacgttgtatggaacccccataccttttgtttgccccctgctgagaaccgtgaatttagatctatgtaataacacccccaccaccgcagaaatggagtactcgtcttcgagccccaaaaggcggagtcctcattaacacgcaacaggagtatcgatttttccagcgatgacattgatttctttcccagattcacccgaaagtttttccccctatcaaagttggtctaaccccccttattgttggaagttaacaaatatataatattctccggccgccaacaatttgcctcagacaaccccagtatgattgcggttagaacttggtgtttaaatttcttattaagtcccccaccacccccaatattcaatcaagatatgtgcaaaccaataaggaaacggggcatatatcccaaaaatctacaaaaacaaaaaggcgaacaaaaca

SEQ ID NO: 590506 - DNA, 389 bp, Homo sapiens
agagatcgcaaaacattcggttggagcgccgggacagaaggtaaatggacatggttcttactgttcctaagagagatcctggggtagtgtagctaggtggctgtgcgagttcattaaataaattgaacagaaggggccggtgccgggaaaacgtaagcggttcaggaacaaatgtcagatgggcactcctcgaaggttgcttatctgggaatttagtgaaacagaggagttgtcgaggtgagatcttgggacatttaggaattttaggcttgcggtccgaggacaagatgaatgccgtaaaaattgacgacattcacagagggtttatgggattctattagcaaaagaatcctggtacattcagatggagaaatttataatggaaatat

SEQ ID NO: 590507 - DNA, 1066 bp, Homo sapiens
  misc_feature (228)..(228): n is a, c, g, or t
gcgcgtgttgccgtcgagaaacatgagctgtggtcgatagactgatcctccttaagaccatccatgggtcataagtagatgcctcgagtattcatcactctgattgatcaatatggcaccagcgtagcatatccggagccagatgtctgacaccacatatcttgagacatggatgtatcttgaatgagatctagtttagctgggcattctgatcaaacaagagacagntctctgagacagaatcttccggaaaatcgaaggcttgcgtcgcccagtgcgcgagaagggcttccatatcaaagttatgcactggagatctttggatcaaacttgcaagagcatgagacgatgaacgttggatattcgcacgcatttgcataatcatccattgttggcaacattgtgcagaaccagccacacgtactaatcgtgcactactcaattgacttgcccacagagacacaagacgacattgtagtcagaaaaccatgacttacaggggcacatctacaggactgacgtgatgcatgtcacgtgcattgtatgctgccatggatgctctgcgtggaactacttagacaggacatgggtacttcatccaaggacagtggggtcaggacccgcgagaagacattgaccgcattactggactttaacaacaactgtgcgtgttgaaaaagcaacttacatttgatcggtggtggttaacacaacaacatggagaattatctcaaacgtggacaagaccaagcccagtaaaacagggcccacgacaaccgaagaagtcgtggcagaggaacaacatggaacggaaaggaggaaacgattcacagacgcaacacttgagcaaaatcaaacaagcacaccaatacgcggacgctaacgagacgccccccggaaaaacgacagataaagccaatacaagggatgaccaaacgcaagcagcgtagggacatgacgcacacggcgttgaccacccaaccgaatggccgagtggacagcgaccaagaggtcggcaacagcgaaagggaacatgaggcgagaccaaaacgaacacttgcaaaag

SEQ ID NO: 590508 - DNA, 828 bp, Homo sapiens
gttctcgaaggtgggaccccgggcagtgaatagggaacatgccggctgtccccagcccatgcctcggagtgtgccgcgggtccgctgcaagttgtaaccgccctcgattcggttgggggccaccaccaaccgagcctggggcccccgccatttttgcttcgaccgagagtcaggttccaagcagaactttctgcgtgaccctcgggtccaccccctgccactcaggaccggtgccctcctatctgcgttgggagtctggaagaagactctcccttccccgcccttgccccagaatctgagggttggaaagccaaagccagatgtggtggccccaaactgctccccaagaaagatgagaaccagcgtagttcctcctgcccctgtggacagcgacggggagagtgattgattcagaccgtgttcctcgtgcccccgtgtttcccaaattccttcagcccagctattgaagcagccttcatgaactggaccacaccaagctacttcagatcccctctctgaagagaaaaggaggaaagaaaagaaaaaaacacgaaacagaagctcctgttcaagcacctcaatcgtccacaccccaagtgacactaactggcccaaggctaccttctccactctggtttttgtttttgtttttttttcccccacagcttttgtttggctgctgtaatttttaagtatttgagtttgaaccagattagctctggggggagggggtttccccccaagtgagggggaacccagaaaattttaaaaaccagtgtattttcccgcttcctgtctttaccacccaaataaagtattgacaccaga

SEQ ID NO: 590509 - DNA, 169 bp, Homo sapiens
ccgactttttccccaggcccaacacaactcaatcatttttggtaaagggacggacttcctaaaatggtttttatagttggggaaaaaaaaggtggggggaataatagtttggcagacttaagattttatttaaaggcttaacccaaaataaaagttgagtttcccccca

SEQ ID NO: 590510 - DNA, 242 bp, Homo sapiens
cactcactgaggagccttcatcagggtttgccgaagatggcggtatataggctgagcaagaggtgctgagggggatcgtggtttatcgattacagaacagcctcctctagagggatatgaagcaccgccagttcctttgagttttaagctgcggctcgaagtgtcctgacgagcagttttgttgatttaactgtcgaggtttaggactaagcataggggcgtatctattcccagtttggttc

SEQ ID NO: 590511 - DNA, 217 bp, Homo sapiens
ccccaagggggctctttttggggtaaccccccggggtttttttaaaaagcggggttttttcccccccccccttagggggttttttttgttttccttttggggccgcgggggtttttttaggccccccttttttttttggtttaaggggttcccccttttttttttccaaagggcccccccccccccgcccccgtttttttggggtttttttttttta

SEQ ID NO: 590512 - DNA, 125 bp, Homo sapiens
gtaccctcgataagggccaagggtcatgatggcaggagtaatcagaggtgttcttgtgttgtgataagggtggagaggttaaaggaagttttttcataggaggtgtatgagttggccttatcgag

SEQ ID NO: 590513 - DNA, 642 bp, Homo sapiens
aagcccagcttctgggaagggagagaggggaggtctgcataaagagggagttttgggggctgggcgccgtggctcactcttgtaatcccaaaactttaggaggccaaggtgggaggatcgcttgagcccaggagtttgagaccagcctggccaacacagtaaaccctgtctccacaaaatttaaaaattagcggccgggcgcagtggctcacgcctgtaatcccagcactttgggaggccgaggcaggcggatcacaaggtcaggagatcaagactatcctggctaacacggtaaaaccctgtctctactaaaaatacaaaaaaattagccaggcatggtggcaagcgcctgtagtcccagctactctggaggctgaggcaggagaatggcgtgaacccaggaggcagagcttgcagtgagccgagatcacgccactgcacttgagcctgggcgacacagcgagactccatctcaaaacaaaacaaaacaaaattagctgagcatggtggtgtgtgcctgtagtcccagctactatggaggttgaggtgggaggatcgcttgagcccatgaggcccaggttacagtgagccaagatcgtgccactgcacttcagtctgggtgacagaaagagacttctctcc

SEQ ID NO: 590514 - DNA, 96 bp, Homo sapiens
caatgtgtaagaagtactttaatagctcaaactcagagtcatcgtgctcccaattccaaagagattcctaaaagaggcaacttctgtcgtcttctc

SEQ ID NO: 590515 - DNA, 164 bp, Homo sapiens
  misc_feature (134)..(134): n is a, c, g, or t
gatctagaggattccgaatcgattccctgcttctgtgtggctttccacagatcactgcctgcatagcaacagaatgatttcctaaaaaaaaaaaattgagactgtattgatcccttgcttaaaagccctccaancagcttcccattggcaattaaaaattaatg

SEQ ID NO: 590516 - DNA, 201 bp, Homo sapiens
  misc_feature (22)..(22): n is a, c, g, or t
  misc_feature (29)..(29): n is a, c, g, or t
  misc_feature (40)..(40): n is a, c, g, or t
  misc_feature (50)..(50): n is a, c, g, or t
  misc_feature (70)..(70): n is a, c, g, or t
  misc_feature (103)..(103): n is a, c, g, or t
  misc_feature (146)..(146): n is a, c, g, or t
  misc_feature (152)..(152): n is a, c, g, or t
  misc_feature (163)..(163): n is a, c, g, or t
  misc_feature (165)..(168): n is a, c, g, or t
  misc_feature (174)..(174): n is a, c, g, or t
  misc_feature (198)..(198): n is a, c, g, or t
tccagggtgtgcgtaaaatccncttcccntgaccatcccnggaagagccngaatgcaggtgatagctccnctcaggatttacattgcattttttgttgttacnccgggattgtaaaagtgctatgtgcattgtggaaaatgtaggngatacncgaaagcgcgnannnnaaaaantaaataaagatctgtaattcaccncgg

SEQ ID NO: 590517 - DNA, 257 bp, Homo sapiens
tgcagataggccacctaggccagaaatcccccactactctgcttttatctccatctcccccagacttttttctccccttttctctctctggccattttctttctctacgcaagtgtgttctcttgcccagctcagatctactcccctcaaaaagctttccctctcttcccagttggaagacaatcctcttcaaaaatttagttccctctagaagtttgtctctctcttctaatacctactcctttgccttatctgcg

SEQ ID NO: 590518 - DNA, 543 bp, Homo sapiens
gatcgcttcaagaatcggcttgagcagatcgtgcttcaccttcagcgccgcctgattgatgaccagacgcgagctgatgtccatgatgtgttcgacctcgaccagattgttcgcgcgcagcgtgccgccgctgctcaccagatcgacgatggcatccgccagaccgaccagcggcgccagttccatcgagccgtacagcttgatcaggtcgacgtggacgcccttggcggcaaaatgttcgcgcgcggtgtgcacatacttggtcgccaccttcaggcgcgcgccacggcgcaccgcctgttcgtagtcgaagccgctgggcaccgcgacgctcagccggcagcgcgcgatgttcaggtcgatgggctggtacagcccggcaccgccatgttccagcagcacgtccttgccggcgatgcccagatcggcggcgccgtactgcacataggtcggcgtatcggacgcgcgcactatgaccaggcgcacgtccggccggttggtgccgatgatgagcttgcgcgacgactccgggtcgtcggtcgg

SEQ ID NO: 590519 - DNA, 216 bp, Homo sapiens
  misc_feature (216)..(216): n is a, c, g, or t
gccgaagcgcatgctcgtgggcacgcacgagcctcaagatccaaggcaattatttccagtcagagagggaaaccagtccctggcattttaaccatcttttctacctaccttgatcaggtcttgtcaagttgaggtacaggccaattgccgttctggtttggccataggtctcttgggccaatgtgttgaggatctgccctcaccagtattatgctn

SEQ ID NO: 590520 - DNA, 147 bp, Homo sapiens
  misc_feature (3)..(3): n is a, c, g, or t
  misc_feature (17)..(17): n is a, c, g, or t
  misc_feature (107)..(107): n is a, c, g, or t
  misc_feature (138)..(138): n is a, c, g, or t
gtntccatagacaaggncaggactagtttgtacccgttgatgatagaatggggtactgatgaaaagttgggtagacaatctggagacagtggttgggggagaccctncaggaagcgagaatgcagagttcctctgtgnatatcgctt

SEQ ID NO: 590521 - DNA, 459 bp, Homo sapiens
  misc_feature (457)..(457): n is a, c, g, or t
ttttaataggaattctccaaatcactaaagtgaataatcagagtactctaaacaaataagaccgggttaaagtcagaaaactccttagcttcacaaaaaacgccaacctgcatttctacacaaccagctcaggagtcaaaagcagagaacaacctctcaggagctgagaattctaccacattctaacagtagggaccagatggcaacatgcttccctggattgccaaaactgctctggctccccaaagttcatgctgagtagttttcctgtgtcttaaatgaaattgggaaacagaaattgatgaaataaaatggattttttcacagtttggccccaaagtagcaaaaactattcatttctctctacctttctgtatcagtattactacttcatagaaaagatgaggcatatgccagaaagcaggaaaacattaattttaactatgagacagacagnaa

SEQ ID NO: 590522 - DNA, 214 bp, Homo sapiens
cgctgccactgccacgactgctggaacccagccagtgggagggcctggcccaccagagtcctgctccctcactcctcgccccgccccctgtcccagagtcacctcggggggctctctacccccctcagagtgcccgagtcacacacagtgccccacacaggggtctaccccctctgttctctgcacaaaaatatctctcccggagagggccctc

SEQ ID NO: 590523 - DNA, 1003 bp, Homo sapiens
cgagagccggggcgagtgggcctctgctcgtgggtggttctcgtggagtgtcagctcccgcgtgtctccgctcgacagtggtgcttgtggcagagcccatcggtgtatgctgtctgggccatgtgctgcagtacaatggtgcaccatgctgcgatgtgcaggcctgtgccatgcacctcctcaagaatgctgctgaaatgtgcagcgtgtgagcagatggaggtgctgaatgcagctgcatcgccgagtgagaccatcctcaagtcgcagtgtggacaagaggttctctggctgcattactgacgcctgttggatgtgcctgatgcttgaatgtcctagcactgtgttgtggccttggtggacccttgaactgacaattgaagtgccctgtgcatgggagtgcccttggtcaagggggaagcggcggatgctgtgcatgctggtgccaattgctgccagccacgctacggacggacgcatgctgcgcttgcacggcatgtgatggccgtgcatgctgtgcgaccgcatgtgagtcattgttgtgctgcttgaagctgcgcaaagcgtgttagcggcagtcgtcccgttggccggtggggctcgcgtatggggccgggcgtaatgaaagccgacgccgtccggcaagtgaagcccaagtggccccctgcatagtgcctgtgtcaccgagagaggcgccaaggggcgggcccggccacggagagaagaccgcatcgtcgcggcagacggaagacgcgcccgaaacccggtatgccgcacagagccgacaggccttagcccgatggccccaagaaacaccggcgggaacccggcgcgaacagggacggcgcacggggcacgcacaaaccgccgggccatcaccccgaacgacgagtgaagccgatggcggaccgcgaacgaccaagtatagacggcacagcgcgcgcaacagcgcggcgcgtacgctacgcagaggcgcagacacggcgtcaccgcaacgcgcaca

SEQ ID NO: 590524 - DNA, 391 bp, Homo sapiens
  misc_feature (30)..(30): n is a, c, g, or t
  misc_feature (346)..(346): n is a, c, g, or t
ttttagtgaataaatatctacagaaagtcnataactcaattttgttttccctaatccttgcttactggcaggctcaattgaacagtgaaggtcctaaagaatacaggctgggcacagtggctcatgcctgtaatcctagcactttaggaggccgaggtgggtggattacctgaggttgagagttcaaggcgagcctggccaacgtggtgaaaccccgatctctactaaaaatacgaaaatattagctgggtgcagtggcttgcacctgtaatcccagctactgtggaggctaaggcaggagaatcgcttgaacctggtagatagaggttgtggtgagctgagatcnatgctgctgcactccagcctgggctacaaagtgaaactgcatcca

SEQ ID NO: 590525 - DNA, 194 bp, Homo sapiens
  misc_feature (98)..(98): n is a, c, g, or t
ttagaggatctatcctctcgacatctctcctctcgagatctcctatttctcccactcccactccagccctggtaacgcactgtactctctgtagaagncaacttttaaaaaattagccaggcaaggtggtgggtgcctgtaattccagctacgtgggaggctgaggcaggagaatcacttgaacccgggaagcg

SEQ ID NO: 590526 - DNA, 1397 bp, Homo sapiens
tagtctagatcgcgagcggccgaccttttttattttttttatcacagttacatttttaattctgtgtggaaatggtacaaaatatccccacttccctgtgaaaaagagttatacttaaaaatacactttgtgagtgaacaaacaaaaaaaaaaaacaaaaaaaaaaaaaaaaaaaaaaaacacaaaaaaaaaaatagggggggcgcggcaaagagaaacacccctggggggcccgcacatctgtgctccgcacgcccccgaagtatattatgtgtgcaagaagagtggggacgccactatatatttggggggagctattatatatatatcaagcgtaagtgcgggaggcgccgacggggtttatacatcgataaggtgtgatgaggtgggaataagctgcatgagagagggaaatctgtagttgagaaggaagatatataatttatgggggggggctggcataatatttgtgggagactgcaaaaacgtccttatagtaagatgtaaagagggtatactgagggagaaactagagaaagttattaagaagtggtgttatgagagcggtgtggcaagaaaccagattcttgggggaatatcatgcgtgagtgggtgaggtggagaaacattgtggaggaataaaggagaaggtttatgtaaattttttgaagacataaatattggttatatcatgcggcggtgaagcttgatctaattataaaaaggggaatccagtttaacaattcttaacggggggcagagaatttttcacaatttacatcttataaaatggggcattggttccctttataaaaaaaggaagggaattcttggaaaagtcaagacgtaattaattgctatacccaaaagacagcgtttatagggaagcccaaaattttgtcccaaggaccacccgatggaagccgtccctgaactgggcctagctaagttagtagggatcaacctggaaggaaatgtctagcgaaaccacaaccaattagggcataatgcgcgaaggggacaagcagaaaagaacacaaaacataatgtgccaacacaatcggtaagaacagggcccccccgggagcaactagaagattaggcgacccagtaataacacaagatctcaaacatcattaacgaagcaaagtcctcgagacacacaccacacaagcttggcccgccgggcaaacaagcaacgccagacaaacataatgggaaacaataccaaaagcccgaagagataaaagaaaagggggaataaagagacgcacaagggaacgaagatagaagaaacaccaaccagaagaaagaagaccgaacgaaccaaaacaaggctaaaattacaccaccagaaaaatagaaaaaaaaacgaagggcaagcacaggcagagaag

SEQ ID NO: 590527 - DNA, 246 bp, Homo sapiens
tcttgtatcacgcttcactcactcaggatttcaatggtgccctggaggattttagtggtgatacctaaagcctggcagaggaggtcttctcgggcctgagacagtgttctgggctggcacagtgacttcacatggggcattggcaccagctcgggcaggagctggtaccttattggccagctacatgtccctgatctcagtgaggtcctccttggtgatcacggagcccacgttttctgctttttc

SEQ ID NO: 590528 - DNA, 1095 bp, Homo sapiens
atatacaacaaatatagacggaagtgtgtgccacgttatatagccgagaacgcatgcgatgttaggatgaacgaggttactcacagttgtgtccgtgttgacgagcatgtacatcttacggtgtctcatggggcggatacatgcatgaccgggaccagggactgtgcagcagtgttgcagcatgtctttacgactaccttccttgtacacacgaactacttctagattttgtatcgggtagactgtactaatctagaccttagtgcatgcatgcctacctagtggctgtacatccgtgtaatttggtaatgaactagtaaaggtgtgagttcgatcggtcaacgacttcacgtgtgggattttgcattataatcgataagatgctatagtttgggaagattgtggaaagtgtgaggagtcgtttgcgaattgactaaagaagttgacatatagttgtatctaaactctgattaataatttcactcgtctcttctttaaaacctagcctaagctggattactaggattaacaaaggggtgtgtatgtatacaattcaataggtaagtaaggagttaatcttttatgagataaaaaattttgtatatctactttacatatatggtattaaaagaatcttctgtattaaaacactgaacgaaatcttttatactaagtggccactatagattcgtggacccgatgagtcaagtctttgcaatagcattatatgcacgtcttgtggattaaagggaaactctttttggttgggatacacagtcctcttggagtaatggtacagggaaattagataatttagcgtctcccagtaattgtcaacgtttagatatatctatgctttttcccgggatttaacatgggggggcttcatttaaaataagcaagcgatatcttaataccatcttgaaagaacttctacggtggtacagtatagttccctttggctacgaagaagtttcgccactaaatggcgtaatccaactacatggttaaggtcactagtggggtaaaatgatttctgccgagttaacgaaattcttaggtttctcgaactatgttgctttaaggcctaatggg

SEQ ID NO: 590529 - DNA, 648 bp, Homo sapiens
cgggcagaagtgctggtctcggcgggattccgggcttggtcccaccgaggcgggactgcggtaggagggaagaggtttggacgcgcgtgtgcctccacgcggcgtgtgccatttgcgggcatttatttccagttccaaacatggaactattaattgcctgggcaacgccagcctcatcgaggaccatttgaccaaaaaagcacttgggttctggcttgcgcagaattgggaaagggaccactttataggctttttaaggaaagccattgtgatcaattttgcaaacttaggtgctaccatcagatctgtggagcgtattcattggtggggcaaaaaaaattaacggcgtggatatttcctcgagggggaatttgtgtgggtcagagggaagaaaattgttggtcctacttaggagaaatagactttggaaaaaggagagtgacacatccctccagcaagtatccatttgaacgaaattctagaagaacaaagggtggaacagcagaccaatgctggaagcagagaagttgaaatgtgcaggccctgaagggacccggaggggttctttttccaatttcccttcggagcagatactctttgatgagtactaatctttggcccagaggcttgtaggggccttcttttgga

SEQ ID NO: 590530 - DNA, 669 bp, Homo sapiens
  misc_feature (114)..(114): n is a, c, g, or t
  misc_feature (163)..(163): n is a, c, g, or t
  misc_feature (406)..(406): n is a, c, g, or t
cgaaggcggctccttcacagaattaaaaagggtaatcctagtaagcatgtgtgcggttgcgactaaatgggtaggtatgtcgagcatgaagaacttcgacgtaaatcgtaggcnaagtacaaagaaccgggatcgcccagtgagtccttatgatctgtcacanttgtgtgagatgcactcagtgtcgccactatatattgtcccgaatgtgctgagtgcaccaaatgtctatggttatgtcatcccgataactgcttagaaactcatagcactcgggtgaagtgaactagataggacaagtccctctcgagcgcctcccagagttatggcatttctcctctcaaggagcatgcagtcccgatggaatgtgcagagcctctcctcctgtggcctttcagcattgagnagaggtcgtaatggtgctctgaaggtagctcagcgcactgttagtgtagtggacaggcatgcacctgtgcaagttgatcacgagtggtggtgaaggtgcctcggtcgagcacagccgtgtcggggctaccagcttctgtgtaccagtgcggagagagcacttggcacgcaaactctagcagctggcccattaagctaagttcgcacagataatgcttcgcctctccttcacaaacccaagggcctggtccagcttcactcggt

SEQ ID NO: 590531 - DNA, 927 bp, Homo sapiens
taaccaaaatactttctaaagaattccaaaccaaaatgtctctgttaaaggcatctttttaataacatttcctcttcactcaaaaatgatagtcatgcaccagttaaatgataaaaataattttaatattttgattcttatacagcagcaagaagttagtggtcaattaaaagcacacaaacctatctttaagggaaaccctgtaaaagactatcgttacaaacaatttcagttgggagacaccagctgggtaaagtgctctcctaaacttggctattttcataccctacactcttgaatatatgagttatagaacatacttttgatagaaggcttgtaccctgggcggaacacaaatacacttagcatatatttgtagccagtaataactagcaccacacgtctactgggaaatcttttacatacaccaattgggttttcacttttaaaacaaaattcagaatccagggtcagaggataacctataatggtgtcgctcggcttttaacccggtctacatagtaaatacgcctagcaaaaaatcaaagaatagttcagaccttttacaagtttaggcgcacaggtgtctgtgacccccaaattttgattcacctacctgagtgttccaggtaccgctttccgtggatttcgtgcccgtatttttaaaaatccctcaaaaacaaaacaactgacaacaacaaacaacaaaacgcgggggcaaaaattcccggggcgcattaagtcacattttggaaaggggccattaagggcttaataaacgagacgcgcgttcaaacgtgccggaaagcgctggtttggagcacatctgggtgtcacgactcaaatatacccgctacaaccgattgacgctgcgatttgtatcatacgcatactgtcactgctccaccttatacttcatctctgcta

SEQ ID NO: 590532 - DNA, 492 bp, Homo sapiens
tggggcgagggggtttagttttgcccccagtcttgtagtgtatgggcgctttctgccatacgtgttgaccctactttgtggatgtttacctgccgggtacccttttactcattcccggtcgtcagcctttttttatcttggcgattgtcgggcgattaacattaattacatttcggtccttatttacttattatccccgccttatccccctatttttttccttttttccctgtgggcaacattttcattgacttagatgttgtttcattattttacgccctctcttggtaccgtcttcgaaaggcccttcttatccattgtcatcgcgctctctctactattacgtccgataaccatgggtcgaaatttcagtgtgacgaatgcccggactttgtttaccgctcatcgatatccgtgtaacgtggtacaccgattatttagccacggtccgcatttcgtcgtgcgtttacttatccggccaagttactcagg

SEQ ID NO: 590533 - DNA, 257 bp, Homo sapiens
tcgctaccggctcgaggcagatcccatctctacaaataataaggatacaaaatggccaggcatggtggctcaaatcccagcactttgggaagccaaggcaggtggactgcttgagcccaggcgtttcagaccagcgtggaaaacatggcaaaaccccatctctaccaaaaaatgcaaaaattagctgtgcatggtagtgttcacctatagtcttcagctacttggggggctgaggtgggagaattgtttgaacctgg

SEQ ID NO: 590534 - DNA, 194 bp, Homo sapiens
cgagagcggaaagaagaccggcatggagccagaggagtacgactctgacatcctccgcactctcgctgaggcttacaaaattaggctaactgaaaccagccattaaatccgaacagactcctgtgcgctcacagagagactggtgcacttatagaacttcgcgtccacatatcggacttggatctgtcaaaaca

SEQ ID NO: 590535 - DNA, 883 bp, Homo sapiens
gacggatctgcttctgtataggactgcgtggcccgtggaggttgaatgctgtggtctggggtggaggagcgtgggaagtgcgcggattcgcgtgggcactcgccgcatgaatcaggtgatgggcatgagagtctctgtccgaatgagttggaaaggcttgaggctcccacagaatcgagtgatcagagatctatacaatgcgactacagagggcagatatgtggaacttgatcgagagaacatacaatagtatttggaggagtattgacgccgcaggaaaaagacagaactgatgaggacgtgttgtcataggacatcagaaatcatgatattatgtccgaagcgggggtacgaagaacagaggtaatcaaatgatgaatgggccgtctctcatagtctaggctgggccactggaccgtcaaatgatggggcacgatatcagtcgatgagaggaggccgggtgcgcctgaagtactcgaagtgtgatgggatgaggtggtgtgaccggagctggatggatgatggagcttgatggttgcgcaggatccgagtgaacccggaaggaatcttgagagacgagttcgagaaacagattaagagagacattgcggggaagacatcacgagtggttgtaaaagcttgtgctgtgagggacccggatattctcagttgtgaaagttcgttactacgattgtgtgacattgcgtcagaatcccaaagcactcgggttcaaggtcaaccgtggcacaatggcgtgggaggggttgggaaatcgaagaagtcaagggcgcaaaggcagacggggtacctcacaggatgagggaagaagacgcaggcagaggacaaagaggaaaatttagagacacttagggggagaaaaact

SEQ ID NO: 590536 - DNA, 263 bp, Homo sapiens
gcaagtgccagaagtggagcacagcacggcctacctgtgcggggtcaagggcaacttccagaccattggcctgcgtgcagccgcctgcgtagcagttgcgacactgacacgcggcaacgagttcatctccgtgatgcatcgggccaagaaagcagggaagtcagtgggagtggtaaccaccacacgagtgcagcatgcctcgccaggcggggaacttacgcccacacggtgaaccgcaactggtacggcgtgggctaactgag

SEQ ID NO: 590537 - DNA, 248 bp, Homo sapiens
agaggcatgatgttacacccgggcggtgtgctttcaaggaaggggattccttgctatattgacctgaaatgctttgtttttgtttttgtttttctttgagacagtctcgctctatcctccaggctggattgcaacatcgcaatctcagctcattgcaacctccgcctcccgggttcaagcgattcttgtgcctcagcctcccaagtagctgggattacagacacgtaccaccacacctggctggtctc

SEQ ID NO: 590538 - DNA, 1417 bp, Homo sapiens
ggcctggcgcttcagccaacgcgggagtggatgggccccttcttacttcgcagacagcgttcggccgctgcccggtgctctaggctgctggcctgtgactggcccagtctggagggttcggggctggatgtgcccggtggtgtggtgctgcgcgcccggggtcctggcctctcactcgctcccctctcgtccgatgcgcagggccgtaggcagccatggcgcccagccggcctggcatggtcttgaagcccacagttccacaaggactggcagcgtgcgcgtggcacgtggattcaaccagaccggcccgtaagatccgccagacgtaaggacccggcaagaccacaggcgcagccgaaatacgacaccgatgccaccgagatacgagagatcccacatcacggacgccaaatcgatgacggcatggcaccactagcaggggtctcgggataacggcaacgacgcgacaagggcatggacgcggacccgaggcaccgaacgaggacataatcacagcacacttgtgaaagaggcaaggcacttccaagaggggaatggctgccccgggtaccacaatttaccaacgccagacggtcaacaacgcggcattgagggaacccgcacgagggaaagcaaccagaaagtaccggggagcagaacacattaacatacacacaatcgggacttggcggaggaacagttatccgcccagagcaacggggtgcacaacgtgacggccactgtaggaccacacagacaacaacaacggtattcagccgccacgactcggtgcgaggaaacggcgagtataccagcacccatatttggggccaccaatgcgaggccccccccaagaaaaacggagagtctgtggaccagcaaagaggacagtcgagcaggcagccccatttgggaaaaagcaatgagcgggcgaacaaggtgactattatgacgaccccgccatgggaaagcgacagtttgtcaccaccaataagaggacgcgatgtacaccaaaaatttcgggcgcacattcacgcaatatagaacgcgacaccaccagcccacagacggtggcgggcaaagatagcgggccgcaccagcaattagcggcggagacaccgacgacacacacaacgcacagcagggaaaaacaaagacgggggggggtggcaacaaaggcgagcaagccacaggccgaaccagcgcgggagcagcatacaagataccaccgacgcagattaggggacgagccgcacgatgagcgcacaacgacagacaggggagagacaaacgacgccgctgtgtgcgggacactagcatgcacaaccaaccacgccactggggcgtgtgtcacacgaccccaacaaacgcaccaatcacaatacgagacggccaagtattatgaacacggcaggcc

SEQ ID NO: 590539 - DNA, 609 bp, Homo sapiens
atgatctggcacataaggttacatgtgagacagatgttcctttaggagaggacaggcatgctatacacgtgtgcccgtagtccaaatatgactgttatgctgtctggctgtctagctcgatggctgactcgtgcactcgcaataacatgctatgccgagcgacgggtaacacagcaggacacgacatggtgactatcctggcccacttgacgagactctatggatactctctgtactcgaattcatgggcgacacatcaggagactgcaagcaagaactgttcggactctgtggcagctctgatgaatctacctataccacattgacaggaggattctgaagacttggcactgtactacatcatgtttatacactgagacagcatcattccagaatgcttattatgcatgtcgacgcctatcactggatcctaccatatatactgcaggtgctaatatgcaactataagtagtcattactatactccaaagctgcactcgtgtttgcctgtattacgttggccgtgctaaggttcacatctatacgtccaccatgttttttccacattgagtcgtcaatgacgcaatttggcacatgggctgctggcct

SEQ ID NO: 590540 - DNA, 413 bp, Homo sapiens
  misc_feature (32)..(32): n is a, c, g, or t
  misc_feature (49)..(49): n is a, c, g, or t
  misc_feature (228)..(228): n is a, c, g, or t
gttgaatccgtggaaggccaaaggatttgccncatatgggcctgggacnagggcttactaaatgacttgcttacctggcttgataatcgggacaacctcaggcagtagttattcaggcgggaggacacatgagtttgaatatagggagataaggtatatttctatatgccctggtacattccagaatgtgcttctctggctctgtgcactggagcagccaactcctgnagttgggaggggatcgccatggtttcatgagtggtttatttcagcttgcatctcacagtgtggtgttcagaggcataggctctaggctccctggcagcactgagagatagaaactgaatcagcacaacttaggtccttcatgttgaatagtttgaacagaatttgatttaccctggcctaattga

SEQ ID NO: 590541 - DNA, 192 bp, Homo sapiens
ctcttgggtttaagttgttgattgtgatgtaggggaggggagcctactagggtgtagaataggaagtccaagagcgagtgacaggccgagagcgactgacagggtgtggtgagtgtaaattagtgcgatgagtaggggaggggagcctactagggtgtagaatgggaagtccaggagcgacggacagggggt

SEQ ID NO: 590542 - DNA, 111 bp, Homo sapiens
acctgcctgctcctgtaacatagtgcgccttataacacactctcggcccccacgagcccgcaatgtgccacccaccgcgccacacgaagagccacacgatgagccacacaa

SEQ ID NO: 590543 - DNA, 316 bp, Homo sapiens
aaattttttccaaagccccccccctttttttggggtcccgaacccggaagttgggcttttttagttttttaagggaatcaggcccgttttcccttcctgaatttcgaagaattttaaaacaggggcaagatggggttgtaaacccttttaaatttaaggcccccccctgggttttgggggactttccaaaacaaacaaagccttttaaagggtcctcccccacccccccagtgaacttttttgggggccccctgttttttttggataacttttttttcctttaaatcccttaaggcccccaaaaagttttttttta

SEQ ID NO: 590544 - DNA, 216 bp, Homo sapiens
attagaggatccttgtgctaggtggagtaagtggaatgatcacagcttatgcagctcgattcctgggctcaaggatcctcccaccttggctctggagtagctgggacacaggtgggtgctaccatgcctggctaatgttttgattttttttgtagagacaaggtctcactatgttgccaggctggtctcaaattcctgagctcaagtaatcccccc

SEQ ID NO: 590545 - DNA, 581 bp, Homo sapiens
  misc_feature (9)..(9): n is a, c, g, or t
cgatcaggngctgtatagcatccgcaactctcccttcctcccgtggcttcaggccgagtccctgacgctgagcacgggcttccgaggtcatcaagaagaagctgtacagcatcgtgaacagtctgctcattgaggagtgttgaacttcaagctgagggggccgacagtgcgctccaagacagagacgattgaacttctggggtggagactagaggcaggagctgagggactgattccggtggttggcaaacctgaggcagccacctaaggtgcaggtgggggaatagtgtttcccaggaagctcattgacttgtgtgcgggtggctgtgcatcgtggatcacaatacccctcagtactgtagcatgaaacaaaggcttaggggccaacaaggcttccagctggatgtgtgtgtagcatgtaccttattatttttgttactgacagttaacagtggtgtgacatccagagagcagctgggctgctcccgccccagcccggcccagggtgacggaggaggcacgtgctcctcagagcagccggaagtgaggggcgaggtcggaggtcgtgaaggtggatagtg

SEQ ID NO: 590546 - DNA, 347 bp, Homo sapiens
gaggcttcaacggaactttcaccgagtactccgtgagagggtggcaatggagacgctgaccccttctgagctacggcgacctggtcaaccaggcagctgcccatctcatgccgagaactgtggcccggaagagaaaattgccaacctgggaagctggaatgactctcaactggagttcaggagtttctgggagctgattggagaagcggtcaagagtgtgaagctggagaggcctgtccgggggcactgagaactccctctggaattcttggggggtgttggggagagactgtgggcctggaaataaaactggtctcctctaccaccaccctgtaccctagcctgca

SEQ ID NO: 590547 - DNA, 249 bp, Homo sapiens
ttagtggtcgatctctagcaggatccccagctacatcccacatgtctgtacctgcgtgttcatcgtcgtactgcagccggattaccatggcaatctaacacatcatcagtagggtaaccctatcctgtctcaacgatcggtcttagatctccagctcacgttccctattagtgggtgaaccatccaacgcttgtgtgaattctgcttcacaactgatggagccacatgatgtagagcctcatgtgtagt

SEQ ID NO: 590548 - DNA, 101 bp, Homo sapiens
  misc_feature (6)..(6): n is a, c, g, or t
ccccgnagtgtcgttcaagatctgtttcacttggttgtaaatgtcttccagcgtatccccctgtacaatagctgtgaaatgttcagtaaactccatgttcc

SEQ ID NO: 590549 - DNA, 300 bp, Homo sapiens
  misc_feature (20)..(20): n is a, c, g, or t
  misc_feature (34)..(34): n is a, c, g, or t
  misc_feature (43)..(43): n is a, c, g, or t
  misc_feature (63)..(63): n is a, c, g, or t
  misc_feature (200)..(200): n is a, c, g, or t
  misc_feature (240)..(240): n is a, c, g, or t
aattgtcccatttatttatngagagacggaggcnggatgttgncggccaggctggagtgcagnggcggcgatctcggctcactgcaacctctgcctcccaggttcaagcaattcttatacctcagcctcctgggtagctgggattgcagggtgtgtgccaccacacgcagctaattttgcatttttagtagagatggggntttgcatgttgccaggctggctcgaattcctggctcaggngatccacccacctcggctcccaaagtcctgagattacaggtgggagcactgtgctcagca

SEQ ID NO: 590550 - DNA, 707 bp, Homo sapiens
ttgcaaaacacactgtggtattattagaggaacccagattgttaaagctggaatggtcttagacatgatgcagcagagtgagactccatctcaaaataaataaataaaataataagaaaataagaaagttaatcactcatgtgggaacgcctcagtggaaaccactgttaaagcttttggtgtgtttcttaacagtttattcccaggcattgaatttttgctttgttttgcctttcacataatgaacatgtaaaatgtgaagtaggatatgatgtaaaagttatcaataggatcaatcaaaaaaatcattttttagaaattctaaagtgaccagaatctccccctctccaacacaaaatcagtcctccccacctcccccatgtcttacacaggaaacggtgcttttaaatgtacatccagagtacaaacattgtgtatttctgcagatgttaagggaagctaaggagaaggagaagcagagactggcacagcagctcacgatggagagaaccgcgcactacgggatgctgtttgatgaatatcaaggcttgtcacacctggaagccctggaaattctgtccaatgaaagcgaaagcaaggtacttctgcactactcgtttgaaatggcatgcttagtcatgtgttgcttaaacatgaaagaaactggaaaatctgccattaaaagatctcatttttcgagcctcata

SEQ ID NO: 590551 - DNA, 303 bp, Homo sapiens
ccagcagttgagccagccggcatccaattcatttgaataaggagcgatgggacagaacggtaaagggcttttgggagacaggctaacccaggtacactaaatagtccgtgtctaacaaaccacccatttgtaggccgtccaggcttgtcacacctggaagccctggaaattctgtccaatgaaagcgaaagcaaggtacttctgcactactcgtttgaaatggcatgcttagtcatgtgttgcttaaacatgaaagaaactggaaaatctgccattaaaagatctcatttttcgagcctcata

SEQ ID NO: 590552 - DNA, 355 bp, Homo sapiens
aagattgtgccacggccctcaagcctgggcgacacagtgaagagaccctgtcccaaaagaagaaaaaaaaaggaaatatttggctaaaatttactttttacatgaatgggactagttcgaagcgacatagtaataaccttagaggacatgtagaaatggaacacatcagtctcaagattagctctgatgtatcaagtttgtgcagatagtcttaacattagtgtctcattataattctgttttacctgaaattttctgtagccttaagaaaataattgaaaaataggcctggcataaatttttcttgtaaaattatgtgcttcattatgtctgacatatccacttctgaaataat

SEQ ID NO: 590553 - DNA, 416 bp, Homo sapiens
tagcgcaccccgcaccatcctggtgccagcgtacgtgacctcggaagttgaaaaccgcgtgccagatcggcttcatgatctttatcccgtaactaatcatcgaactggtagtggcgagcgtgctgatagacatgggatatgatgatgctgtcgccgctgaatcatctcgtagccgattcaagatcatgctgatatgtgctggatggaacggctgggcgcaaatttatcggcgacgtgagccggacagtattcggaggaggtataggcgctataacgccagaagtcgacagtcaacctgtaccgtgaagcgctgaggctgaccaacatgatggtagacgtgtaggtagtgccgagcctgttggtgagcctgcatggtggcaatgttccaggccgaaacccaaatcaaagaaaagaag

SEQ ID NO: 590554 - DNA, 286 bp, Homo sapiens
ctgcctcaggttgtgataaactaacaggtactgcatataccctccaactgaaacagacacaccaaagaacaacaacaaaatcaaaaacagaaagaagaataaaatggagaacatatatgaagcaatggctttttgtttgtataagtataagtttattatgagacaaagtctcaactcttgtccttccagtgctgggagtgcgaatggcacacatcttgtgctcacatgcaacctcccgtctccggagctaccggggtacccgaggcttcgaaatttcgtaaatcat

SEQ ID NO: 590555 - DNA, 355 bp, Homo sapiens
  misc_feature (33)..(33): n is a, c, g, or t
  misc_feature (65)..(65): n is a, c, g, or t
gaaaaatagttccctgtttaaattccaccatanggccaatgagatatggaaagatgaccaagatnccgtataaacattggtttgccattttattaaattattcctaatgccaaatccttgtataaagaaccccatgatgttttgtaactttcctaattaaaatgttcaaaatgaggccgagccatggtggttcattccctgtaatctcaacactttgggaggccaaggtgggaggatcgcttgagcccaggagcttgaggctgcagtgtgctatgattgcaccactgtactgtagcctgggtgacagagtgagaccctatctgttaaaataaataaataaataaataaaaaagtc

SEQ ID NO: 590556 - DNA, 86 bp, Homo sapiens
acggccgtgtattactgtgcgaaagtggacggtgactacggaccctttgactactggggccagggaaccctggtcaccgtctcctc

SEQ ID NO: 590557 - DNA, 187 bp, Homo sapiens
gtgacatcgtctttaaaccctgcgtggcaatccctgacggaccgccgttatgcccagggaagacagggcgaccttggaaggtccaactactttccttaagattcatccaactatttgatgattatccgaaattgttcatttgtgggagcagacaattttgcctccaacagatcagcagatcccattc

SEQ ID NO: 590558 - DNA, 193 bp, Homo sapiens
cgcacagacacgtacacacacgtttcatagtaatttttcatctataggtttttcttaaaaaaaaaaaaaatccggggtggcacaaagatctcttcaattatctaaacacagcacgcaacaaacagaaaagaacgggatgtggcactttccactggcagacaggctccttaggagacagaggggggtcccggac

SEQ ID NO: 590559 - DNA, 148 bp, Homo sapiens
agctcggtaccccagggaagccaaaagattggacacccctgggctatagcaataaaatgggcacatcaaacttgtgtccacaacaactgacacacaggtttccactcagggggaagttacccttaaggaacacttggcaatatttgga

SEQ ID NO: 590560 - DNA, 296 bp, Homo sapiens
cggagacacttacgattcattttattcttaaaatagtttataaatctttatgatttttttttacaaattaggttattgatattaatcgcaaattttactggtaggtatcttcttgtttttgctatagatagattccatacttatctagagtacctcccattatgccttattcatatatcggtgaaagctattgccctctatctacataaagttacaaatggaatatcttctaggaagacagaattattacttagtctatattgtctagatgatagaatttagtatcattatttaat

SEQ ID NO: 590561 - DNA, 211 bp, Homo sapiens
aaatttggggaaacccccttttggttttaaaaggatttggggtttggggggggtaaaccggaaaaaagggtttggtttttaaggggggtttttcttcccctggggggggggggggcccaaacattttccttgggaagggaccccggggggggtcccggcctttttttccaaaaattttttttttgggtggtttaaaggtttttccctttta

SEQ ID NO: 590562 - DNA, 186 bp, Homo sapiens
tttttttgttgcatttgttttgagcttcttggtcatgaagtctttgcctaagccaatgtctagaagggtttttccaatgttatcttctagaatttttaaggcttcaggtcttaagttcttgatccatcttgagttgatttttgtataaggtgagagataaggatccagtttcattctccgtcgacg

SEQ ID NO: 590563 - DNA, 1261 bp, Homo sapiens
  misc_feature (1016)..(1016): n is a, c, g, or t
agccgccccggttcctggggatgtcttttgtttgggagaaaatgggtttgtgattattgccccaagtttcggcctttctgtgtgggggtctcccccgggactttatttgaaggtctctgggtattgtgtgcgcgcccgctggtgtgggaagagaaattggccctccctcgtccaaagaagatctttgagttttcccggaggttgccttggtgttccacagagggcgtttctcttctcgtctatagagctctactttgccccagggtctcttgtaaggggtttacacatctggcgggggaaaacctctggggggaaatttgtctcttttttattaggtctgaaattgtggcccacggaaaagggatttggaaatttgggggggaattgtgttcgcgaggtgatttctctctcacgggataaaagagagagacccctctgggggaatatatttgcgccccctctgcgcgtgtaaaacttgggggagttggagccccccccccattgtccccgctctcttcatatagagagggggtggagaaaccacgtgccctcaaacacactccgagagtgtttatatccctctgagagagagagatagcccccccgctctatgtgggcgtaactctcacacgggtgtttcgctgtgtctctggggtcacacacaggggggtcccgctggaactctctctcccacaataacccccacacacatcacagggggtttgtccccccaccacactcaaactctgtctctcttccctcttttcacgggcccctctttctttgaagaccccgcgtggaatagcgcggatatttttttctcttatattttcttattaggtgtataactcgagagctcggctcttgtgggctcccacagagattttcaccacatctctccacagcagtttgagaggagattttatagtggttctctatggagaaatttttttaaattttttttttgttaaaagaaagagaaaaaaaactaccacataaattttctaacccagggnccactatattatgccacgctgagaaccacatctttataaactcgccacgagaaattgtggttttggtgtcacgagaaacacaaggttgtaataatttttcaccgccccgagattaatgggagaaaaaaatcacgttctgtctttgtgggttgctctaactaatggaggagtccaccacgttatctgtgagctgagagtcggccccttctgtttagaaaaatattttaaaagtttagtaattgtga

SEQ ID NO: 590564 - DNA, 192 bp, Homo sapiens
gcatatggcaaggccaagcttgactttgacaagcctggtgctgcacacagaattcttattttttctttttatgcataattttttattgcataaaaaaatcactgggagttcccgtcatggcgcagtggttaaggaatctgactaggaaccatgaggttgcgggtttgatccccttggccttgccatatgcaa

SEQ ID NO: 590565 - DNA, 125 bp, Homo sapiens
ataggacatgatcttaagtcctttgtcaagtcagtgcagtggctcacacctatatcaagcattttggtaggctagatggcgggcacgttacttaagctcaggagtttgaggatcaatctggtcga

SEQ ID NO: 590566 - DNA, 384 bp, Homo sapiens
  misc_feature (292)..(292): n is a, c, g, or t
tcaacgctttataacttcaaattaacacacgataaagctcaaaaaagtccaatatttacacaggaaaaaagtacaaaattccccccaaagttcttcagtttttttttttcagttttttaaattacaaagtaataaaaagcttggctctttaattaaaaaaaaaaagggaaaagggggaaccaggggtaaataatttaggaaaacacacacacgggagaaaacaaacaaaaataaaataaaataaaaccaaaagggggtacctagggagggtggggttaatccaaaacccagnccggactccaggctcctcctcagaaggggggacccggggaggggggggaccccaggtgacggtcgggaccggggaagtaatttataactcca

SEQ ID NO: 590567 - DNA, 436 bp, Homo sapiens
  misc_feature (19)..(19): n is a, c, g, or t
tctagtgtcatgtattacnaaacaggtatatttaggtgaacatacaacttcacctttacaaaaaacaaacacacacacacatttctggttataccggtaagccaccatatctttacccaaaataaagaattaggggttctgtccaaacactggcaggcagagggagtggacggcaccaagggacccgggcaacaccaacaacacagacagaagcggccatgcatctcacgtgccgcgtgggaacacagcattctaggtgtgcactgcggggaaacaagttgtcactcagccacaaacgggctctggggcaggtgccgcagggacggcgtacgattggttgacgcatagttctttcaaaatggcttaaattaacaaataaagcagggtaagggagaaacacaaagccagaaacatttaggaaatgatgcataggtag

SEQ ID NO: 590568 - DNA, 350 bp, Homo sapiens
aatctgctcccaaaagcttgaaagccaatatgaggccaggtggtggctcatgcctgtaatcccagcactttgggaggccaagggaggcggatcacaaggtcaggagattgagaccatcctggccaacatggtgaaaccccgtctctactaaaaatacaaaaaaaattagctgggcgtggtggtgcatgcctgtggtcccagctactcaggaggctgaggtaggagagtcattgaacctggggggcggaggttgcagtgagccgagattgcaccactgcattccagcctggcgacagagtgagactccatctcaaaaaaaaaaaaggccaatttgattggggctccttcct

SEQ ID NO: 590569 - DNA, 991 bp, Homo sapiens
  misc_feature (1)..(3): n is a, c, g, or t
  misc_feature (6)..(6): n is a, c, g, or t
  misc_feature (9)..(10): n is a, c, g, or t
  misc_feature (360)..(360): n is a, c, g, or t
  misc_feature (513)..(513): n is a, c, g, or t
  misc_feature (640)..(640): n is a, c, g, or t
nnnccnttnngaatatttatacgtttcgtcaagtggagtgcgaagatggtgtgaggtgcgagactaggacctgcacagcgcgccacgagtcaacaagcgagagtatcaactagatatgtgagagccgacgaagagatggcgatactttgtggatgaataagaatagaagtaggagggaagataaatgaaagtgagggacgaagcgagccgacggcgtctgcgacgaagatcagtattcaactcatcactccaacactcactcgctcactctgtcacgacgcgatacaagctctggataatatcttatatatagcatatctcacattgaaatattaatggtagtatatatgttgatgtatntatacattaattatgtatgatatgagtacgatgttgatgtatgagaaggatagaggagtgaagaggagagatagcgagttcgaacgtgagtgatcataaaggattctcgcggtcgaacacaattagcgagtgttcgacatatcgctgctaatntagtattatccatcatctctactactttattcaatatgaattattatgtgcagtgatgaataagcatgacgttgttgatatactcgtttgatagtaattcaaacaggaacaagaagacattcattangtagtgttagaacatagattatgagtatctgtatttgtgcgctatacgttgtatccgtttagtcgtaataagatgtgtgacgttttactctatattactatagttatatatatatcatctgctactaatactagatagaaccgcaatttaagacgctgtgtatatgtattgactttctgtaaagatttgattgaatagttcgttaggtttagttttatcatgtatgtagtatagatatggtggtaggaagagtactgtggaacgcggtactggtattgttttgtttctgatgtctgtgctctcgaatggttcacgcattcacgccaagtatccacatatgatcttaatgtt

SEQ ID NO: 590570 - DNA, 1383 bp, Homo sapiens
  misc_feature (55)..(55): n is a, c, g, or t
cctcagccattgtctcgaagctggaagccgtcgcgaagacgctgaatctcagggntgaggaagaaggataatggtgttgtcaagatgcaagtgaggaaggaaggcaggaatggtgttcttcagtttgactcggagatctttgagatcagcccctcgtaccatctcattgagatgaaacaaacaagcggcgattcactggagtaccagaagctattggaggagagcatccggccagcactgaaggacatttgtctgggcatggcatggagctgatggtcagcaggagcctcaagggtagatttagatgtctcacttattatgtttagttctgctttttttttcagctcgagtaattgtgttatatactctaaaaaaaaaaaaaaaaaaaaaaaaaaaaaaaaaaaaaaaaaaaaaaaaaaacaacaacaaacaaacaagcaaaaaaaaacaaaaggaggggcggggcgcgcacaagataatcccgccggagggggaggcgcacaagtatttgacggcaacacaccagatttttgtggacaagaggggacgccccactaaggagagcgcgtctataaatgacgacgagcgagagcggcgagacaccagattaatacaaccaacccagcccaagaggggaaaacacacgtgctacacggtggcgacatactgagtgaaaagaagaacacccacacaacagggcgggaggaggaacacaaaatgtggagcaacacaacaccccccacaaaaaatattaacaccccccatgagggagaaataacaacaacacatcgagaagactataaagctcgttgtgttaccaccccccaccggtcatataatacgcgtcgggtgcgcgagaaagaaaattatttggcttccaacacaggaagtatattataccagagcaaacctatattaagccgggggcggatctagtagatcacaataacacgaacgtaactctagtaatagcatagtgcagtcagacgagcgcacatcgaatagagacaacgcgcactaagactgacctacgtagtccagtcattaaattaattacgaaaacaaataaaaaataattctattatcagtccaatcatctaaaaatccaaccaaacacaccctaacaaacaaaacaacacacaatattccagatcactacaatcaactattcaacacaccacaaacatatgaatacagcccacccataactatacataccgtatacaataaacacattactcactcaacacactctaactattataaacatacaacaatagcaataatacttaataaaacacaacttcgaactacgtaaaagcaagatacccatcctatcaccatatcatacactatccacctagacgctgaataaacaacaaa

SEQ ID NO: 590571 - DNA, 217 bp, Homo sapiens
tatatgggtgtataccgcggaggtatatcagtccagtcaacgagccgttacagtgaccctacgaacaaaagcccccaaatgccaagagactttttcttaacctaaaggaagaaattatttgttaattccacgtagagcaactgacatatactagggctattatgtacttgttgtataggagaacttgaataataacttctttaacaaatgagctttt

SEQ ID NO: 590572 - DNA, 103 bp, Homo sapiens
gactcatagaaggactccccgctgactgtgccgacttcttgacgaactgactgcgccggtgaacgcttcacggggttggactgacgacactggctgttactac

SEQ ID NO: 590573 - DNA, 426 bp, Homo sapiens
  misc_feature (343)..(343): n is a, c, g, or t
cgatccttggtagccttaaccctcagcagttgggattaaggcttcacaagtctccttcagagaacacaaatcttttcttatccattcctgtttggttgctacgtcaatctccccctccccagagatgccaaaaaaatcctttaatggtatttgggagccaaactcaacttgttaaaatctcaaattatggagacaatcagcagacacaacctaaccccaattattttggcaggaaggttggtttagaggcagatccagcaatctgctttgggccactctggatggggtaggtgaaataagattggtcactgttaactaattttaatattggattggccattgnttatcactgattaccattctcccctggattttcacccaggactcaaaacttggttctgctaaccctgttcctttatgaggaac

SEQ ID NO: 590574 - DNA, 275 bp, Homo sapiens
  misc_feature (6)..(6): n is a, c, g, or t
  misc_feature (17)..(17): n is a, c, g, or t
  misc_feature (83)..(83): n is a, c, g, or t
  misc_feature (113)..(113): n is a, c, g, or t
  misc_feature (120)..(120): n is a, c, g, or t
  misc_feature (141)..(141): n is a, c, g, or t
  misc_feature (264)..(264): n is a, c, g, or t
  misc_feature (268)..(268): n is a, c, g, or t
aaaaanacaggggaggnaaaggacactttagatggtagttttatggtggcttttactctgtctgtaaccaaagtgtctttgtncatgcaatgaaatgttaaccctatgtctanctttttnctgcatgacttcttaaatgtncaccttaatgccttaattgtccctaacttgtaatatttttgtattaaatttttttaggagttcccttgtaatttctttacaatttaaaatatattaaacacaaagtgtttagtaaagtacagnaagnaaaatta

SEQ ID NO: 590575 - DNA, 582 bp, Homo sapiens
catcattctatacgacaaatgtttcttctaacaaccccacaatatcaccccttaccacaagacctcccttcagcttaatctctcccactctaggttcccacgccgcccctaatcccgcttgaagcagccctgagaaacatcgcccattctctctccataccaccccccaaaattttcgccgccccaacacttcaacactattttgttttatttttcttattaatataagaaggcaggaatgtcaggcctctgagcccaagccaagccatcgcatcccctgtgacttgcatgtatacgctcagatggcctgaagtaactgaagaatcacaaaagaagtgaaaaggccctgccccgccttaactgatgacattccaccattgtgatttgttcctgccccaccttaactgagtgattaaccctgtgaatttccttctcctggctcagaagctcccccactgagcaccttgtgacccccgcccctgcccaccagagaacaaccccctttgactaattttccattaccttcccaaatcctataagatggccccacccttatctcccttaactgacctcggttttcga

SEQ ID NO: 590576 - DNA, 395 bp, Homo sapiens
atcagatagtcaccacgtgttcatctttaacaaatcccataaacataaggattagctgtgtgtgtgtgaaaaactgtaaatatgtccagtagcgataaaactaaaataactttgattggttgataagtttcctaaaatgtggaggtggattcaaaaccttaggagaatagcagaaatcaaacttcatgcaaccagttcatttgggggctatccttgttgaaatgtatgaacacaagaggctcagcagaaaggactatggaagcaccaataatgtatcactctctcctccctccctgacttaatgcaaaaccatgtgtatttagtaccccgtccgtatgttaaacgatttcctatttagtgggtacattctggcactcatttggtagctattacgg

SEQ ID NO: 590577 - DNA, 296 bp, Homo sapiens
gtattttaatacccagtgtgttaataaggccctttattcagatgattaactcattgtcttatctttactgatttaaaatggcatcttcaccagaccctaaattttcatttgtacacagttctgcttctatactactcttatctattgtggtatttgattattcacctctgtaagagtatgtttgatatttggtaaggcaaatactccttcctttttaaaaaaaatgttgtaatagtttcaggtcagaagtgatttggcaaataataaaaacaaataaaatgtaatgaatttgtcct

SEQ ID NO: 590578 - DNA, 397 bp, Homo sapiens
tgactttcttgaaatggtctatgtctaccctcatccttctcctgattccacacgggttaatctaatatgtatggcgggctacttctatcagatgtccatggcttcttcaaaatcacatgtctatcagaaactcaatatattccattatatccttatcacccaggtattaagccctcagaatcatgattaatctttcttctctctcatccactgcatatccaatgaaccaacagatatattctaattcttaaccttttttctcctgttcccatggcagtggtccattccttcctgtcccctgtaccaactggtacagctgactccctgctgatcttgctggttccaccactggacccatcttgagtccgttcacattgctgtgagggtccaattccta

SEQ ID NO: 590579 - DNA, 841 bp, Homo sapiens
ccatctggaaggagcagctggacttctttgtgcgcctagtgctatgaggtggtggctcctgacctggccggccacggtggaccatgctctgcgccccaggtggccgcagcctacaccattctatgactgctggctagaggacatgcagatgacaatcttctaggtcgctatgccaacgaagcgaacatgtgctcattggccattcctagcggatcctgctcctggcattcctgaagctcagtcgtacgtacgggcaggccgacgatggctgatgctggaatgccctgagacggtcaagcacgctgctccacgaattcctgctctgggtagcccgagccctcgcccaaggctctaccggagccactgccggcgcctccagaagacaagaagtagccgctgggccggcggggcatcgcttggtgagcacagccgcagcaggaggaggcccgagcctgcgccaggtctgcagcgcagtaccatcctgggcgtggcctgttcgctccgtgtgggcggcggccaggtcagggagacgcccccaggctgcctggcgcggggctgtgtccatccgagggagcccattggacattccgctctccgatttccgtcccgccggggcccatcggcgtaataggggccgaagccggggacctcacggaaggatgaccttgtacagaagctctcccataagctttcccgacacaatgccaggagcaaaggcagaggagcgccaatgccggtgatcttcagagaacagccagagcttagacctgggacccacagaaccccaccagggaaacctcgaggcccacagaccgggaagaccgagacacaaacaaaaccg

SEQ ID NO: 590580 - DNA, 305 bp, Homo sapiens
ctgaccagaggatcccgtgatgttatcgcccaatcacagaatgatcttggcttgggtacgttttcctgcttgtgtaattttgataaataagacgttaatactgttttaatgaaaacagttaaatattgaattatttagtaaaataaccatatatttaatcttaaggtttctactcacctaaatatctgaaattcacaggctataaaatggttgacagggaaataactttacatgatgactcacagttttcataaataatgcaggtaaactattagtataaaataattaggtgtaggggataacat

SEQ ID NO: 590581 - DNA, 597 bp, Homo sapiens
gccaccttgcctgtcccagccccagcagtcatgggtacatgggtccccagctcacctatggattgccgccagtctgcccagctgcagtactcacgccccatgggggatcttggtctgacattcttgtgggagcctagtggagagcagacgtggctttttatgtgtcttgctggggaggtgacttgcatgtgggggacaaggctgtcgcggcaaccttggaatcgagtttgagactaaaggaagacatgagatccctggcttgtccccatgttgattccggacaagggcacaaaggaggcatggccagggacctctgctggccttactcaacagtggtactcatacctgcccacctgccactgattactgcaagggcaccagaggtatgagaaagccgtcctcatgacttacgctttcttattgtagctaagagccatctgaagcagcaggttgctggacaaatgctttagctcgccgtgagcagtaccgtgtggccaagaggtggactcagagccttccttgagctctctgtcaagcgggacgcatgatgttccctcaggactccagtcagttcgagttgaccctcagatactgctt

SEQ ID NO: 590582 - DNA, 262 bp, Homo sapiens
cttgctgcaactggtactgcccattataaaataaacactatttttggcatggcgtggtagcttagacctataatcccagcagttcgggaggtcaaggtgggcgtatcacttgaggtcagtagctggagatcagcctagccaacatggcgaaatccgtccctactaaatatacaaagattagccaggcatggtggcacatgcctgtaatcccagctacttggcaagctgaggcatgagaattgcttgaacctgggaggcggag

SEQ ID NO: 590583 - DNA, 207 bp, Homo sapiens
aacaaggagttggggagacaagctggtcgcacacacacgtgaggtgtgcgccccgtcgttctgcccactccaggcggctatatttatagaggacagacaaatgtcactgcaacaggcggttctgctcccccggagttcttcttcctcatacccgtgggtggttgtaatgacccagggaccggcctctcccccacaatagcagaaaag

SEQ ID NO: 590584 - DNA, 1137 bp, Homo sapiens
agactacgtggattttcaacgtactggttggggatgggaactcgtgcttttctttaacaccttcacgttatacgacgatgcttctgagagcgttaggcaaaagcagaaactacaatactcaggagcaaccggggaaacgctttataacccgactcatggtggccactgttgcacgctttgaacgactgacgtgctggcttgaacagttctttgcctgcactcacttgctagctgcactgaacaggaacaaacacctttcaccttaagcatttgacaagcggccgaccaccctgggctctggtcttcagtggcatttagactgagctgcttaagacagaacagaagtaatacgcatttcctgccataggatagggacaccatgtacacaagctggctctgctcttgacggttaccgaacacattgtctgtatctctgtgcgactgaacgctgcgactcacttgacccactggagacgtcggctctatagtccgacctactcgggacatcaagactatctagtagccaaagtattcaagtcgcaagccagaggttcccatttgtactggcggctacaattcgactaccaaacatgagtactaataggaactcctgaatccataaaattacagcttttctggcatattcaaaattcaccaaaaatctccccagtgggtgcatgacttgttactaaaccacttattggagacaccatcaccggtcaacacctggtctgtttgcccttgcccatttccagctgacaggacctggtggccatctggtagacaccagccttggtgtcggctgacacactcgccccgctgacgaatcaccccaggagacctacacggccgacaagagcaggcatacaaaaaaaagcgaaaacagagcaacgcgcaaccaagacgagccaaattaagacaacactcgcagcacaacataacaaatctagcaacaacaactccaaacaacccgccaacaaggtacgaacaacacaacataactcaacaaacgaaaacaataactctaaaataaaaaatcctaaatgaaaaaaacaactccccaccatcatcctaccagcacacaaccaaacataaaccatcaaactgcatcaatccctcctccttcttctcttatct

SEQ ID NO: 590585 - DNA, 396 bp, Homo sapiens
gcaccccagcgcgagcccttaaccctggaggtggaggttgcagtgagccgagatcacgccactgcactccagcctgggtgacagagtgagactctgtctcaaaaaaaaatgaggccgtatcaggttcgaaaaggaaaagatcgcacgttgccataattgatagaggcttagagtgcgcatatggagcatccaaaagaatgcacagatacttcatccaaattaatagggaaggaattcagctgggttgaaaaaaatgaatatcattcataatagcaccaaaaactataagactatagaaataaatatagcaaaagatatctaagaccattatgaaaagaattttaaagtgttaacataaaagatctaaataggaatgcactagcaagatggcgaggg

SEQ ID NO: 590586 - DNA, 404 bp, Homo sapiens
gcctctcaaaatgctgggattacaggcgtgagtcacagtgcccggcttttctttctctctctctcgctctttctctctttttatttctctctctctctctgtgtgtgtgtgtggcctctctttaaaatagcagctatatctaacttaaaaaaagtctagtctgaaaaatctttgccttttaatttgaaagtttttccctttaagtttactgcaattgttgatttatttggatttattttctaccaccttattatagtctattgtatttcttctgctttttctgtttgctcttctcttccaccaccacctacctcttggctgattaatggttttgtttttcctcttcttctagttttttcttcttagaataactattctatgtctctataagaatatctattcta

SEQ ID NO: 590587 - DNA, 135 bp, Homo sapiens
atctagaggatccctccttgcagacaggagactggcgtcttcaggagagagcagtgcttactgtgagcgagggaagcagtgggatgagtgtgccgggcggagcgaagtgcgtgggttccttgcagacgctttcag

SEQ ID NO: 590588 - DNA, 451 bp, Homo sapiens
tcgtgtgcctgcctggtagatgtacatgacagcagctcagatgagcttctgtcacagtaacttttctactgaacagatgatactaaactctcagctgtgtgactataagcaacttgcccagctctctgtacttcagttgcctccatcttcaactggggattacaaagtgttgaccactcatagtggttgtgaggattacatgatttgatagtttataaagcacttagaacttgtgaagaagagtgcctggggattgcctaaggtcaggagttcaagaccagcctgggtccacatggagaaacctcatctctgctaaaaatacaaaaactaaaccacgcatagtagtgcacacctctagtcccagctacttggggggctgaggcaggagaatcacttgaacctgggaggtggagattgcagtgagccaagattgcgccactgcactccagtc

SEQ ID NO: 590589 - DNA, 255 bp, Homo sapiens
acaaggaataaatgcctgatccttcctcaaaattcattaaccagagaagcctgaaactgtatgacagaggaaaagactaaaaattaaatatcacacctagagagctcagaggaactgtgcccagactatggtctggttctcagatcccattcagtttccaaagagaattatttactaaccattgtctgtgtactgggcccattcattcttccttaagatcatttactgcccttcaaaatggcgtcagtatagata

SEQ ID NO: 590590 - DNA, 966 bp, Homo sapiens
caaatacacagatactgctcagttgggaatcacgcatacctaatgtgcagtttatgaatcttgtcatttaaatttgggatgggcggggggtatctgcgcagctcgtgtggaggacgagattataatatggccatggcgctgaggtctgggcttctgatggtcccgtgcgttcaagtgagctagagcgcgctgtgcggaaaggttcaagggattctcctggctcagactgcccaagtagtccatttcattcttcacctctggatccttcaccagctaaggcgggtcttcggaagaattgcctgcaccacccttcgccatcctaatagtactatctggcaatgagccatcagttatggactgatgagtagggagggaccaactggagaccacattcatttgccaagatgtgaaggcttgggatccaaactcgctggttgatggaaggtgattgtctggacgctctgaggttgattaaaactggtggcagctggatacatttgacatcgccagcaagaaggcttatctggacatattcctgccaggtgaacaggagtctttagaatcgaacattattggcatcagacactgtgacaaggagttcctataaagctagtacggggacctggaatactgcggttgggccaaacccaaaaggagcagaggcaggaggttagaagcttttccggaaaaggacgaaacgtcgcacataggttttttggaagcttgcccggaaggtcggcctcaggataccgcaggtgagtcctgtgcctggacacgcagaaaaaggccggagcggctgcgggcccaagtagatgggcgcttaccggaaagccaaccggaatggtccgtagggcaccggcggccaccggcactggcacgggggcgcaaccagaaaagcgcacggggcgagaggggcggaccactcggggaaagacacatgggcaacgtgtctcacggcgtccactc

SEQ ID NO: 590591 - DNA, 232 bp, Homo sapiens
ccgcgtagtagctagtcagaacactgatcaataaggtcagataggtcatggatgtagtacgtgaagacgggaggcgatggttgtctccaaagcacagcaagtactcattctgggcttggatggccttcagcttattctccgggtacttggcttggcgcttctccttcatcttctcaatcctcttcattgagctcctccggacagtgtttctcctcaatgcggacattggccg

SEQ ID NO: 590592 - DNA, 1179 bp, Homo sapiens
  misc_feature (196)..(196): n is a, c, g, or t
  misc_feature (284)..(284): n is a, c, g, or t
  misc_feature (324)..(324): n is a, c, g, or t
  misc_feature (439)..(439): n is a, c, g, or t
gccaaaatgggtacaatggtacaaagatctcatatcaacattgtcgtcattggacacgtagcacttcgggcaaggtccaccacttacttgtgctcatcttgatctatattcatgcggtggcaatcgacgaaaagaaccgattgacaacaatttgagtaaggcaggctgcatgagactgggcaaagggcttccttcnaatgtagtgcctgggctcttgagactaaagctgtaaagcctgagtcgttgaaccgtggatatcatccattgtgagtactcttccttgntggcaaacctttgtagcaaccagtcaacgttatctattgntgtactactcagttgactggccccacggacatcaagacgacatttaatcaacaaagcaatgatttacaggggtagcactcgtcacggcttgatcgtgttgcttgtccgtgagttngttgcgtgctgtgtgattggtgaatttcgacacgctggtagtcgtccaagaagtgggcagtacccgatgagcatgcccattctggctgtacacactgggtgtgagaaccaacgtaattgtcggggttaaccaaatatggattccacatgagccaaccgtacatgtcagaagacgatatgaggaacatcgttaaggaagtcagcacttacagttaagaaacattggctacgaccccgactgtagtagcatttgtgccaattgcgtggttggaatggtgacaaccatgctggagccgacgtgcgtaacatggcgtaggttcacgggatggaacagtcccccgtaagggatggcaatcgcccgtgggaacaaggctggtagagggtcctggattgcattcttaccacaaatacgtccaatgggcaaggccttttggccatagctctcccggatgtttacacaagtgcgggcaccgggacagtcctgttgggccgagattggaacacaggcgggtcctacaacccggcttttgtgggcccccattggttcccaaatcagttttaaccgagcagtactactgcgcgaatgtgcacaaaattttgtgtagacacctctggggacacggagcactcgatacaaagcgttatgaagcagtcggaagacagattgacaaaaagtacccgtgaacagtctacacttcacatacgatcaacagcaagcacacactatgatgtagcacatac

SEQ ID NO: 590593 - DNA, 105 bp, Homo sapiens
tagaggaggtggacagcacaggtaggcacgctacacaggcacagaccccacgcacccctacacggggcaggcagctcacacaggtcacagacccctacgcacccc

SEQ ID NO: 590594 - DNA, 105 bp, Homo sapiens
atgttgatttttatacgcgcatctttttccaatcacaatttcaccaccctccatcccccatttcccagtctgcattcatacacagtgctacaagtggcagaacag

SEQ ID NO: 590595 - DNA, 260 bp, Homo sapiens
cacgagcgccatgtagctggattccaggttgtacaccactcctggctgattttggtattttcagtagagaagcgtttttccatgttggccaggctggcctccaagtcctgacctgaagtgatccacccaccttggcctcccgaagggctaggattacaggtgtgagccaccacacctggcctcaggtaatattcgatgaatggtgagagagggaagagggagaggatcaggaaaaattataagtacttcgggcgctcgtg

SEQ ID NO: 590596 - DNA, 263 bp, Homo sapiens
gtaaaattttcccttttttccggggggggcggaattgtcccatttttttcccccttttttttttcaaaaaaaaggccttttttttcccgggcctttttttccttttttttaagggccggttgggaagccattttttttttttttcgtttaaaaaaaaccttttttgggcccaggggcccctttttttttttaaaactttttttttttaaaacttttcaaaaccaaaattaaatggttgagttgaccccccttttcccccccca

SEQ ID NO: 590597 - DNA, 317 bp, Homo sapiens
ctgattctatgaggatcatttcgagtagtggatcagaggaggtagaagggttgggtccggagaactgctgcggttactgttgctgctgctgatgatgtggtgtggtgatggtggtggtggtgtccagtgaggctgctgatgatggtgctgctgtccagcagggcagaagactgcagtggccgggtgtccagtgttgttgggcccagatgggagtgaactgagctcaccactgtccttgctatcagtcccagggccgccactcactgtgatctcagctgctggggcagccattccctggacttctgcacgtgcaggga

SEQ ID NO: 590598 - DNA, 765 bp, Homo sapiens
cataataggataggaagagcctcatatgatctgcagcagctcatattccttctgaaggaaactactacctaggagaatctaagctatagcagggagtgatttatgcaaatttgagactaggcttcttagtgtcacaattcagttcctcgcaatgcaagccagtcttcatttcaatgagggccacactgcgaacctctagcttaacatgagataacgaaagactggctcaggagcagggcttgcctcgaggcatggtggatcaccgggaggtcagtagttcaagaccagcgctggccgaacatggtgaaaggcgcacctctagtaaaaatagtgtatatcttggtgtgtcttccgtgtttatgtgtgccaagggagtattttcagaagagttcaaaggagacacaattaagtcagagatggagcaaaccagtgccatccagtctttatgcagaagtgaaatgctgcaaagggaaggagattctgtatatgctggtaactacgccggcaagagcacatgggtagcagggaagaagtaacaaaaagagaaggagaatactggaagataatgcacagacatgaagggactaggttaaggagttaactagcccgttgtacaggattaactagttaaggcttaatagcagcaagatattaaatatgctaacatagctatggaggaattgagggcatgcacccaggactgatgaggtcgtaacaatagaccaagtgtggcgaagaaagaatgcaaaaacgacaaaataagcg

SEQ ID NO: 590599 - DNA, 176 bp, Homo sapiens
taatggacttgggatttttggtttaaatgggcctcctggggatggggtgggacccttagctttttagcctccttttaaagtaaaaaggtactggggcctgtttggtaaaccctttttaaaagctttggttttcagttttgcctttattaactttccccccccctgcattcaggcca

SEQ ID NO: 590600 - DNA, 228 bp, Homo sapiens
ctgaagatcatcatcaacgcccagtccctgcgcattgccgagtattccttcaagctaggcgcccgacagcgggcgcaacggaagtagacaggcgtgcacaatgccaacatcatgaaactgggcgatgggcttttcctccagtgctgcacggaggtggcagaccgctaacctcagatcaccttcgagaacatgattgtggatgagaccaccatgcagctagtgtcccgg

SEQ ID NO: 590601 - DNA, 293 bp, Homo sapiens
ttcaattaggttggccgagcattttgtggctaggtagacctttgtttatcgatggcagaacaggcttctctagagggatatcaagcaccgccagttcctttgagaagcaagctgtggctcgtagcgttctggcgagcaggtttgctgatttaactatggagagttagagctaagcatagtgaggtatctaatcccagtttgggacttagctattgtgtgttcagatatgtgaaagccactttgcgagtctattttgagtcaactggagtttcttacaactcaagtgagatcta

SEQ ID NO: 590602 - DNA, 343 bp, Homo sapiens
gacaattgacaatctggactaccccaagatggcacccaagtgtttggcttctggctacctaaggttaacatgtcactagagtatttttatgagagacaaacattataaaaatctgatggcaaaagcaaaacaaaatggaagtaggggaggtggatgtgacacaacttccaaattggctctttggaggcgagaggaaggggagacttggagatagttttgctttggggtagagctctagatctccagcatccgcttcccttagcagtctctgtctcaaccagagtgatgagagaaccacagagactagaccctgtctagaggatgtattgttgctaattcgtgc

SEQ ID NO: 590603 - DNA, 112 bp, Homo sapiens
tccggcctaggctgcggcgagtaggagaactgggggaagtgggtcgctggtccagctccagtaagcccaaggctgtcatagcggtcagggggtgtgattgtgatggactggg

SEQ ID NO: 590604 - DNA, 883 bp, Homo sapiens
aacatcctgcaatacacaagacagtccccacattgcccccccccccaaaaaataaattagcttagccttaaaatgtcagtagtgctgaggctgagcaacaccttggattaacaggtttcactgctgatgggaaactttttagttttttaaacaggggccttgcatctgttgcccaaggctataagtgcaggtcacttgagattgattacgcatgcatgtgacaggtctttgaaacttcccgtgaggtttcaaggactaagctatccgtgttactacgaggccttcccccaggaagaagcgtggaagagctagaccaagtgccaaaacgcactaattctccacagtgtaaattttaagaaccactattttttggcggacaaacactgctgggtgctcattaccgctggtaagttcaggcccacaagtggaggtgggtttctggcgaaaaaacgtcattttaacgcacatcaaaagttagaatcccaatgttcacaagttcgtgggaccccagtaccacaataatagcaccacaaacgggtattgtgacggaggacacatgttagacgattatataggaccgcttgtgcatcataccaccacacacgataacgaaacacaccccgtgcacgctgtgagtaaccacacgacacccaaggtaaacacccccccggcgaacaggagacaaaagaccccagagaggtggtaccaagagcgccacttgccggcgaacacgggaggcacgaccagataggggtcacccctggagcagccgacagatcccctcggtaggaggaaacagacggtacagccgctagaaagcacgcaaagaccccagcagggaggggaaacagggaaaaaatccccccagtgtgggggcccagac

SEQ ID NO: 590605 - DNA, 282 bp, Homo sapiens
acattcccttatgacaaagcctaatccatagcaaggccctaactctgttcagtgttatgaaggctgagagaggtggggatgctgcagaataaaagttgaaagctggcagaggtcagttataaggtataaggaaagtcacccccataaaagtacaaggtgaagcagcaagggctgatatagaaattgcagcaaaatctccagatctagctgaggtaattgatgagggagtttacactaaaacagatttcagtgtaacgaacagcttctactggagagatgcca

SEQ ID NO: 590606 - DNA, 2028 bp, Homo sapiens
  misc_feature (5)..(5): n is a, c, g, or t
  misc_feature (7)..(7): n is a, c, g, or t
  misc_feature (10)..(11): n is a, c, g, or t
  misc_feature (1836)..(1837): n is a, c, g, or t
  misc_feature (1844)..(1844): n is a, c, g, or t
  misc_feature (1847)..(1848): n is a, c, g, or t
  misc_feature (1869)..(1871): n is a, c, g, or t
  misc_feature (1875)..(1875): n is a, c, g, or t
  misc_feature (1887)..(1887): n is a, c, g, or t
gacananggnnaggtgaggaggctgcgtctggctcccgctctcacagccattgcagtacattgagctccatagagacagcgccggggcaagtgagagccggacgggcactgggcgactctgtgcctcgctgaggaaaaataactaaacatgggcaaaggagatcctaagaagccgagaggcaaaatgtcatcatatgcattttttgtgcaaacttgtcgggaggagcataagaagaagcacccagatgcttcagtcaacttctcagagttttctaagaagtgctcagagaggtggaagaccatgtctgctaaagagaaaggaaaatttgaagatatggcaaaagcggacaaggcccgttatgaaagagaaatgaaaacctatatccctcccaaaggggagacaaaaaagaagttcaaggatcccaatgcacccaagaggcctccttcggccttcttcctcttctgctctgagtatcgcccaaaaatcaaaggagaacatcctggcctgtccattggtgatgttgcgaagaaactgggagagatgtggaataacactgctgcagatgacaagcagccttatgaaaagaaggctgcgaagctgaaggaaaaatacgaaaaggatattgctgcatatcgagctaaaggaaagcctgatgcagcaaaaaagggagttgtcaaggctgaaaaaagcaagaaaaagagcaaaaacgaacggaacgaggacggaacgactgacggacacgactgaacgacggactgacggacggacggacggaccgactgacacgaacgactgacacgactgaaccgaacgaacgactgacctgacctgactgacactaacgttggttctagcgcagttttttttttcttgtctataaagcatttaacccccctgtacacaactcactccttttaaagaaaaaaattgaaatgtaaggctgtgtaagatttgtttttaaactgtacagtgtctttttttgtatagttaacacactaccgaatgtgtctttagatagccctgtcctggtggtattttcaatagccactaaccttgcctggtacagtatgggggttgtaaattggcatggaaatttaaagcaggttcttgttggtgcacagcacaaattagttatatatggggatggtagttttttcatcttcagttgtctctgatgcagcttatacgaaataattgttgttctgttaactgaataccactctgtaattgcaaaaaaaaaaaagttgcagctgtttggtggacattctgaatgcttctaagtaaatacaattttttttattaagtatggtggtcctttccataggtctgaaatttttcttctggaggggaagctagtctttggctttggcccattttggaattcacatgaatttattacaggggtttatcctttcatatagttagctaataaaaagctttggtctacacacccggcatatcataatggggggtaaagtcaagtggagatagtttccatccataactggaacttccaaaatctggatcagttaagaaaatttcacatagcccatttacttttacaaactggaagagtaatcaatctactcaaagcatgggattatagaatcaaaccttttggaaagtctgtccttgaaggactaatagaaaagtttgtcctaccctttacatgaggactctattctttaactcccattaccatgtaatggcagtatattgtgcagtccccacattaaagaagacctgagaatgtatccccaaaagggtgagttaaaatacaagatgccatattaaattttggtggacataagtctcgctgaagactatgaaatgcnngctatanganngtctttcccatttatctaaannntggnctgtcaggaaangagacttccttacaagtatttcaatcacgtgggccagctttcaaacaaaaatgccctcaaaaaggtatattcccaatataggttgcccttaaaatccagtgaaggagaaaagacattggtcccgtgattaatatgaaatca

SEQ ID NO: 590607 - DNA, 332 bp, Homo sapiens
  misc_feature (49)..(49): n is a, c, g, or t
  misc_feature (291)..(291): n is a, c, g, or t
ggttgcagtgagccgagattgcgccattgcactcccagcctagcgatgncgcgagactgtgtctcaaaaaaaaaaaacaaaagaaaaagagaaagaaaatgcatttgggggatcctcagaaaaagctactaattacactaacgggctggcaaccagctgtgttatccacattctagggttgagtatcatgacacaccatagtttaagaccatctgggctgggcacagtgcctcacgcctgttctcccagcactttgggagccaaggcagaaggatcacttgagtctaggantggagaccagcctgggcaatgtagggagattccagctctat

SEQ ID NO: 590608 - DNA, 924 bp, Homo sapiens
  misc_feature (3)..(3): n is a, c, g, or t
  misc_feature (287)..(287): n is a, c, g, or t
  misc_feature (295)..(295): n is a, c, g, or t
  misc_feature (303)..(303): n is a, c, g, or t
  misc_feature (310)..(310): n is a, c, g, or t
  misc_feature (313)..(314): n is a, c, g, or t
  misc_feature (319)..(319): n is a, c, g, or t
  misc_feature (322)..(322): n is a, c, g, or t
  misc_feature (325)..(325): n is a, c, g, or t
  misc_feature (340)..(340): n is a, c, g, or t
  misc_feature (344)..(344): n is a, c, g, or t
  misc_feature (355)..(355): n is a, c, g, or t
  misc_feature (403)..(403): n is a, c, g, or t
  misc_feature (462)..(462): n is a, c, g, or t
  misc_feature (464)..(464): n is a, c, g, or t
  misc_feature (469)..(469): n is a, c, g, or t
  misc_feature (488)..(489): n is a, c, g, or t
  misc_feature (498)..(498): n is a, c, g, or t
  misc_feature (512)..(512): n is a, c, g, or t
  misc_feature (526)..(526): n is a, c, g, or t
  misc_feature (529)..(529): n is a, c, g, or t
  misc_feature (532)..(533): n is a, c, g, or t
  misc_feature (538)..(539): n is a, c, g, or t
  misc_feature (541)..(542): n is a, c, g, or t
  misc_feature (548)..(548): n is a, c, g, or t
  misc_feature (555)..(556): n is a, c, g, or t
  misc_feature (584)..(584): n is a, c, g, or t
  misc_feature (655)..(655): n is a, c, g, or t
  misc_feature (923)..(923): n is a, c, g, or t
cangtgggaaagtcataagctcttcccccacatcccccaacttcattccccacacacaccacagatagtttatgagctaattctcaactctcctggtgcacgtatccaggactctattgaattatttatgaagtcaggcctcaattcccaatagtttaaagtaatgaaaaagaaagatatgaggaaatacattcaataagcaaaaataaaagaactctggaatctgacatatttcatgttatgaaagtaatggctgacataatgtacagggacattaaaagtgagtnagtaacanacaaaganatcagantgnnctgcnggngcntccagaataactgcnagtnttcctggagtnttcattctacatctactcttcgaggttctaacagagttatagcttctnactgcgtacctgagattagaatcaggttaaaaatgcttaaaacactttcaattatgtcngnggggngagatgagaacaaaaaagnngcccagggngagagataagagtnatgagcaggacagnacngtnnggggnncnncatgtnaaaatgnnaaagaaatgggactgaaccaaaaaagcnagggggggaggggagcgggagggagaactgggagagagaagttctggcccttcctgtgaagagtccgtgtnaccctgtgtaaattctctatgagacccttctaaggggctacagtgttcatgttatcttcacaggttcacccaacagtaatgataaccaagtggcaggcaaatcccagtgaacacagtaagaagtcggtgatttctttgtcatctttccttagagagggcacatacactggaaatgtggccaattccgctggctgagccaaatcaatctgtggtagaaaacacccaaaaatggcccctactcactccaggggggaaaaatatacaaaanc

SEQ ID NO: 590609 - DNA, 2020 bp, Homo sapiens
  misc_feature (1828)..(1829): n is a, c, g, or t
  misc_feature (1836)..(1836): n is a, c, g, or t
  misc_feature (1839)..(1840): n is a, c, g, or t
  misc_feature (1861)..(1863): n is a, c, g, or t
  misc_feature (1867)..(1867): n is a, c, g, or t
  misc_feature (1879)..(1879): n is a, c, g, or t
atgaaatacatctcagggccaaaccgataggaaacgaggcgtgcctcgacggatggcaccgacagcccccaaccgggattccgagcaccggagctggctgctgctcccatctttgtgagcaagagtttatatgcgaacagaggtgtgtatttctgacaactttctggtgcacgaataaataactaaacatgggcaaaggagatcctaagaagccgagaggcaaaatgtcatcatatgcattttttgtgcaaacttgtcgggaggagcataagaagaagcacccagatgcttcagtcaacttctcagagttttctaagaagtgctcagagaggtggaagaccatgtctgctaaagagaaaggaaaatttgaagatatggcaaaagcggacaaggcccgttatgaaagagaaatgaaaacctatatccctcccaaaggggagacaaaaaagaagttcaaggatcccaatgcacccaagaggcctccttcggccttcttcctcttctgctctgagtatcgcccaaaaatcaaaggagaacatcctggcctgtccattggtgatgttgcgaagaaactgggagagatgtggaataacactgctgcagatgacaagcagccttatgaaaagaaggctgcgaagctgaaggaaaaatacgaaaaggatattgctgcatatcgagctaaaggaaagcctgatgcagcaaaaaagggagttgtcaaggctgaaaaaagcaagaaaaagaaggaagaggaggaagatgaggaagatgaagaggatgaggaggaggaggaagatgaagaagatgaagatgaagaagaagatgatgatgatgaataagttggttctagcgcagttttttttttcttgtctataaagcatttaacccccctgtacacaactcactccttttaaagaaaaaaattgaaatgtaaggctgtgtaagatttgtttttaaactgtacagtgtctttttttgtatagttaacacactaccgaatgtgtctttagatagccctgtcctggtggtattttcaatagccactaaccttgcctggtacagtatgggggttgtaaattggcatggaaatttaaagcaggttcttgttggtgcacagcacaaattagttatatatggggatggtagttttttcatcttcagttgtctctgatgcagcttatacgaaataattgttgttctgttaactgaataccactctgtaattgcaaaaaaaaaaaagttgcagctgtttggtggacattctgaatgcttctaagtaaatacaattttttttattaagtatggtggtcctttccataggtctgaaatttttcttctggaggggaagctagtctttggctttggcccattttggaattcacatgaatttattacaggggtttatcctttcatatagttagctaataaaaagctttggtctacacacccggcatatcataatggggggtaaagtcaagtggagatagtttccatccataactggaacttccaaaatctggatcagttaagaaaatttcacatagcccatttacttttacaaactggaagagtaatcaatctactcaaagcatgggattatagaatcaaaccttttggaaagtctgtccttgaaggactaatagaaaagtttgtcctaccctttacatgaggactctattctttaactcccattaccatgtaatggcagtatattgtgcagtccccacattaaagaagacctgagaatgtatccccaaaagggtgagttaaaatacaagatgccatattaaattttggtggacataagtctcgctgaagactatgaaatgcnngctatanganngtctttcccatttatctaaannntggnctgtcaggaaangagacttccttacaagtatttcaatcacgtgggccagctttcaaacaaaaatgccctcaaaaaggtatattcccaatataggttgcccttaaaatccagtgaaggagaaaagacattggtcccgtgattaatatgaaatca

SEQ ID NO: 590610 - DNA, 421 bp, Homo sapiens
gacagtctttgtctaccacccactaataaattgtacttaaatgttccaacatatgtttctacttcattaacaatttttctctaaattttgttcctttgttccttcacccatcatgtaccatctgtaccatactgatttgtacgtgcattacttagtaaaactaatgcttaagtagtctatctactcaaaagtgtaaggcactggccaggtgcagtggcttacacctgtaatcccagcactttgggaggccaagcgagcggatcgctacggtctggagttagagaccagcctggccaacatggtgaaacctagtatatactaaaaatacacaaaatagcagggcgtgatggcgaacacatataggtcccggctactagaaaagatagaggcgggaggatagaagaggaacgggaggacggag

SEQ ID NO: 590611 - DNA, 1293 bp, Homo sapiens
  misc_feature (1101)..(1102): n is a, c, g, or t
  misc_feature (1109)..(1109): n is a, c, g, or t
  misc_feature (1112)..(1113): n is a, c, g, or t
  misc_feature (1134)..(1136): n is a, c, g, or t
  misc_feature (1140)..(1140): n is a, c, g, or t
  misc_feature (1152)..(1152): n is a, c, g, or t
aaaaaagattaagggtctctttgccatgcttttcatcatatgcaccaaatgtaaattttgtctcggtgaagaagatgaagatgaagaagaagatgatgatgatgaataagttggttctagcgcagttttttttttcttgtctataaagcatttaacccccctgtacacaactcactccttttaaagaaaaaaattgaaatgtaaggctgtgtaagatttgtttttaaactgtacagtgtctttttttgtatagttaacacactaccgaatgtgtctttagatagccctgtcctggtggtattttcaatagccactaaccttgcctggtacagtatgggggttgtaaattggcatggaaatttaaagcaggttcttgttggtgcacagcacaaattagttatatatggggatggtagttttttcatcttcagttgtctctgatgcagcttatacgaaataattgttgttctgttaactgaataccactctgtaattgcaaaaaaaaaaaagttgcagctgtttggtggacattctgaatgcttctaagtaaatacaattttttttattaagtatggtggtcctttccataggtctgaaatttttcttctggaggggaagctagtctttggctttggcccattttggaattcacatgaatttattacaggggtttatcctttcatatagttagctaataaaaagctttggtctacacacccggcatatcataatggggggtaaagtcaagtggagatagtttccatccataactggaacttccaaaatctggatcagttaagaaaatttcacatagcccatttacttttacaaactggaagagtaatcaatctactcaaagcatgggattatagaatcaaaccttttggaaagtctgtccttgaaggactaatagaaaagtttgtcctaccctttacatgaggactctattctttaactcccattaccatgtaatggcagtatattgtgcagtccccacattaaagaagacctgagaatgtatccccaaaagggtgagttaaaatacaagatgccatattaaattttggtggacataagtctcgctgaagactatgaaatgcnngctatanganngtctttcccatttatctaaannntggnctgtcaggaaangagacttccttacaagtatttcaatcacgtgggccagctttcaaacaaaaatgccctcaaaaaggtatattcccaatataggttgcccttaaaatccagtgaaggagaaaagacattggtcccgtgattaatatgaaatca

SEQ ID NO: 590612 - DNA, 435 bp, Homo sapiens
  misc_feature (133)..(133): n is a, c, g, or t
  misc_feature (346)..(346): n is a, c, g, or t
  misc_feature (395)..(395): n is a, c, g, or t
gcgaatcactagtgattccccaccaagcctgtatgtgtctgagagaaatgaacttcttattcagttttatcagacttaagtttaactgcagataggtttattggtcactacatattcaggccaaaaaaactgnctacaactacagaacagcctgtcatcatcacatttcctgtaaccacgcgtttaaaaaccaccgtgggctcttgtcaccacacagtgtagaccgacggggactcttggagggccaatattgttcaaagtgactttgtattagccggcactgttatcacaaacatcactcgcgatgggagtttgcacgccacaatctcgatcatcaaaatctacnaagagggaaatttggcgatacagcaggcgggcaagaacattagtgccangctgactgtcgtctgcgagcagtgccctctcctcagaaga

SEQ ID NO: 590613 - DNA, 996 bp, Homo sapiens
  misc_feature (5)..(5): n is a, c, g, or t
  misc_feature (7)..(7): n is a, c, g, or t
  misc_feature (10)..(11): n is a, c, g, or t
gacananggnnaggtgaggaggctgcgtctggctcccgctctcacagccattgcagtacattgagctccatagagacagcgccggggcaagtgagagccggacgggcactgggcgactctgtgcctcgctgaggaaaaataactaaacatgggcaaaggagatcctaagaagccgagaggcaaaatgtcatcatatgcattttttgtgcaaacttgtcgggaggagcataagaagaagcacccagatgcttcagtcaacttctcagagttttctaagaagtgctcagagaggtggaagaccatgtctgctaaagagaaaggaaaatttgaagatatggcaaaagcggacaaggcccgttatgaaagagaaatgaaaacctatatccctcccaaaggggagacaaaaaagaagttcaaggatcccaatgcacccaagaggcctccttcggccttcttcctcttctgctctgagtatcgcccaaaaatcaaaggagaacatcctggcctgtccattggtgatgttgcgaagaaactgggagagatgtggaataacactgctgcagatgacaagcagccttatgaaaagaaggctgcgaagctgaaggaaaaatacgaaaaggatattgctgcatatcgagctaaaggaaagcctgatgcagcaaaaaagggagttgtcaaggctgaaaaaagcaagaaaaagaaggaagaggaggaaaaaaaaaaaaaaaaaaaaaaatttttgggcggcaagcgaccctaagaaaaggtgtgtcagagccacaccgatgtgggacagccggggccccagtagagtcaagagaacaagaggggcacaacgggggagccaagaagaaaccgcggggcaagaaaagggcggcgagctcaccacacaaaaaaaaaagggccggggggaacacagagtgttggagcaaccacaagaggagtccggagagacaaagagggacacaaccgagaggccaaagagagcgaaaaaag

SEQ ID NO: 590614 - DNA, 968 bp, Homo sapiens
  misc_feature (23)..(24): n is a, c, g, or t
ttatggatatgtcgaccacgcgnncgagtacattgagctccatagagacagcgccggggcaagtgagagccggacgggcactgggcgactctgtgcctcgctgaggaaaaataactaaacatgggcaaaggagatcctaagaagccgagaggcaaaatgtcatcatatgcattttttgtgcaaacttgtcgggaggagcataagaagaagcacccagatgcttcagtcaacttctcagagttttctaagaagtgctcagagaggtggaagaccatgtctgctaaagagaaaggaaaatttgaagatatggcaaaagcggacaaggcccgttatgaaagagaaatgaaaacctatatccctcccaaaggggagacaaaaaagaagttcaaggatcccaatgcacccaagaggcctccttcggccttcttcctcttctgctctgagtatcgcccaaaaatcaaaggagaacatcctggcctgtccattggtgatgttgcgaagaaactgggagagatgtggaataacactgctgcagatgacaagcagccttatgaaaagaaggctgcgaagctgaaggaaaaatacgaaaaggatattgctgcatatcgagctaaaggaaagcctgatgcagcaaaaaagggagttgtcaaggctgaaaaaagcaagaaaaagaaggaagaggaggaaaaaaaaaaaaaaaaaaaaaaatttttgggcggcaagcgaccctaagaaaaggtgtgtcagagccacaccgatgtgggacagccggggccccagtagagtcaagagaacaagaggggcacaacgggggagccaagaagaaaccgcggggcaagaaaagggcggcgagctcaccacacaaaaaaaaaagggccggggggaacacagagtgttggagcaaccacaagaggagtccggagagacaaagagggacacaaccgagaggccaaagagagcgaaaaaag

SEQ ID NO: 590615 - DNA, 415 bp, Homo sapiens
  misc_feature (4)..(4): n is a, c, g, or t
  misc_feature (26)..(26): n is a, c, g, or t
  misc_feature (48)..(48): n is a, c, g, or t
  misc_feature (85)..(85): n is a, c, g, or t
  misc_feature (126)..(126): n is a, c, g, or t
  misc_feature (146)..(146): n is a, c, g, or t
  misc_feature (227)..(227): n is a, c, g, or t
cttncttggcaattcagaagaccacngaacccaagactcatatcccantttattagatggccagatgggacacacactcatcagncttagtgagcagcccaatcccagagggaacccataccttcnccctaggggctgggcgcggntgtctcgccctgtaatcccagcactttgggaggccaaggcggatggatcacctgaggtcacgagttcaagaccagcctganccaacatggagaaatcccatctctactaaaaatacaaaattagctgggcatggtggtgcatgcctgtagtcccagttgctcgggaggctgaggcaggagaatcactcgagcccgagaggcggaggttgtggtgagctgagattggccattgcactccagtctgggcaacaagagtgaaactctgtctc

SEQ ID NO: 590616 - DNA, 168 bp, Homo sapiens
cagcgtggatacactgggggtgtatgagttggtctacggaatcgcggggtatgctgttcgaattcataagaacaggaaggttagaagtagggtcttggtgacaaaatatgttgtgtacgagttcagcgtgagagtgcgtcatatgttgttcctatcgtagattgtagt

SEQ ID NO: 590617 - DNA, 419 bp, Homo sapiens
agcggccgcccgggcaggtactatctttaaacagtgtaagttgcttctattctgtgtgtcaaaagctaaaaacaaattattgtataacctccgctccttccaaaaagcagaacaaagcaaccatccaccttatggagcaatgattcatgaatgaaggccacacatagttactaaatagaaagctgtaactaagtatcctgacaacagaaacagaggtgaaatgaaagaatagacactaaagacatgcggtctgcaaggaaaatattagactgaggtaagttatttttaaacaaaggggaaggagggagaaacaaacaaaaaaagaggcatgaccagtcaatcaaatatcagcttaaaagaaaagcttgtgttcataatatatgcctaataatactggttagcatttactcgacaatttg

SEQ ID NO: 590618 - DNA, 4845 bp, Homo sapiens
  misc_feature (60)..(60): n is a, c, g, or t
  misc_feature (67)..(67): n is a, c, g, or t
  misc_feature (70)..(70): n is a, c, g, or t
  misc_feature (73)..(73): n is a, c, g, or t
  misc_feature (4653)..(4654): n is a, c, g, or t
  misc_feature (4661)..(4661): n is a, c, g, or t
  misc_feature (4664)..(4665): n is a, c, g, or t
  misc_feature (4686)..(4688): n is a, c, g, or t
  misc_feature (4692)..(4692): n is a, c, g, or t
  misc_feature (4704)..(4704): n is a, c, g, or t
cattgtgtgtttgcagctggtcaggctggtctcgaactcctgacctcaggtgatccaccngtctcgnctngantagctgagattacaggcatgtgccaccaggcatggctaatttttgtatttttagtggagacagggtttcactctattaggctggtctggaactcccgacctcaggtgatccacgtgcctttgtctcccaaagtgctgggattacaggcatgagtgacggtgcccagccattcgtgacatgtttatacaaatataactttagcaaatatttagcataactatcaaaattacaaatcatattaaatttgtataaatgtatgcaatttttggaacacgcatatcaacaacatacccataaatataactgagatgagatctaatgtcacctcacttgacagtgccctcccatgcagtatcgccacatttgacaatgcctgcccatttaatctaccaaataaatcgaatcacttaatacctctacaagatgagagatacattctttagactccccaagggatgcagctgaaaaaaatcccaaagttagttttaagccaaaaagacttgatttaggattttgacactggagaaacccatcaaagatgtcaagtttgaaaacacttgatcaaaacagaatcacaggtcactattaaaagagtattaatttaaccagagacttccaaagcaatacagaaacttacatggatataaaaaccctaacccttttaaaggtcagatttgctaagtgatcaaaaggggtacttgaattgaatcgacacaggaagagtgtgtacagggttatgagtgtaggcagatggttactttggtcatatctccatttgccacctgattacacatgagaatggcatctttactcaccagaaagccagtattataggaggtgtaggaggcattcttggacttgagacaagaacattgttgtgtagaaatttcattgactgtgttaaaattattctccatgggctggagaacacataacatggcctttagaatgagacgggcattgattggatgcaaggtctccacacttactagctgtgtgacattggacagagtgcttcatcattccgagactcagtttttaaaggaaaaacaactaactaccttgcaagcttgctagcaggtttaagtgtaataatgtgtgggaatgactgcaccgtgactaacatgcagtgacagcttaattaatgttaacccttatcattatcatataagaatgtgagttacataagagaggagtcctgtcagttcgttctctgctgtgtccccaagaccatgaatcatggctggcatgtagtaggcatttaataatatatgttcaacaagtatttggcagtcttggagggcagaaaaggaggtggggaagatttttaaataacattttttaaaaagtcacattgtcctacaataccgatttttcttgcatatttaggaaattgagggtttttttctaaaacatgcggacatatgggaaataggatgcaacatttgcactaatgtttcagacacagttagaggtttccaagagattttgcgctggggaggctgcttgctacaagctcccaaagctctgggaggacatagtattcattcctccctcagcagaagcggtgaggcaagaagctctggggagcacccagcgttggacttttagcatagtgtgtcaggtcttcatagtttgggcccagggcacagagaagtcacagctctccggcatcctgtgacctttaccctctttgccaagggaaaatgtggcccaccaaagcaagaaacttgagggcatgggtcaccccagccctggcatctgcccagagcccgagaaggaaggaacaatgatcctccagctacctcacggggctggcacaggtgaccactgccctggcatcacccagctgtgtccggcagcctgaaccccatctgtggggatgcgaggaggaaaatacaaaagtccttaggtgaacactgagaaggcagatgcagcagaaacctccaggccagaactacccagtcttggacctatggtggagatagagcatagctggcgatcatgtgtacttacactctaaggtcacctggttgcactatggcctcatctgtggctctgaaaatgaagatttggaaggagatcatcacagctaatgtttaacaagcccctcctgtgtgccaaatcattcacccctcaccacaaccgaatgagctaaggattctcattatatatagtttatggagagggaagtgcagacataaagaggtgaattatcttacccagatcacacagctgataagtggtggaggcagaatagaatctaaacagtgtggctccggagcccacatgcattgattcgacaagtgtttattgagcacctgccgcggacaaggccttgtgtgattaaatagggttataattagtaatataaaaatgagaaatcactaatgctttttagacttaacattttctttttttgtaggtttcaggcacagaactgtatatccaataatagtgaaatggatcccactaattatgacagaaatgatgatacatttaaatgacttggatgttttataggtatgatctcgtgaaaccttgagagaaactgaatgacgaatgaaactattgttcctgtttcacacagaagaaaactgaggttaaaaggggtaaagtaattttgcatggcatgaagtagaaattcaaagtacaggaatttgaacttggttctgtccttttctgaagcccttgaccactatagactcaaacatcaccttgtttttccactcattcaacacttttttttttaaattatctaataggttggcactcatcatgagcccctgttctcattctgcaaatggtgaagctctctattgtcctgaccccacagttcctgtcccatgaccagggccagctcaccaaggagctgcagcagcatgtaaagtcagtgacatgcccatgcgagtacctgaggaagacgatcctacacctgccacctccgatggatccactgcctctgtgcctgcctgtactgctgatgctccagtggataactcagcatcccagcctaggcccaatgccactgaagatggacctgccccctggggacccaggagtcctaccactcagctgtccccaggagtgcccagaccctcattcttatccaggacctaggagccctacccctggccttccctcatcagccgtaaatgatgatttactgctgttaccatcatcactgccttcagtgaccaagggccttccaaggtgccagctctggaacgaaggatgcccttgggaggtgatgacactcaggtacacgggtgctcaacagattgcttcctcctatcctcagacggtctttgcatgcatgcagccattggcactcccattgtgtggaaggaaaccagcccagggtcacacagctggtcagcagcaacatagctggtctcaaatctaaggtgcctgaccatgcctccatgagggaccgcctccaagggaggttgatcctggctttggggagcctttcctgggctgcacgaataacctccattgttcgagaccccaaactctgctcacatcttcctttccctatctctgcttgggctatgatcacggtgactctagcagcccttcatggacattatagtactctctgccattcacttttgctctaatctgacttcaacccccctgtacacaactcactccttttaaagaaaaaaattgaaatgtaaggctgtgtaagatttgtttttaaactgtacagtgtctttttttgtatagttaacacactaccgaatgtgtctttagatagccctgtcctggtggtattttcaatagccactaaccttgcctggtacagtatgggggttgtaaattggcatggaaatttaaagcaggttcttgttggtgcacagcacaaattagttatatatggggatggtagttttttcatcttcagttgtctctgatgcagcttatacgaaataattgttgttctgttaactgaataccactctgtaattgcaaaaaaaaaaaagttgcagctgtttggtggacattctgaatgcttctaagtaaatacaattttttttattaagtatggtggtcctttccataggtctgaaatttttcttctggaggggaagctagtctttggctttggcccattttggaattcacatgaatttattacaggggtttatcctttcatatagttagctaataaaaagctttggtctacacacccggcatatcataatggggggtaaagtcaagtggagatagtttccatccataactggaacttccaaaatctggatcagttaagaaaatttcacatagcccatttacttttacaaactggaagagtaatcaatctactcaaagcatgggattatagaatcaaaccttttggaaagtctgtccttgaaggactaatagaaaagtttgtcctaccctttacatgaggactctattctttaactcccattaccatgtaatggcagtatattgtgcagtccccacattaaagaagacctgagaatgtatccccaaaagggtgagttaaaatacaagatgccatattaaattttggtggacataagtctcgctgaagactatgaaatgcnngctatanganngtctttcccatttatctaaannntggnctgtcaggaaangagacttccttacaagtatttcaatcacgtgggccagctttcaaacaaaaatgccctcaaaaaggtatattcccaatataggttgcccttaaaatccagtgaaggagaaaagacattggtcccgtgattaatatgaaatca

SEQ ID NO: 590619 - DNA, 175 bp, Homo sapiens
  misc_feature (96)..(96): n is a, c, g, or t
tttgtctacagtctttagctttgttaagtcaccatcccacaaataaagaccctatgaggctgaaaaaactaacggtcagtcgtctcagatacgtgnaataaatccagttgactgtggtgtattacggacagagtcttctgggctcgagaggaccgtgtaggcgaaggggaccggg

SEQ ID NO: 590620 - DNA, 1026 bp, Homo sapiens
gctagttctagatcgcgagcgcccgccctttttttatttatttttgggctctaaagggggtaaaggggatgacaaccggtagatacgggccctcactacaaagcttaggggagactaacgacctaggccaatggaccacaactgacaaaaggcaacacactagatcccacaaaacaagacaacgacacaacattttcgcaacgaacctgcaacccgcactagacacggcagcccgcaacccacatcagacgcgccaagatcacagccacacaaggacgaacataaacacaccaggccacacacaagaaaaagaaagacagggaaccagcggcagacgtcaaagcacaacagacaagaacagcggacacagcaaatgcggcaagagagaacaaaagctaataagaaaaacacaacacgacacaacgccacgaacaagacaagacaagacacaacgacgccaacaaacgacaaaagaaaaaacgagtgacgaacaaaaaaagaaaagaaaaagaaaaaaagcacagaacacaggtcgatacaaaagcaaagaacgaagatcaggcagacccgactaaaagatgaaggcaccaagccaacacacgatacgcgcgattcgaaacgaagagggaaaaaagaagaaagagaaaccgcgagaacagcagacagcaccacatacaacgacaaagaacaagcacgacacgatagagcgacaatccaagagcgagcaaaaaagacaaacgataacaagacgagaggagagcaaatccgacacgagagaaaatcaaaagctagcgaaggtcaaaagaagacacagacctgaaaagaagcgcacagaaccaatgagcgagctacagagagaggaaggaacaacgacacctagaacgcaaaccacacgacacacaacagcggtcaaacaaagagcacaacagagaaaacgaagcaggacccagacaaacgactcagcaagcacaatcaccgacacacgagcaaaacaccacagacaaaagacccaaatagaacggaccc

SEQ ID NO: 590621 - DNA, 799 bp, Homo sapiens
  misc_feature (5)..(5): n is a, c, g, or t
  misc_feature (7)..(7): n is a, c, g, or t
  misc_feature (10)..(11): n is a, c, g, or t
gacananggnnaggtgaggaggctgcgtctggctcccgctctcacagccattgcagtacattgagctccatagagacagcgccggggcaagtgagagccggacgggcactgggcgactctgtgcctcgctgaggaaaaataactaaacatgggcaaaggagatcctaagaagccgagaggcaaaatgtcatcatatgcattttttgtgcaaacttgtcgggaggagcataagaagaagcacccagatgcttcagtcaacttctcagagttttctaagaagtgctcagagaggtggaagaccatgtctgctaaagagaaaggaaaatttgaagatatggcaaaagcggacaaggcccgttatgaaagagaaatgaaaacctatatccctcccaaaggggagacaaaaaagaagttcaaggatcccaatgcacccaagaggcctccttcggccttcttcctcttctgctctgagtatcgcccaaaaatcaaaggagaacatcctggcctgtccattggtgatgttgcgaagaaactgggagagatgtggaataacactgctgcagatgacaagcagccttatgaaaagaaggctgcgaagctgaaggaaaaatacgaaaaggatattgctgcatatcgagctaaaggaaagcctgatgcagcaaaaaagggagttgtcaaggctgaaaaaagcaagaaaaagaaggaagaggaggaagatgaggaagatgtgccatcattaaagtgtttcgggggtgttacgacataaaagtccacctatactcgtaacgtagtagcaacg

SEQ ID NO: 590622 - DNA, 589 bp, Homo sapiens
gataaacttcggatgtgccttatgtgtaaaaaaactttttttcctttccatgcttccagacagtgtgcccctcagactgttggctggaggttgactagggtctgaattgcgcacagggccgtgaaggtgcggcttctgttactgaatatgagccctggagacccggatctgacagcgggagcttcgaggggatgtttttccggagcttcgagaatgatggttttcaaagaaacacttttccgcgggtggcgctcagagtgggtctggaacccggcggtgcttccgagcgctgtcttcggcttgaggcccggttctgatgcagactcttgactctgggcatttcctatgtgtctgtgtcctcatcgctgaaatgggcatagtagcggtgccccaagtgccgacgggcccacacccgggctctgggtgtgctcacgatgggggtcaggacaggtgcaaactgggacacaggaggcgcttcccagagcccaaaggcgtgcttgttccacagaccctgggtttgctgtgaagaagggtcttccacagaccgaaagtctggtactgacccttaggggggaaggattgtggctcc

SEQ ID NO: 590623 - DNA, 4692 bp, Homo sapiens
  misc_feature (60)..(60): n is a, c, g, or t
  misc_feature (67)..(67): n is a, c, g, or t
  misc_feature (70)..(70): n is a, c, g, or t
  misc_feature (73)..(73): n is a, c, g, or t
  misc_feature (4500)..(4501): n is a, c, g, or t
  misc_feature (4508)..(4508): n is a, c, g, or t
  misc_feature (4511)..(4512): n is a, c, g, or t
  misc_feature (4533)..(4535): n is a, c, g, or t
  misc_feature (4539)..(4539): n is a, c, g, or t
  misc_feature (4551)..(4551): n is a, c, g, or t
cattgtgtgtttgcagctggtcaggctggtctcgaactcctgacctcaggtgatccaccngtctcgnctngantagctgagattacaggcatgtgccaccaggcatggctaatttttgtatttttagtggagacagggtttcactctattaggctggtctggaactcccgacctcaggtgatccacgtgcctttgtctcccaaagtgctgggattacaggcatgagtgacggtgcccagccattcgtgacatgtttatacaaatataactttagcaaatatttagcataactatcaaaattacaaatcatattaaatttgtataaatgtatgcaatttttggaacacgcatatcaacaacatacccataaatataactgagatgagatctaatgtcacctcacttgacagtgccctcccatgcagtatcgccacatttgacaatgcctgcccatttaatctaccaaataaatcgaatcacttaatacctctacaagatgagagatacattctttagactccccaagggatgcagctgaaaaaaatcccaaagttagttttaagccaaaaagacttgatttaggattttgacactggagaaacccatcaaagatgtcaagtttgaaaacacttgatcaaaacagaatcacaggtcactattaaaagagtattaatttaaccagagacttccaaagcaatacagaaacttacatggatataaaaaccctaacccttttaaaggtcagatttgctaagtgatcaaaaggggtacttgaattgaatcgacacaggaagagtgtgtacagggttatgagtgtaggcagatggttactttggtcatatctccatttgccacctgattacacatgagaatggcatctttactcaccagaaagccagtattataggaggtgtaggaggcattcttggacttgagacaagaacattgttgtgtagaaatttcattgactgtgttaaaattattctccatgggctggagaacacataacatggcctttagaatgagacgggcattgattggatgcaaggtctccacacttactagctgtgtgacattggacagagtgcttcatcattccgagactcagtttttaaaggaaaaacaactaactaccttgcaagcttgctagcaggtttaagtgtaataatgtgtgggaatgactgcaccgtgactaacatgcagtgacagcttaattaatgttaacccttatcattatcatataagaatgtgagttacataagagaggagtcctgtcagttcgttctctgctgtgtccccaagaccatgaatcatggctggcatgtagtaggcatttaataatatatgttcaacaagtatttggcagtcttggagggcagaaaaggaggtggggaagatttttaaataacattttttaaaaagtcacattgtcctacaataccgatttttcttgcatatttaggaaattgagggtttttttctaaaacatgcggacatatgggaaataggatgcaacatttgcactaatgtttcagacacagttagaggtttccaagagattttgcgctggggaggctgcttgctacaagctcccaaagctctgggaggacatagtattcattcctccctcagcagaagcggtgaggcaagaagctctggggagcacccagcgttggacttttagcatagtgtgtcaggtcttcatagtttgggcccagggcacagagaagtcacagctctccggcatcctgtgacctttaccctctttgccaagggaaaatgtggcccaccaaagcaagaaacttgagggcatgggtcaccccagccctggcatctgcccagagcccgagaaggaaggaacaatgatcctccagctacctcacggggctggcacaggtgaccactgccctggcatcacccagctgtgtccggcagcctgaaccccatctgtggggatgcgaggaggaaaatacaaaagtccttaggtgaacactgagaaggcagatgcagcagaaacctccaggccagaactacccagtcttggacctatggtggagatagagcatagctggcgatcatgtgtacttacactctaaggtcacctggttgcactatggcctcatctgtggctctgaaaatgaagatttggaaggagatcatcacagctaatgtttaacaagcccctcctgtgtgccaaatcattcacccctcaccacaaccgaatgagctaaggattctcattatatatagtttatggagagggaagtgcagacataaagaggtgaattatcttacccagatcacacagctgataagtggtggaggcagaatagaatctaaacagtgtggctccggagcccacatgcattgattcgacaagtgtttattgagcacctgccgcggacaaggccttgtgtgattaaatagggttataattagtaatataaaaatgagaaatcactaatgctttttagacttaacattttctttttttgtaggtttcaggcacagaactgtatatccaataatagtgaaatggatcccactaattatgacagaaatgatgatacatttaaatgacttggatgttttataggtatgatctcgtgaaaccttgagagaaactgaatgacgaatgaaactattgttcctgtttcacacagaagaaaactgaggttaaaaggggttggcactcatcatgagcccctgttctcattctgcaaatggtgaagctctctattgtcctgaccccacagttcctgtcccatgaccagggccagctcaccaaggagctgcagcagcatgtaaagtcagtgacatgcccatgcgagtacctgaggaagacgatcctacacctgccacctccgatggatccactgcctctgtgcctgcctgtactgctgatgctccagtggataactcagcatcccagcctaggcccaatgccactgaagatggacctgccccctggggacccaggagtcctaccactcagctgtccccaggagtgcccagaccctcattcttatccaggacctaggagccctacccctggccttccctcatcagccgtaaatgatgatttactgctgttaccatcatcactgccttcagtgaccaagggccttccaaggtgccagctctggaacgaaggatgcccttgggaggtgatgacactcaggtacacgggtgctcaacagattgcttcctcctatcctcagacggtctttgcatgcatgcagccattggcactcccattgtgtggaaggaaaccagcccagggtcacacagctggtcagcagcaacatagctggtctcaaatctaaggtgcctgaccatgcctccatgagggaccgcctccaagggaggttgatcctggctttggggagcctttcctgggctgcacgaataacctccattgttcgagaccccaaactctgctcacatcttcctttccctatctctgcttgggctatgatcacggtgactctagcagcccttcatggacattatagtactctctgccattcacttttgctctaatctgacttcaacccccctgtacacaactcactccttttaaagaaaaaaattgaaatgtaaggctgtgtaagatttgtttttaaactgtacagtgtctttttttgtatagttaacacactaccgaatgtgtctttagatagccctgtcctggtggtattttcaatagccactaaccttgcctggtacagtatgggggttgtaaattggcatggaaatttaaagcaggttcttgttggtgcacagcacaaattagttatatatggggatggtagttttttcatcttcagttgtctctgatgcagcttatacgaaataattgttgttctgttaactgaataccactctgtaattgcaaaaaaaaaaaagttgcagctgtttggtggacattctgaatgcttctaagtaaatacaattttttttattaagtatggtggtcctttccataggtctgaaatttttcttctggaggggaagctagtctttggctttggcccattttggaattcacatgaatttattacaggggtttatcctttcatatagttagctaataaaaagctttggtctacacacccggcatatcataatggggggtaaagtcaagtggagatagtttccatccataactggaacttccaaaatctggatcagttaagaaaatttcacatagcccatttacttttacaaactggaagagtaatcaatctactcaaagcatgggattatagaatcaaaccttttggaaagtctgtccttgaaggactaatagaaaagtttgtcctaccctttacatgaggactctattctttaactcccattaccatgtaatggcagtatattgtgcagtccccacattaaagaagacctgagaatgtatccccaaaagggtgagttaaaatacaagatgccatattaaattttggtggacataagtctcgctgaagactatgaaatgcnngctatanganngtctttcccatttatctaaannntggnctgtcaggaaangagacttccttacaagtatttcaatcacgtgggccagctttcaaacaaaaatgccctcaaaaaggtatattcccaatataggttgcccttaaaatccagtgaaggagaaaagacattggtcccgtgattaatatgaaatca

SEQ ID NO: 590624 - DNA, 3585 bp, Homo sapiens
  misc_feature (60)..(60): n is a, c, g, or t
  misc_feature (67)..(67): n is a, c, g, or t
  misc_feature (70)..(70): n is a, c, g, or t
  misc_feature (73)..(73): n is a, c, g, or t
cattgtgtgtttgcagctggtcaggctggtctcgaactcctgacctcaggtgatccaccngtctcgnctngantagctgagattacaggcatgtgccaccaggcatggctaatttttgtatttttagtggagacagggtttcactctattaggctggtctggaactcccgacctcaggtgatccacgtgcctttgtctcccaaagtgctgggattacaggcatgagtgacggtgcccagccattcgtgacatgtttatacaaatataactttagcaaatatttagcataactatcaaaattacaaatcatattaaatttgtataaatgtatgcaatttttggaacacgcatatcaacaacatacccataaatataactgagatgagatctaatgtcacctcacttgacagtgccctcccatgcagtatcgccacatttgacaatgcctgcccatttaatctaccaaataaatcgaatcacttaatacctctacaagatgagagatacattctttagactccccaagggatgcagctgaaaaaaatcccaaagttagttttaagccaaaaagacttgatttaggattttgacactggagaaacccatcaaagatgtcaagtttgaaaacacttgatcaaaacagaatcacaggtcactattaaaagagtattaatttaaccagagacttccaaagcaatacagaaacttacatggatataaaaaccctaacccttttaaaggtcagatttgctaagtgatcaaaaggggtacttgaattgaatcgacacaggaagagtgtgtacagggttatgagtgtaggcagatggttactttggtcatatctccatttgccacctgattacacatgagaatggcatctttactcaccagaaagccagtattataggaggtgtaggaggcattcttggacttgagacaagaacattgttgtgtagaaatttcattgactgtgttaaaattattctccatgggctggagaacacataacatggcctttagaatgagacgggcattgattggatgcaaggtctccacacttactagctgtgtgacattggacagagtgcttcatcattccgagactcagtttttaaaggaaaaacaactaactaccttgcaagcttgctagcaggtttaagtgtaataatgtgtgggaatgactgcaccgtgactaacatgcagtgacagcttaattaatgttaacccttatcattatcatataagaatgtgagttacataagagaggagtcctgtcagttcgttctctgctgtgtccccaagaccatgaatcatggctggcatgtagtaggcatttaataatatatgttcaacaagtatttggcagtcttggagggcagaaaaggaggtggggaagatttttaaataacattttttaaaaagtcacattgtcctacaataccgatttttcttgcatatttaggaaattgagggtttttttctaaaacatgcggacatatgggaaataggatgcaacatttgcactaatgtttcagacacagttagaggtttccaagagattttgcgctggggaggctgcttgctacaagctcccaaagctctgggaggacatagtattcattcctccctcagcagaagcggtgaggcaagaagctctggggagcacccagcgttggacttttagcatagtgtgtcaggtcttcatagtttgggcccagggcacagagaagtcacagctctccggcatcctgtgacctttaccctctttgccaagggaaaatgtggcccaccaaagcaagaaacttgagggcatgggtcaccccagccctggcatctgcccagagcccgagaaggaaggaacaatgatcctccagctacctcacggggctggcacaggtgaccactgccctggcatcacccagctgtgtccggcagcctgaaccccatctgtggggatgcgaggaggaaaatacaaaagtccttaggtgaacactgagaaggcagatgcagcagaaacctccaggccagaactacccagtcttggacctatggtggagatagagcatagctggcgatcatgtgtacttacactctaaggtcacctggttgcactatggcctcatctgtggctctgaaaatgaagatttggaaggagatcatcacagctaatgtttaacaagcccctcctgtgtgccaaatcattcacccctcaccacaaccgaatgagctaaggattctcattatatatagtttatggagagggaagtgcagacataaagaggtgaattatcttacccagatcacacagctgataagtggtggaggcagaatagaatctaaacagtgtggctccggagcccacatgcattgattcgacaagtgtttattgagcacctgccgcggacaaggccttgtgtgattaaatagggttataattagtaatataaaaatgagaaatcactaatgctttttagacttaacattttctttttttgtaggtttcaggcacagaactgtatatccaataatagtgaaatggatcccactaattatgacagaaatgatgatacatttaaatgacttggatgttttataggtatgatctcgtgaaaccttgagagaaactgaatgacgaatgaaactattgttcctgtttcacacagaagaaaactgaggttaaaaggggtaaagtaattttgcatggcatgaagtagaaattcaaagtacaggaatttgaacttggttctgtccttttctgaagcccttgaccactatagactcaaacatcaccttgtttttccactcattcaacacttttttttttaaattatctaataggttggcactcatcatgagcccctgttctcattctgcaaatggtgaagctctctattgtcctgaccccacagttcctgtcccatgaccagggccagctcaccaaggagctgcagcagcatgtaaagtcagtgacatgcccatgcgagtacctgaggaaggtgagtgagtgcagacagatggggcctggtgcccttgagcagttcccgggtctcagctgccacacatctcatagccggtgatgctgggggaagcttacgcagtcacagtactggcttcttcctctttttctttccatacaagtggcttagggatggggtagagtagttgacttatttggatgaaaaccactatcttctgtcagaaactcaaaaggaatcattgctggcatggtaacctaaagaaaaacaaccagacaagtgcccaacgacacttaaaaaggtgatttattatcttgccaagtttaggctgggcatggtgactcatgcctctaatcccagcattttgggaggctgaggctggtggatcaccggaggccaggactttgagaccagcctgaccaatatggcaaaacctcgtccctgctgggaatgcaaaaattagccgggcatggtggtgtgagcctgtagtcccagctactcaggaggctgagacaggagaattgcttggattcaggaggtgggggttttagtgggccgagatcacgccattgcactccagactgtgcgacagagcgagactctgtcaaaa

SEQ ID NO: 590625 - DNA, 803 bp, Homo sapiens
  misc_feature (87)..(87): n is a, c, g, or t
  misc_feature (113)..(113): n is a, c, g, or t
  misc_feature (251)..(251): n is a, c, g, or t
  misc_feature (256)..(256): n is a, c, g, or t
cgtcgggttacacatatgtggctctcctgtacttgaaagtgtgaaagaaaagttttcctttgaaccaaaaatcccatcacctagaanagggggtgggaacccaccaacacctntcagcccattcaatttttctcctggggatttctggggaagaggggcttccggcagcacagcaaatcctcagacacctgtggaatacccaatggaaacaagtggcataaagcatattgatctgacgggggggggggaancatcnggaccacttccaatacaacagccaaactctgggccatacaaaaaacaagcttttcccatgatctccaaacggccagagcacctgcgtatgaatctatgacagagcaatgcttttaatgaatttaaggcgaaaaagggtgacagggagatgtgtgagcatcctgcaaggggaaaccactcacagtgacagtttgcagaaaggcaatgtcattacctaggacacttcagacaccgggaaaataaccggggattttaaaaatcaatgcgtgggggcaaaaaaaccttaaggcgaatgagatgggtgacctctcagggcctccagttaattggttcctcgcagctcttcttaaccttatcaaggatttcatgggggaggacttcaaactgacgtgattaggggagaggggtgcttcttgaagctgggggggtcttggtggggggaaaagggggtatcctttccttgcggcggggcaaaattccctttgatcctggacctagggcctatgaggtggacgcgggggaaatatttccgcggaacggaacgccgg

SEQ ID NO: 590626 - DNA, 4211 bp, Homo sapiens
  misc_feature (4019)..(4020): n is a, c, g, or t
  misc_feature (4027)..(4027): n is a, c, g, or t
  misc_feature (4030)..(4031): n is a, c, g, or t
  misc_feature (4052)..(4054): n is a, c, g, or t
  misc_feature (4058)..(4058): n is a, c, g, or t
  misc_feature (4070)..(4070): n is a, c, g, or t
tcagtttctacacaggacatccttcaaaggctacaattaaggatccacctaacttttcagcaatacagaaacttacatggatataaaaaccctaacccttttaaaggtcagatttgctaagtgatcaaaaggggtacttgaattgaatcgacacaggaagagtgtgtacagggttatgagtgtaggcagatggttactttggtcatatctccatttgccacctgattacacatgagaatggcatctttactcaccagaaagccagtattataggaggtgtaggaggcattcttggacttgagacaagaacattgttgtgtagaaatttcattgactgtgttaaaattattctccatgggctggagaacacataacatggcctttagaatgagacgggcattgattggatgcaaggtctccacacttactagctgtgtgacattggacagagtgcttcatcattccgagactcagtttttaaaggaaaaacaactaactaccttgcaagcttgctagcaggtttaagtgtaataatgtgtgggaatgactgcaccgtgactaacatgcagtgacagcttaattaatgttaacccttatcattatcatataagaatgtgagttacataagagaggagtcctgtcagttcgttctctgctgtgtccccaagaccatgaatcatggctggcatgtagtaggcatttaataatatatgttcaacaagtatttggcagtcttggagggcagaaaaggaggtggggaagatttttaaataacattttttaaaaagtcacattgtcctacaataccgatttttcttgcatatttaggaaattgagggtttttttctaaaacatgcggacatatgggaaataggatgcaacatttgcactaatgtttcagacacagttagaggtttccaagagattttgcgctggggaggctgcttgctacaagctcccaaagctctgggaggacatagtattcattcctccctcagcagaagcggtgaggcaagaagctctggggagcacccagcgttggacttttagcatagtgtgtcaggtcttcatagtttgggcccagggcacagagaagtcacagctctccggcatcctgtgacctttaccctctttgccaagggaaaatgtggcccaccaaagcaagaaacttgagggcatgggtcaccccagccctggcatctgcccagagcccgagaaggaaggaacaatgatcctccagctacctcacggggctggcacaggtgaccactgccctggcatcacccagctgtgtccggcagcctgaaccccatctgtggggatgcgaggaggaaaatacaaaagtccttaggtgaacactgagaaggcagatgcagcagaaacctccaggccagaactacccagtcttggacctatggtggagatagagcatagctggcgatcatgtgtacttacactctaaggtcacctggttgcactatggcctcatctgtggctctgaaaatgaagatttggaaggagatcatcacagctaatgtttaacaagcccctcctgtgtgccaaatcattcacccctcaccacaaccgaatgagctaaggattctcattatatatagtttatggagagggaagtgcagacataaagaggtgaattatcttacccagatcacacagctgataagtggtggaggcagaatagaatctaaacagtgtggctccggagcccacatgcattgattcgacaagtgtttattgagcacctgccgcggacaaggccttgtgtgattaaatagggttataattagtaatataaaaatgagaaatcactaatgctttttagacttaacattttctttttttgtaggtttcaggcacagaactgtatatccaataatagtgaaatggatcccactaattatgacagaaatgatgatacatttaaatgacttggatgttttataggtatgatctcgtgaaaccttgagagaaactgaatgacgaatgaaactattgttcctgtttcacacagaagaaaactgaggttaaaaggggtaaagtaattttgcatggcatgaagtagaaattcaaagtacaggaatttgaacttggttctgtccttttctgaagcccttgaccactatagactcaaacatcaccttgtttttccactcattcaacacttttttttttaaattatctaataggttggcactcatcatgagcccctgttctcattctgcaaatggtgaagctctctattgtcctgaccccacagttcctgtcccatgaccagggccagctcaccaaggagctgcagcagcatgtaaagtcagtgacatgcccatgcgagtacctgaggaagacgatcctacacctgccacctccgatggatccactgcctctgtgcctgcctgtactgctgatgctccagtggataactcagcatcccagcctaggcccaatgccactgaagatggacctgccccctggggacccaggagtcctaccactcagctgtccccaggagtgcccagaccctcattcttatccaggacctaggagccctacccctggccttccctcatcagccgtaaatgatgatttactgctgttaccatcatcactgccttcagtgaccaagggccttccaaggtgccagctctggaacgaaggatgcccttgggaggtgatgacactcaggtacacgggtgctcaacagattgcttcctcctatcctcagacggtctttgcatgcatgcagccattggcactcccattgtgtggaaggaaaccagcccagggtcacacagctggtcagcagcaacatagctggtctcaaatctaaggtgcctgaccatgcctccatgagggaccgcctccaagggaggttgatcctggctttggggagcctttcctgggctgcacgaataacctccattgttcgagaccccaaactctgctcacatcttcctttccctatctctgcttgggctatgatcacggtgactctagcagcccttcatggacattatagtactctctgccattcacttttgctctaatctgacttcaacccccctgtacacaactcactccttttaaagaaaaaaattgaaatgtaaggctgtgtaagatttgtttttaaactgtacagtgtctttttttgtatagttaacacactaccgaatgtgtctttagatagccctgtcctggtggtattttcaatagccactaaccttgcctggtacagtatgggggttgtaaattggcatggaaatttaaagcaggttcttgttggtgcacagcacaaattagttatatatggggatggtagttttttcatcttcagttgtctctgatgcagcttatacgaaataattgttgttctgttaactgaataccactctgtaattgcaaaaaaaaaaaagttgcagctgtttggtggacattctgaatgcttctaagtaaatacaattttttttattaagtatggtggtcctttccataggtctgaaatttttcttctggaggggaagctagtctttggctttggcccattttggaattcacatgaatttattacaggggtttatcctttcatatagttagctaataaaaagctttggtctacacacccggcatatcataatggggggtaaagtcaagtggagatagtttccatccataactggaacttccaaaatctggatcagttaagaaaatttcacatagcccatttacttttacaaactggaagagtaatcaatctactcaaagcatgggattatagaatcaaaccttttggaaagtctgtccttgaaggactaatagaaaagtttgtcctaccctttacatgaggactctattctttaactcccattaccatgtaatggcagtatattgtgcagtccccacattaaagaagacctgagaatgtatccccaaaagggtgagttaaaatacaagatgccatattaaattttggtggacataagtctcgctgaagactatgaaatgcnngctatanganngtctttcccatttatctaaannntggnctgtcaggaaangagacttccttacaagtatttcaatcacgtgggccagctttcaaacaaaaatgccctcaaaaaggtatattcccaatataggttgcccttaaaatccagtgaaggagaaaagacattggtcccgtgattaatatgaaatca

SEQ ID NO: 590627 - DNA, 459 bp, Homo sapiens
tgcgcagccatcgaatatggcgagagcatgcagcagcgcgtcgacgagcagctcgaagcaatcaagcaaaatccggccttggtacgtgcgttcttcaagcatccaagtgtcgcctacatttctgacttatgagtaagtaatgcagtcgagcgagatatacaatgaaattcaatttcatcaaggtggacgtgtctgaccaagtcgcccgactcactttggatgacgcagacagtcacaatgctctgaccgaaggaatgcagcgggaaatgatggttgcactggaatcctttaaagaacgcgacgatgtcggagcactcattatcacaggcagtggaaaggctttttgttcgggagcagatctgaaatggcttaccaaccaaagtaagtcgggaccttgcgtcaatcccaaggcccttcagatgctggatgatcttgccaacatggtgtgctgcgctgcta

SEQ ID NO: 590628 - DNA, 1515 bp, Homo sapiens
gaattctacgcagcgtcctgaggcgacccagaacaattgattattgtaatatgtttttcttctgattgttctctgtatgtgatagtgagtgagagaatgatactaatcacatatattttattcactacatattatatctgactacaacaacaaaaatctatacatatctatccataactatatctataaaataaaaataaacaaaatttatacaaataaatcatgcataataacaaacacataagtctgtttggtcagtacgagacgacagtcagcggataggcatcgccgagacgcgccggtcgatccagtcacagcagcctcgtcggcacagtctgcggacgcagtagagcagaagtcactgcgcaaccgtagaactctagctaagacaagaataacaggcgttagtaggacagtaggaggagagcagcgaagacagccaggacaacgccgcatcagctcagagcacgtggcctccgacagcacgcaaacggcagcctccagtccaggctcgacgtcgaagactaaccgcaagaagagcgggcgacgccgaggcgcagggggaggcaagagagaagagcagagaggagccggccgggagcgcgaggccagcggcagccgccgaccaaaggcacgagcaagcaagcagcagaggcagaggacaagagagcgagaacaaggcacaagcaccagaggcgcaacgaggcagacacggagagacgcaaaaggggacaaggcagacggcagagcagagcagcaaagagcagagagagaaccagaagaatcaggacacggagcaagcgcagaccaacaagcagagaagcacacgcgcagcaagcgcgagccatcgcagagacccgaagcaggcccagaccagcgcacacgcagacgcgagcggagagcagcgcagagcagacagagaagagacgagcgccgcggcaagcggagaagaacagcgcagggcaagcagcagcaataggcgcagaggcgcgagaagggaccagaggcgagaggacaggagagagaggacagcgaggcggaagagcaggggccaggaagcaggagaggagagaacgcacggcggcgagagcaggaagagtgaccgtgaagagcgaacacagagacgacgcacaggccggcgcgcgagcagccgcgagagagagagagcaagagcaggggaagagccgagagggcaagaagaagacaaagcacgaggaggagagcaggaggacgagcgagaaagcaggagagaggcacgagacgaggagagagaagctagagggccgtaggcagactgccggcaggaggagcgagcaggggagagagaaagagaggagacggcggagagcgacagggacgggcagggcagcagcgaggctgggtcagatcgagaagacgagagcggagaggagggagtggagcaagagcgccagggaagcagcaggcagtcaggaggctgacagagagggcagacagcgagccaagggcaagcgagagagacgcgaggagcagcaa

SEQ ID NO: 590629 - DNA, 342 bp, Homo sapiens
  misc_feature (61)..(61): n is a, c, g, or t
  misc_feature (152)..(152): n is a, c, g, or t
  misc_feature (168)..(168): n is a, c, g, or t
  misc_feature (220)..(220): n is a, c, g, or t
  misc_feature (245)..(245): n is a, c, g, or t
  misc_feature (254)..(254): n is a, c, g, or t
  misc_feature (283)..(283): n is a, c, g, or t
aaccaataagaatttctaaaggaaacctgatcttgctataaattgctgctgcttaaatggnaggccaactggtcagctgctgatcagggtgtcttaggctgaaggagttggagaccttgtgctaggtaggtgaaccagaaaccaccctggcnaccaagactcgctccnaacctggttcccggcaacctcaggtccttcctcgcccaggctttcacccttnttacagaaacttacctcggtctggntaccccacnaccagcagccttgtgcaatatttattggnttatcaatttctcccgtctccttgtcccaaagtaataaatcatgtttaataaaaaaaaa

SEQ ID NO: 590630 - DNA, 166 bp, Homo sapiens
catcctgggatactgctgcattcctctgccaggtagtcctctccatctccgagccagctacagcgagcattaacccctctcctgcttcgaatctcttacctcctcagattctgacctctaaatacaggtttaaagggctctggcaaatagatctagccccactgag

SEQ ID NO: 590631 - DNA, 300 bp, Homo sapiens
  misc_feature (88)..(88): n is a, c, g, or t
  misc_feature (214)..(214): n is a, c, g, or t
  misc_feature (218)..(218): n is a, c, g, or t
  misc_feature (226)..(226): n is a, c, g, or t
  misc_feature (244)..(244): n is a, c, g, or t
  misc_feature (247)..(247): n is a, c, g, or t
  misc_feature (250)..(250): n is a, c, g, or t
  misc_feature (266)..(267): n is a, c, g, or t
  misc_feature (272)..(272): n is a, c, g, or t
ggcccagttcgtgaggttcgacagctacgccgcgagttcgagagagagccgcgagcaccgtggatagagcaggaggggccggagtatngggaccggaacacacagatctacaaggcccaggcacagactgaccgagagagcctgcggaacctgcgcggctactacaaccagagcgaggccgggtctcacaccctccagagcatgtacggctgcnacgnggggccgnacgggcgcctcctccgcnggnatnaccagtacgcctacgnnggcanggattacatcgccctgaacgatgacctg

SEQ ID NO: 590632 - DNA, 185 bp, Homo sapiens
tagctcggaccgcgattgctctgagtcctcgtttattcactcagttggtttatagagtacctttttatgtgtcaggtctgttggtagggaaatagcaataaatagaaaagacaaaaaaatttgacagtcaaactagtaaaatatataaatacatagtatgcagtatgctttagagaattacaaag

SEQ ID NO: 590633 - DNA, 210 bp, Homo sapiens
agaacttgttatagtggataagtgaaatatggtagccggtgtatggtaaatagtatgggactcctgatatgtagcagaatgagatagaagaaaatatgacttttttatagcatcgtctgttattcattgctgtggaagagaagcatagaggagattttttatagattctagaatggcataaatgattagactgggctgtagcagagaatt

SEQ ID NO: 590634 - DNA, 303 bp, Homo sapiens
aagaactatggttctctgtttttagatattgtggatgagttattttttccagttttcaacaccataaagatttttgcagaatttctcaaaatcagtttgtggattccagtagtatttatattgagagacacacattttagtcctctaactgtgctaaaactcggatatttgtgaaactccttaccaccatacaagcatcagagagctctctgttgttagcactcatgttgcaagacagatacatcctttatcctctatgaaatgacagtgaggcaaagggaggtattgactgagagaggtcct

SEQ ID NO: 590635 - DNA, 167 bp, Homo sapiens
tcggtacctcctcgtcaaggccaggatcgcatctttgctgtcggccgacggtgccatcaacaccgaggatcccaagccccagctcgcccaagccgccatccagggaggcgagtgcgttgctcgtcagatcgttcacctcgagctcggcgagccgctggagaagttcg

SEQ ID NO: 590636 - DNA, 1231 bp, Homo sapiens
  misc_feature (428)..(428): n is a, c, g, or t
ggcctatgccccggtctctgctccggcggcggagaggagactatggaacgtcgaggtgcgtgctgagtcgagcccgaggaggtcgggcggctctgtatcgggggccttagccgccagcctcggtgctgaggcgccggactgcctgtgtgccctggacggtcaccatcagcagtacgggcggccaatatcgcggactggtgcagcacttgagtgtgtcccagaagggaccgtggaacggcatggagaacattcgcattctgccggcaagtatgcctgtcttggttatccactggaacgggtgggagcgtcacgtcgggggtgtgtctgccgagggtaaccctgtccaggggccaagcaagtctgtatgcggaggaacgcgcgagagggagggtaccactggcttggaagccacgacaagagagtgttcnttcgcctttgctgagaggcgacacttatgtggcaaacagccttgggtggccttaggtgccaacagggcatctggggcaggcggggaccggggtgcgcgcttgggggacggccacgaggaaggcataagcccaaagttgtccccgttggggccacgaggataccttggggaggggcaacgtcacacacgggaacgagcccctggggtgtgacaaggccccgtgtcccaacacagtgtaccgacggctgttggtccataaaaggaccccattgtgagtccatgaggagcgggcaccattgggggataacggcaaaaaatgacggcactttggggtgggcgcgattgggacatttgaagttcggcaccgtggccacctgcacaccgttgggcaataattgagggggcccaattgctcccattgggtagtccccagttgaggtgtataccggcccaagcagtcccgggggggaacggtaaacggacccgcaacccgatataatgggagtaagagggggcaacactatggattgggggagccaacgacaacggacacaaaccgcaaaacagaggcgaggtcagcgccccacccgacaaaagtggtgggaccccaggggagaggggatattaccaccagataagtacacagtattgagtaccagagagacaaatgacccaagcaagacagaagaggggagcaccgcgtagatggggggaaacaccacgaggtctcccatatgtagtagggccgaccaagacggaaacgggaaaccatcggagacacacttggccaggggcaccgcctca

SEQ ID NO: 590637 - DNA, 254 bp, Homo sapiens
atatcagaggacccgtactgcgctggatatctagaagtcctgggcttatacttggatatatacagaggaagttgacttcagtctgcactcttcaaatggtgaccggagaggacgtgataggaccagtaaaaaaaattgatagtcattctctgatggaagtgaagcaagctttgtcaaccatcaaaaaaatatgaactttcattggtcacaagcccctgcaaaagatcccaacaaagatttggagttttaaaata

SEQ ID NO: 590638 - DNA, 141 bp, Homo sapiens
  misc_feature (82)..(82): n is a, c, g, or t
tgatctgagatcttgtgctagggagtgagtgcagatctggttggtgggcttcactccaggttcaagcgatctaccactcagnctcctgaatagctgggactgaggtgccatcacataccagctaattttttaattttttaa

SEQ ID NO: 590639 - DNA, 743 bp, Homo sapiens
  misc_feature (432)..(432): n is a, c, g, or t
taacctaaagtaacctttatttccaaaatgctctcgaggtccaaaaaaaaacaagggcaaagtctaacaataattaacaaaccagctctgtgagcggcaaagtgccccagggatgaaaaggggccgttggggaattcgaacacagggtggttgtgggagaacacaacattttttctagccttcagaaaagtcgagggaagccccagaatcacagccgtgaaacttcagtggtatgggttacagattcttatacaagagggtgttatacctctctcatgaggctcttctggtgggattactctccctcagaaaaatctcattcattgtgaccatctccaagcaaccagcacgtggaatgtgtctcattcaagagccctcaaagtgtggaccgcctattaaagacagcggtgaaccgttgggggagactctcgntgtgctcctgtgcctgaaataaacgcccagggcttctcgagtggtgtgcgccatgatgcagctgtgctctctataaatatggcgcccacgctctcaaattctccttatgtctctcccctcccctccctgtgtggccccctctgtggggatcaccgaggctctctcttttcaaaacacaaaacacccgtgtgcggagagaaaacgccctgtgcgagaggcttaagaagtagaacgcccccagtgttaaagtgggtgaaccccgggagatatgggcaaaaaactccccccacagagcgggagcaaacaagcat

SEQ ID NO: 590640 - DNA, 385 bp, Homo sapiens
  misc_feature (31)..(31): n is a, c, g, or t
  misc_feature (140)..(140): n is a, c, g, or t
  misc_feature (195)..(197): n is a, c, g, or t
  misc_feature (199)..(199): n is a, c, g, or t
  misc_feature (201)..(201): n is a, c, g, or t
  misc_feature (214)..(214): n is a, c, g, or t
  misc_feature (228)..(228): n is a, c, g, or t
  misc_feature (235)..(235): n is a, c, g, or t
  misc_feature (240)..(240): n is a, c, g, or t
  misc_feature (260)..(260): n is a, c, g, or t
  misc_feature (299)..(301): n is a, c, g, or t
  misc_feature (332)..(332): n is a, c, g, or t
  misc_feature (336)..(336): n is a, c, g, or t
  misc_feature (338)..(338): n is a, c, g, or t
  misc_feature (340)..(340): n is a, c, g, or t
  misc_feature (379)..(379): n is a, c, g, or t
ggaatttgtatccccaggagtgtcaattttnttaccaaaatccaaacttaattttcatcagtgtgcccatttttataatgtgcttaccccagttgcaaatcactagttaacagtgtggagtgagaagttatactactgangatttcaaaatgtgcctcagcttatctaccttattatgactagaataattatagnnntnanataatatgcatangcacttagcatatngcctatnatcantactatgtagagagataganatgtgtgaaaatgggagtcttaccttaaggatgtaattnnncatccgtgtaagattaccaatattctataanatangngntgttacataactagaaagttgtagccattcaaccatttntctgga

SEQ ID NO: 590641 - DNA, 879 bp, Homo sapiens
aggtagttattactggcataccccaagtcagcaagctgtttatagagcaaaggcaaatatcgacgagcggttctgtccgcaagcagcacaaggagctctgggcacacaagcgaggtggaccccggcacccaagactgcctgacggcctctggtaaccttcctaccccctctgcggtaaggcctcggagccaggcacgggcggaaaggttggcgaaggaaggtcgagctgggcttgctgtgagggcgccacgcgtgagaaaggggatgaggcttgctcaggcgtaaggggactcatgggcagggctcttgctacaaggactccttgccttctgtccttctcccgcagccggtgagcggtattcggaaaccaggatttggggtctgctccaccacccgtgcgttcggtgacttcgtgtcagccatcccgtccccacctcaccaccaggaccccactgggaggcccccaagcccagctcccctattctaggctgccattatatctccagcaaggagtcaagcatgcccgcccgtcagggtcccagagctccctcactgccaccggagactgtgtggcccccagcgtctccccatctacgctctacccggtaacctgtttctgagccacggagacagggaggaaggagcagcgacagtgccacctgttgggcatcagtaaatgcccctgcagcccatgggggaggagatggggaagtggagccagccatgcactctgcagggcaaggcagggcctgccacagtggggcttgggaccatctcgaaccaccagcgtggagaagcagaagcaaaagcactcgccaggctgcagcctcaggcactggaggggctggtgcgccccacttacgtccccggtccattgtg

SEQ ID NO: 590642 - DNA, 204 bp, Homo sapiens
tttgtggacactttctggatgggggggggggacagggatcaaccatcttccagttgctttacggctaagatcaactacacccattgtgaggagaaccagatgattagggcctagcaaggcctgtgatcacaacggacacagactggcaccgtaccactgttcatgtactgactagctatgagtgaggcctgcatgatacaaagt

SEQ ID NO: 590643 - DNA, 783 bp, Homo sapiens
  misc_feature (347)..(347): n is a, c, g, or t
aggtctgagcgtgctggtatcagatcgacaacattgtggtctcggccgttttagtgggaagtagtgctctcccccgcgattggtggagaaagcaccatttgttcaagaacatggtttttatatataaaacatagtatcctcccgagtaattatgtgtgttaagcgccggcctacccgcgtcgtgtggtggtgctcccccgtattgacgccattgcgacggcctggttcgccgccccgttttttgatgcgggcgccccttgggggggtctctcccctccttaagttattgggggcgccatagagaacgcatgttgtctgtctttctattgatgacttgtgtgcgagcnttattacaatcgtccccatgcccgagtcttccttcttgagtaagcctcatcaaccacttgcgatcaagcgccgcccctcataggtgtgcgctcacacacgcagagacagtacgagagtgtggttagacaccccccggtgcgtgagagcgacacagaagagaaagaatatacagagtcgcccctctcccaccacccttttctcactcgacttggctgtctcttctatacagaggccgtctcggcacgacatatctgttgcttctctttgtaagcccaggcgcccccgtccccgtggcgcggtgtgatgaggagaatgttgctgaggtcgtggccattgggagagtatggtatgttgcggtactccatcgagagcgatgtctcccttctatgcggataaaatatccccgctgagtcagtcataacaatagacaaaaaa

SEQ ID NO: 590644 - DNA, 878 bp, Homo sapiens
  misc_feature (616)..(616): n is a, c, g, or t
ggccgggcgcatccattggccggagccgtaacaggggacccatcgccgcctcctcgctgccacagtgccatgaccagaccgcgttctcgagcgcggcacaggattggagggcagcccgccacgcggcagcgggagccggggtagccgtgacaggagtccactcatggcatgtgcgggatgtcgaggcaggatctccatgtaacatgtccccggaacctagagtaacacgtgtcatcctcaggcgacctggacgtggtggccccggatgaggcgtcaacaagtcataaaccgtgtgtgaatgtgagcgcacctcacggtgcagacacgaacttcgaggacaggcacaaaagtaaccacggtcctctgggcccagcttcactttgtggcaggtcgtcatcaaggagtgctgcccctttgcgacgtgcaccgcggggatatcctatatcaggttggtgatacacactagaacgaccttgaccgccgtcgcgcaaggatgcgactgctagaagtcaccgggtggttggccagagggggtcgactagtgcccctgtggtgagcccgcgagggcaactgctaagcacaaagccgagcgtcggtagactcaatgcatggcagnctatgacccaggccagtgtctcgtccgtgtggctgcgatggttcgtccgagctctttgcgcggggtcctcgaagctatgctctccgtgagatggcagtgagcgagtcgtcagcgtgcgttgcaatgggagctgcatttgtcagcgagcgtgtcagcatttctgcgccgccgtatcatgcgatgcatgccgtacagacgatctgcgtccactctccttacgcaggaatggggggaggccgctgcaaatcgatagagatacgtc

SEQ ID NO: 590645 - DNA, 127 bp, Homo sapiens
cagcttctctactcctcctacactaacctgactataaacattacctaaaacaatctcacagcaccaaatctccacctccatcatcacctcaaccccaaacggcatcattaaactattacttcctctc

SEQ ID NO: 590646 - DNA, 1206 bp, Homo sapiens
acactgtaaaaaacacgaataggatcaagatgtataaactgtagtttacttacgtgagaaacatcttcagtggccaagaactgtacatattctctacagaaagacacatgaaatagctacagctatacccagaccttttatagacggagtctcactctgtgtccaggctggagtgcaatggagcgatctcgagctcactgcaacctcagcctacccgggtaacaagcgattctcctgcctcagactacctgagatagctaggagatatacaggaaaactcaaggaagagaaagatgctagccaatcccactaccagacctgaggataataacaaggagaatcagtcaagaagcacaacctataccatgactatctgtgtctagaaccataccaatttccgtgatgtgacataatcagtttccttcattattcaacaccacacgtatacgctgaggttacatagttacttctacgagatacagtcgctaagaatactatgtacagacgacggtacgattactcacacacacacagataaccactgttcataacgcattagtgggacacacaagtaactaaggcccatgactagtttacaactcatccagtcatagcaccgtcatatatatatccttcatactcaaattcgaaagaacatataaacatctagacaggagaacagtagtaccagtgctaggccttactaggcatctatcaccatggtcatatatatacactgttgcagacattgttactaccaacaattaataatacattactgttgacataaaatagaataagaagagcatgaaaaaggatacagacatatgctagacacaattaaaaagacacaacgaaaaggatgacacaagaagagacatagcaagtaataggctgacaggcaggagactgcacaccacaggagagcgcagcatcatatcatcacgaggggaccccaggataaggcagactcgcaggactgtacaggaggaaccccggaagaggcgcgaaacgggcatcagagaggaacgaagaggagacaaaggaagcggaagcggaagtgggagacgcaggagaggcacacggctacatgccccacgcgaagagcgacgacagaacgcaaccagaggagacgagtagagtcggttagcaaacgcagtaggacgagacgaagacgacggcgaaacgaggcagtgacgcacacga

SEQ ID NO: 590647 - DNA, 401 bp, Homo sapiens
aggaggttatatattacagatatcaatattcaggagctagtaataggtctgtttacggaaaatcaatatcttcctggctcagttgtgggagggtgtatatctaccatgaatttatccatctctttgaagttttctagtttgtatgcatagaagtgtaagcagtagtttctagatggctagtatctatatactagtggggtcagtggtaacattccctattgtacatttctaattgtgtttcttacaatcatcctctgtattaagtctgctagcagactttcttattaaatattttcaagaaacctacccggaattcatagatcttctgaatttctataattcatgtctcggtttctttcagttcagctcagattttcagttatatcttgtcttcctctagc

SEQ ID NO: 590648 - DNA, 277 bp, Homo sapiens
tgaaatccgagagcagccgtggacaacatagagagaccctgtctcttaccaaaaaaaaacaacagagaatccggcggggatatgaagacctgtgcccgtatccccagctacttggaaggctgaccgaggaaaatggcttaagccagagaggtcaaggccgcagtgagccatgatggccccattgcaccccacccggggcaagagagagacccgtgtccaaaaaatattacataaataagtacaagggttacataccatgattttgccctcagggaaa

SEQ ID NO: 590649 - DNA, 276 bp, Homo sapiens
gcatcctgcaggttatctctaaatcatccccacggcttgcttgcttcagccagtcggtggtcctaacactctcctgtgtaaatttttatcactatagggatcatgcgatggactgggtccgccaggctccaggaaaggggctggagtgggtctcgaccattactgcgagtgggggtagcacattctatgccgactccgtgaggggccggttcaccgtctccagggacgcctccacaaacacagtgtttctgcaaatgacgagcctgggggccgccg

SEQ ID NO: 590650 - DNA, 123 bp, Homo sapiens
ggcttctgttctgccccgcccactgaaaaaacactaacgattgcactgacagacagaccccagagcgccaggcctcccacacacccacggggctgtcagagtcaaccagggttcttggtgagg

SEQ ID NO: 590651 - DNA, 162 bp, Homo sapiens
actggttatgtggttaggtacagctgcctcagcatattgtggtccctgtgggcggtggttaggtaacagcagcctctcaacatagtgggggttccctggggggcagacagttaggtaacagcagcccctcaacatcagggggttccctgggggacagttagg

SEQ ID NO: 590652 - DNA, 375 bp, Homo sapiens
  misc_feature (36)..(37): n is a, c, g, or t
  misc_feature (48)..(48): n is a, c, g, or t
cgtgttataaggggggtcatgcttccaaggaaaacnncaatggtcagncctcaacttccagtggacgcgtatatccaggccagaagtggaggctgaggtgtcaaccataatttaagctagagagaacccacacttaggagtcaaacctttttaaaaatctttacaaataaaatcaatgattatatcttttgggcataataattaagtgggtcaaacttacaaatcaatgctacaaaatacagtgtttcccattacttttagttgtaatgtacactatgtacagaaaagagttgcctatcttaagctgaatactgaagaacagcttgttaaaaaccagactctggacttataaacagggcagaaaatgcaaacgcc

SEQ ID NO: 590653 - DNA, 3557 bp, Homo sapiens
  misc_feature (1)..(3): n is a, c, g, or t
  misc_feature (13)..(13): n is a, c, g, or t
  misc_feature (21)..(21): n is a, c, g, or t
  misc_feature (3365)..(3366): n is a, c, g, or t
  misc_feature (3373)..(3373): n is a, c, g, or t
  misc_feature (3376)..(3377): n is a, c, g, or t
  misc_feature (3398)..(3400): n is a, c, g, or t
  misc_feature (3404)..(3404): n is a, c, g, or t
  misc_feature (3416)..(3416): n is a, c, g, or t
nnnaaggaaagcnccctgctnttgggaatctccaggatcccccgcaaatttccttccactcgaacaagtatttggcagtcttggagggcagaaaaggaggtggggaagatttttaaataacattttttaaaaagtcacattgtcctacaataccgatttttcttgcatatttaggaaattgagggtttttttctaaaacatgcggacatatgggaaataggatgcaacatttgcactaatgtttcagacacagttagaggtttccaagagattttgcgctggggaggctgcttgctacaagctcccaaagctctgggaggacatagtattcattcctccctcagcagaagcggtgaggcaagaagctctggggagcacccagcgttggacttttagcatagtgtgtcaggtcttcatagtttgggcccagggcacagagaagtcacagctctccggcatcctgtgacctttaccctctttgccaagggaaaatgtggcccaccaaagcaagaaacttgagggcatgggtcaccccagccctggcatctgcccagagcccgagaaggaaggaacaatgatcctccagctacctcacggggctggcacaggtgaccactgccctggcatcacccagctgtgtccggcagcctgaaccccatctgtggggatgcgaggaggaaaatacaaaagtccttaggtgaacactgagaaggcagatgcagcagaaacctccaggccagaactacccagtcttggacctatggtggagatagagcatagctggcgatcatgtgtacttacactctaaggtcacctggttgcactatggcctcatctgtggctctgaaaatgaagatttggaaggagatcatcacagctaatgtttaacaagcccctcctgtgtgccaaatcattcacccctcaccacaaccgaatgagctaaggattctcattatatatagtttatggagagggaagtgcagacataaagaggtgaattatcttacccagatcacacagctgataagtggtggaggcagaatagaatctaaacagtgtggctccggagcccacatgcattgattcgacaagtgtttattgagcacctgccgcggacaaggccttgtgtgattaaatagggttataattagtaatataaaaatgagaaatcactaatgctttttagacttaacattttctttttttgtaggtttcaggcacagaactgtatatccaataatagtgaaatggatcccactaattatgacagaaatgatgatacatttaaatgacttggatgttttataggtatgatctcgtgaaaccttgagagaaactgaatgacgaatgaaactattgttcctgtttcacacagaagaaaactgaggttaaaaggggtaaagtaattttgcatggcatgaagtagaaattcaaagtacaggaatttgaacttggttctgtccttttctgaagcccttgaccactatagactcaaacatcaccttgtttttccactcattcaacacttttttttttaaattatctaataggttggcactcatcatgagcccctgttctcattctgcaaatggtgaagctctctattgtcctgaccccacagttcctgtcccatgaccagggccagctcaccaaggagctgcagcagcatgtaaagtcagtgacatgcccatgcgagtacctgaggaagacgatcctacacctgccacctccgatggatccactgcctctgtgcctgcctgtactgctgatgctccagtggataactcagcatcccagcctaggcccaatgccactgaagatggacctgccccctggggacccaggagtcctaccactcagctgtccccaggagtgcccagaccctcattcttatccaggacctaggagccctacccctggccttccctcatcagccgtaaatgatgatttactgctgttaccatcatcactgccttcagtgaccaagggccttccaaggtgccagctctggaacgaaggatgcccttgggaggtgatgacactcaggtacacgggtgctcaacagattgcttcctcctatcctcagacggtctttgcatgcatgcagccattggcactcccattgtgtggaaggaaaccagcccagggtcacacagctggtcagcagcaacatagctggtctcaaatctaaggtgcctgaccatgcctccatgagggaccgcctccaagggaggttgatcctggctttggggagcctttcctgggctgcacgaataacctccattgttcgagaccccaaactctgctcacatcttcctttccctatctctgcttgggctatgatcacggtgactctagcagcccttcatggacattatagtactctctgccattcacttttgctctaatctgacttcaacccccctgtacacaactcactccttttaaagaaaaaaattgaaatgtaaggctgtgtaagatttgtttttaaactgtacagtgtctttttttgtatagttaacacactaccgaatgtgtctttagatagccctgtcctggtggtattttcaatagccactaaccttgcctggtacagtatgggggttgtaaattggcatggaaatttaaagcaggttcttgttggtgcacagcacaaattagttatatatggggatggtagttttttcatcttcagttgtctctgatgcagcttatacgaaataattgttgttctgttaactgaataccactctgtaattgcaaaaaaaaaaaagttgcagctgtttggtggacattctgaatgcttctaagtaaatacaattttttttattaagtatggtggtcctttccataggtctgaaatttttcttctggaggggaagctagtctttggctttggcccattttggaattcacatgaatttattacaggggtttatcctttcatatagttagctaataaaaagctttggtctacacacccggcatatcataatggggggtaaagtcaagtggagatagtttccatccataactggaacttccaaaatctggatcagttaagaaaatttcacatagcccatttacttttacaaactggaagagtaatcaatctactcaaagcatgggattatagaatcaaaccttttggaaagtctgtccttgaaggactaatagaaaagtttgtcctaccctttacatgaggactctattctttaactcccattaccatgtaatggcagtatattgtgcagtccccacattaaagaagacctgagaatgtatccccaaaagggtgagttaaaatacaagatgccatattaaattttggtggacataagtctcgctgaagactatgaaatgcnngctatanganngtctttcccatttatctaaannntggnctgtcaggaaangagacttccttacaagtatttcaatcacgtgggccagctttcaaacaaaaatgccctcaaaaaggtatattcccaatataggttgcccttaaaatccagtgaaggagaaaagacattggtcccgtgattaatatgaaatca

SEQ ID NO: 590654 - DNA, 115 bp, Homo sapiens
tttatgtggtaaatacatgtcacatacattttaccattttaataatgttttcagtgtaccgtgaagtggcattaagtacagtaaaaaaaaacattatttaataaggatcccctag

SEQ ID NO: 590655 - DNA, 1472 bp, Homo sapiens
  misc_feature (1280)..(1281): n is a, c, g, or t
  misc_feature (1288)..(1288): n is a, c, g, or t
  misc_feature (1291)..(1292): n is a, c, g, or t
  misc_feature (1313)..(1315): n is a, c, g, or t
  misc_feature (1319)..(1319): n is a, c, g, or t
  misc_feature (1331)..(1331): n is a, c, g, or t
cctaccaagagctcggatctatctgtcgattctcctcttatcgaacaccgtcttaccacgacttcacggtgttattatttttttaaactaaggtgctcaaccccgttcaaccgttaattgcccaggcacacagttcccccagccattccaataaggtccttttagtataaatactttggttcaacccgctttaatcgaatgaatgcccttaaccctccaaaaaaggggattttccaagcctgaaaaacccaagacaaagaaggaagaggaggaagatgaggaagatgaagaggatgaggaggaggaggaagattcttgtctataaagcatttaacccccctgtacacaactcactccttttaaagaaaaaaattgaaatgtaaggctgtgtaagatttgtttttaaactgtacagtgtctttttttgtatagttaacacactaccgaatgtgtctttagatagccctgtcctggtggtattttcaatagccactaaccttgcctggtacagtatgggggttgtaaattggcatggaaatttaaagcaggttcttgttggtgcacagcacaaattagttatatatggggatggtagttttttcatcttcagttgtctctgatgcagcttatacgaaataattgttgttctgttaactgaataccactctgtaattgcaaaaaaaaaaaagttgcagctgtttggtggacattctgaatgcttctaagtaaatacaattttttttattaagtatggtggtcctttccataggtctgaaatttttcttctggaggggaagctagtctttggctttggcccattttggaattcacatgaatttattacaggggtttatcctttcatatagttagctaataaaaagctttggtctacacacccggcatatcataatggggggtaaagtcaagtggagatagtttccatccataactggaacttccaaaatctggatcagttaagaaaatttcacatagcccatttacttttacaaactggaagagtaatcaatctactcaaagcatgggattatagaatcaaaccttttggaaagtctgtccttgaaggactaatagaaaagtttgtcctaccctttacatgaggactctattctttaactcccattaccatgtaatggcagtatattgtgcagtccccacattaaagaagacctgagaatgtatccccaaaagggtgagttaaaatacaagatgccatattaaattttggtggacataagtctcgctgaagactatgaaatgcnngctatanganngtctttcccatttatctaaannntggnctgtcaggaaangagacttccttacaagtatttcaatcacgtgggccagctttcaaacaaaaatgccctcaaaaaggtatattcccaatataggttgcccttaaaatccagtgaaggagaaaagacattggtcccgtgattaatatgaaatca

SEQ ID NO: 590656 - DNA, 258 bp, Homo sapiens
ctgactacggcggaagcagcagtgcaagtgaaggtcttcccatgggtccatgggtcggcaccaccggcaggacactggacacgctgtagagccacagaggtgacgctcaggtggtgcttgaacagagctcttcccacttgagggcgtgcaggtgaaggtgacacctgaggcatctctcaaggcggtcagtgtgcacgtgagggtcgcttctgaacctaagaacaagtccttgagggccggtcggtgcaatgacagtcg

SEQ ID NO: 590657 - DNA, 231 bp, Homo sapiens
ctgcactagaggatccccgtcccaaggatgagaaagttgtccagcacaaaggtatctgctaatgatgaccatatctggcattgttatgaaatctgtcagcttctcagattgtcctctttattttttattgttatatttttgagacagagtctcgctctgtcgtcctggctggagtgcagtgactctcacctcggctcactgcaaccgtcgtctcccgggttcaagcaattc

SEQ ID NO: 590658 - DNA, 2674 bp, Homo sapiens
  misc_feature (2482)..(2483): n is a, c, g, or t
  misc_feature (2490)..(2490): n is a, c, g, or t
  misc_feature (2493)..(2494): n is a, c, g, or t
  misc_feature (2515)..(2517): n is a, c, g, or t
  misc_feature (2521)..(2521): n is a, c, g, or t
  misc_feature (2533)..(2533): n is a, c, g, or t
gtaaaaacgaccgctagtgagtgccaaatcattcatcctagctgtttcctcgaaggaaagagggcctgattatatatagtttatggagagggaagtgcagacataaagaggtgaattatcttacccagatcacacagctgataagtggtggaggcagaatagaatctaaacagtgtggctccggagcccacatgcattgattcgacaagtgtttattgagcacctgccgcggacaaggccttgtgtgattaaatagggttataattagtaatataaaaatgagaaatcactaatgctttttagacttaacattttctttttttgtaggtttcaggcacagaactgtatatccaataatagtgaaatggatcccactaattatgacagaaatgatgatacatttaaatgacttggatgttttataggtatgatctcgtgaaaccttgagagaaactgaatgacgaatgaaactattgttcctgtttcacacagaagaaaactgaggttaaaaggggtaaagtaattttgcatggcatgaagtagaaattcaaagtacaggaatttgaacttggttctgtccttttctgaagcccttgaccactatagactcaaacatcaccttgtttttccactcattcaacacttttttttttaaattatctaataggttggcactcatcatgagcccctgttctcattctgcaaatggtgaagctctctattgtcctgaccccacagttcctgtcccatgaccagggccagctcaccaaggagctgcagcagcatgtaaagtcagtgacatgcccatgcgagtacctgaggaagacgatcctacacctgccacctccgatggatccactgcctctgtgcctgcctgtactgctgatgctccagtggataactcagcatcccagcctaggcccaatgccactgaagatggacctgccccctggggacccaggagtcctaccactcagctgtccccaggagtgcccagaccctcattcttatccaggacctaggagccctacccctggccttccctcatcagccgtaaatgatgatttactgctgttaccatcatcactgccttcagtgaccaagggccttccaaggtgccagctctggaacgaaggatgcccttgggaggtgatgacactcaggtacacgggtgctcaacagattgcttcctcctatcctcagacggtctttgcatgcatgcagccattggcactcccattgtgtggaaggaaaccagcccagggtcacacagctggtcagcagcaacatagctggtctcaaatctaaggtgcctgaccatgcctccatgagggaccgcctccaagggaggttgatcctggctttggggagcctttcctgggctgcacgaataacctccattgttcgagaccccaaactctgctcacatcttcctttccctatctctgcttgggctatgatcacggtgactctagcagcccttcatggacattatagtactctctgccattcacttttgctctaatctgacttcaacccccctgtacacaactcactccttttaaagaaaaaaattgaaatgtaaggctgtgtaagatttgtttttaaactgtacagtgtctttttttgtatagttaacacactaccgaatgtgtctttagatagccctgtcctggtggtattttcaatagccactaaccttgcctggtacagtatgggggttgtaaattggcatggaaatttaaagcaggttcttgttggtgcacagcacaaattagttatatatggggatggtagttttttcatcttcagttgtctctgatgcagcttatacgaaataattgttgttctgttaactgaataccactctgtaattgcaaaaaaaaaaaagttgcagctgtttggtggacattctgaatgcttctaagtaaatacaattttttttattaagtatggtggtcctttccataggtctgaaatttttcttctggaggggaagctagtctttggctttggcccattttggaattcacatgaatttattacaggggtttatcctttcatatagttagctaataaaaagctttggtctacacacccggcatatcataatggggggtaaagtcaagtggagatagtttccatccataactggaacttccaaaatctggatcagttaagaaaatttcacatagcccatttacttttacaaactggaagagtaatcaatctactcaaagcatgggattatagaatcaaaccttttggaaagtctgtccttgaaggactaatagaaaagtttgtcctaccctttacatgaggactctattctttaactcccattaccatgtaatggcagtatattgtgcagtccccacattaaagaagacctgagaatgtatccccaaaagggtgagttaaaatacaagatgccatattaaattttggtggacataagtctcgctgaagactatgaaatgcnngctatanganngtctttcccatttatctaaannntggnctgtcaggaaangagacttccttacaagtatttcaatcacgtgggccagctttcaaacaaaaatgccctcaaaaaggtatattcccaatataggttgcccttaaaatccagtgaaggagaaaagacattggtcccgtgattaatatgaaatca

SEQ ID NO: 590659 - DNA, 618 bp, Homo sapiens
gatcgtcgcgaggggcggggcgcctgtcagggaagcggcgcgcgcgcgggcgggggcgggctggggatccgccgtgcagtgccagcgcagcgccagacccggcccggctctccggcccgtcgctgtcttgggactcgcgagcccgatcccgcctgctgtcgctgccgatatggagctgctgtgttgcgaaggcacccggcacgcgcgccgggccgggccggacccgcggctgctggggaccagcgtgtcctgcagagcctggtccgcctggaggagcgctacgtaccccgcgcctcctacttccagtgcgtgcagcgggaatcaagccgcaacatgcagaagatgctaggcttactggatgctggagggatgtgaggagcagcgctgtgaggaggaagtcttcgccccggacatgaactaactggatacgctacctgtcttgcgtcccccacccggaaaggggcacgttgacaagggtcctgaggtgcgggtcctggattggctgctgggctaccaatgctggagcgaagaaccacggcccctggaccaagccgaaaaagtgtgcacatctaaaaccggaccaggcttgtctactccccgcaaggttggcggagactg

SEQ ID NO: 590660 - DNA, 2107 bp, Homo sapiens
  misc_feature (39)..(41): n is a, c, g, or t
  misc_feature (43)..(44): n is a, c, g, or t
  misc_feature (46)..(46): n is a, c, g, or t
  misc_feature (48)..(49): n is a, c, g, or t
  misc_feature (51)..(52): n is a, c, g, or t
  misc_feature (62)..(62): n is a, c, g, or t
  misc_feature (66)..(66): n is a, c, g, or t
  misc_feature (76)..(76): n is a, c, g, or t
  misc_feature (131)..(131): n is a, c, g, or t
  misc_feature (1915)..(1916): n is a, c, g, or t
  misc_feature (1923)..(1923): n is a, c, g, or t
  misc_feature (1926)..(1927): n is a, c, g, or t
  misc_feature (1948)..(1950): n is a, c, g, or t
  misc_feature (1954)..(1954): n is a, c, g, or t
  misc_feature (1966)..(1966): n is a, c, g, or t
atgcatgtattgtgctaaacactctcccaaaacatcgtnnngnntnanncnncctctttgtnccantggccctggntgactcaagtgcccattcaatgaccaggacacagaggtcttagagagatgctccntgaggccccaggtgcgagcctgtaccctgccggagcatgaggcaagggacagggcatcgtctgtggggatagtgggggtagtgggggtagtggtcagccagatttggtgactctacttgctcaccagacgatcctacacctgccacctccgatggatccactgcctctgtgcctgcctgtactgctgatgctccagtggataactcagcatcccagcctaggcccaatgccactgaagatggacctgccccctggggacccaggagtcctaccactcagctgtccccaggagtgcccagaccctcattcttatccaggacctaggagccctacccctggccttccctcatcagccgtaaatgatgatttactgctgttaccatcatcactgccttcagtgaccaagggccttccaaggtgccagctctggaacgaaggatgcccttgggaggtgatgacactcaggtacacgggtgctcaacagattgcttcctcctatcctcagacggtctttgcatgcatgcagccattggcactcccattgtgtggaaggaaaccagcccagggtcacacagctggtcagcagcaacatagctggtctcaaatctaaggtgcctgaccatgcctccatgagggaccgcctccaagggaggttgatcctggctttggggagcctttcctgggctgcacgaataacctccattgttcgagaccccaaactctgctcacatcttcctttccctatctctgcttgggctatgatcacggtgactctagcagcccttcatggacattatagtactctctgccattcacttttgctctaatctgacttcaacccccctgtacacaactcactccttttaaagaaaaaaattgaaatgtaaggctgtgtaagatttgtttttaaactgtacagtgtctttttttgtatagttaacacactaccgaatgtgtctttagatagccctgtcctggtggtattttcaatagccactaaccttgcctggtacagtatgggggttgtaaattggcatggaaatttaaagcaggttcttgttggtgcacagcacaaattagttatatatggggatggtagttttttcatcttcagttgtctctgatgcagcttatacgaaataattgttgttctgttaactgaataccactctgtaattgcaaaaaaaaaaaagttgcagctgtttggtggacattctgaatgcttctaagtaaatacaattttttttattaagtatggtggtcctttccataggtctgaaatttttcttctggaggggaagctagtctttggctttggcccattttggaattcacatgaatttattacaggggtttatcctttcatatagttagctaataaaaagctttggtctacacacccggcatatcataatggggggtaaagtcaagtggagatagtttccatccataactggaacttccaaaatctggatcagttaagaaaatttcacatagcccatttacttttacaaactggaagagtaatcaatctactcaaagcatgggattatagaatcaaaccttttggaaagtctgtccttgaaggactaatagaaaagtttgtcctaccctttacatgaggactctattctttaactcccattaccatgtaatggcagtatattgtgcagtccccacattaaagaagacctgagaatgtatccccaaaagggtgagttaaaatacaagatgccatattaaattttggtggacataagtctcgctgaagactatgaaatgcnngctatanganngtctttcccatttatctaaannntggnctgtcaggaaangagacttccttacaagtatttcaatcacgtgggccagctttcaaacaaaaatgccctcaaaaaggtatattcccaatataggttgcccttaaaatccagtgaaggagaaaagacattggtcccgtgattaatatgaaatca

SEQ ID NO: 590661 - DNA, 127 bp, Homo sapiens
agcggtaaacaatcacttgtatctcattaattcattcaatacatatataccacacatgggttttaggcttatgatggctgtagccagtataacagacatatcaaacctttagctagtcacggagctg

SEQ ID NO: 590662 - DNA, 3782 bp, Homo sapiens
  misc_feature (60)..(60): n is a, c, g, or t
  misc_feature (67)..(67): n is a, c, g, or t
  misc_feature (70)..(70): n is a, c, g, or t
  misc_feature (73)..(73): n is a, c, g, or t
  misc_feature (3769)..(3769): n is a, c, g, or t
cattgtgtgtttgcagctggtcaggctggtctcgaactcctgacctcaggtgatccaccngtctcgnctngantagctgagattacaggcatgtgccaccaggcatggctaatttttgtatttttagtggagacagggtttcactctattaggctggtctggaactcccgacctcaggtgatccacgtgcctttgtctcccaaagtgctgggattacaggcatgagtgacggtgcccagccattcgtgacatgtttatacaaatataactttagcaaatatttagcataactatcaaaattacaaatcatattaaatttgtataaatgtatgcaatttttggaacacgcatatcaacaacatacccataaatataactgagatgagatctaatgtcacctcacttgacagtgccctcccatgcagtatcgccacatttgacaatgcctgcccatttaatctaccaaataaatcgaatcacttaatacctctacaagatgagagatacattctttagactccccaagggatgcagctgaaaaaaatcccaaagttagttttaagccaaaaagacttgatttaggattttgacactggagaaacccatcaaagatgtcaagtttgaaaacacttgatcaaaacagaatcacaggtcactattaaaagagtattaatttaaccagagacttccaaagcaatacagaaacttacatggatataaaaaccctaacccttttaaaggtcagatttgctaagtgatcaaaaggggtacttgaattgaatcgacacaggaagagtgtgtacagggttatgagtgtaggcagatggttactttggtcatatctccatttgccacctgattacacatgagaatggcatctttactcaccagaaagccagtattataggaggtgtaggaggcattcttggacttgagacaagaacattgttgtgtagaaatttcattgactgtgttaaaattattctccatgggctggagaacacataacatggcctttagaatgagacgggcattgattggatgcaaggtctccacacttactagctgtgtgacattggacagagtgcttcatcattccgagactcagtttttaaaggaaaaacaactaactaccttgcaagcttgctagcaggtttaagtgtaataatgtgtgggaatgactgcaccgtgactaacatgcagtgacagcttaattaatgttaacccttatcattatcatataagaatgtgagttacataagagaggagtcctgtcagttcgttctctgctgtgtccccaagaccatgaatcatggctggcatgtagtaggcatttaataatatatgttcaacaagtatttggcagtcttggagggcagaaaaggaggtggggaagatttttaaataacattttttaaaaagtcacattgtcctacaataccgatttttcttgcatatttaggaaattgagggtttttttctaaaacatgcggacatatgggaaataggatgcaacatttgcactaatgtttcagacacagttagaggtttccaagagattttgcgctggggaggctgcttgctacaagctcccaaagctctgggaggacatagtattcattcctccctcagcagaagcggtgaggcaagaagctctggggagcacccagcgttggacttttagcatagtgtgtcaggtcttcatagtttgggcccagggcacagagaagtcacagctctccggcatcctgtgacctttaccctctttgccaagggaaaatgtggcccaccaaagcaagaaacttgagggcatgggtcaccccagccctggcatctgcccagagcccgagaaggaaggaacaatgatcctccagctacctcacggggctggcacaggtgaccactgccctggcatcacccagctgtgtccggcagcctgaaccccatctgtggggatgcgaggaggaaaatacaaaagtccttaggtgaacactgagaaggcagatgcagcagaaacctccaggccagaactacccagtcttggacctatggtggagatagagcatagctggcgatcatgtgtacttacactctaaggtcacctggttgcactatggcctcatctgtggctctgaaaatgaagatttggaaggagatcatcacagctaatgtttaacaagcccctcctgtgtgccaaatcattcacccctcaccacaaccgaatgagctaaggattctcattatatatagtttatggagagggaagtgcagacataaagaggtgaattatcttacccagatcacacagctgataagtggtggaggcagaatagaatctaaacagtgtggctccggagcccacatgcattgattcgacaagtgtttattgagcacctgccgcggacaaggccttgtgtgattaaatagggttataattagtaatataaaaatgagaaatcactaatgctttttagacttaacattttctttttttgtaggtttcaggcacagaactgtatatccaataatagtgaaatggatcccactaattatgacagaaatgatgatacatttaaatgacttggatgttttataggtatgatctcgtgaaaccttgagagaaactgaatgacgaatgaaactattgttcctgtttcacacagaagaaaactgaggttaaaaggggtaaagtaattttgcatggcatgaagtagaaattcaaagtacaggaatttgaacttggttctgtccttttctgaagcccttgaccactatagactcaaacatcaccttgtttttccactcattcaacacttttttttttaaattatctaataggttggcactcatcatgagcccctgttctcattctgcaaatggtgaagctctctattgtcctgaccccacagttcctgtcccatgaccagggccagctcaccaaggagctgcagcagcatgtaaagtcagtgacatgcccatgcgagtacctgaggaagacgatcctacacctgccacctccgatggatccactgcctctgtgcctgcctgtactgctgatgctccagtggataactcagcatcccagcctaggcccaatgccactgaagatggacctgccccctggggacccaggagtcctaccactcagctgtccccaggagtgcccagaccctcattcttatccaggacctaggagccctacccctggccttccctcatcagccgtaaatgatgatttactgctgttaccatcatcactgccttcagtgaccaagggccttccaaggtgccagctctggaacgaaggatgcccttgggaggtgatgacactcaggtacacgggtgctcaacagattgcttcctcctatcctcagacggtctttgcatgcatgcagccattggcactcccattgtgtggaaggaaaccagcccagggtcacacagctggtcagcagcaacatagctggtctcaaatctaaggtgcctgaccatgcctccatgagggaccgcctccaagggaggttgatcctggctttggggagcctttcctgggctgcacgaataacctccattgttcgagaccccaaactctgctcacatcttcctttccctatctctgcttgggctatgatcacggtgactctagcagcccttcatggacattatagtactctctgccattcacttttgctctaatctgacttcaacccccacttacttggtctctccttttacaacacacacacaacacatctaggagcgctactgntacgagctgatgt

SEQ ID NO: 590663 - DNA, 555 bp, Homo sapiens
atgtcgatctagaggtccccgggcagtacggatgtggaggttgagtgagccaagattgtgccactgtactccagtctggtgtgacagagcaagacggtctcaaaaaaaaaaaaaaaagaggatccaggggatacaaggtagatttggtagggggctgataacccaaggacagtttcctccacccttttctttggggccagagtggaccatttccagaattcatcattgtgtcacgatgactttttgggtgggtaaatatgattaattggcttccctggggacttcaagggctccgggaaataacttgcaaacatttggtgcaagtctcaggtggggagatgggtgagggggtgggcaatatgggggcgagggagggtccatatccttcatcagcttctcagggggttcttccaggaggtacagggggagggctggggtggggtcaatgacatgtgctagagccagcacccggggggccaccggggtgttgctcccccatttcaaacggtgtagctagcgggagggaactcctggtctacttggaaatcgtggggg

SEQ ID NO: 590664 - DNA, 3482 bp, Homo sapiens
  misc_feature (60)..(60): n is a, c, g, or t
  misc_feature (67)..(67): n is a, c, g, or t
  misc_feature (70)..(70): n is a, c, g, or t
  misc_feature (73)..(73): n is a, c, g, or t
cattgtgtgtttgcagctggtcaggctggtctcgaactcctgacctcaggtgatccaccngtctcgnctngantagctgagattacaggcatgtgccaccaggcatggctaatttttgtatttttagtggagacagggtttcactctattaggctggtctggaactcccgacctcaggtgatccacgtgcctttgtctcccaaagtgctgggattacaggcatgagtgacggtgcccagccattcgtgacatgtttatacaaatataactttagcaaatatttagcataactatcaaaattacaaatcatattaaatttgtataaatgtatgcaatttttggaacacgcatatcaacaacatacccataaatataactgagatgagatctaatgtcacctcacttgacagtgccctcccatgcagtatcgccacatttgacaatgcctgcccatttaatctaccaaataaatcgaatcacttaatacctctacaagatgagagatacattctttagactccccaagggatgcagctgaaaaaaatcccaaagttagttttaagccaaaaagacttgatttaggattttgacactggagaaacccatcaaagatgtcaagtttgaaaacacttgatcaaaacagaatcacaggtcactattaaaagagtattaatttaaccagagacttccaaagcaatacagaaacttacatggatataaaaaccctaacccttttaaaggtcagatttgctaagtgatcaaaaggggtacttgaattgaatcgacacaggaagagtgtgtacagggttatgagtgtaggcagatggttactttggtcatatctccatttgccacctgattacacatgagaatggcatctttactcaccagaaagccagtattataggaggtgtaggaggcattcttggacttgagacaagaacattgttgtgtagaaatttcattgactgtgttaaaattattctccatgggctggagaacacataacatggcctttagaatgagacgggcattgattggatgcaaggtctccacacttactagctgtgtgacattggacagagtgcttcatcattccgagactcagtttttaaaggaaaaacaactaactaccttgcaagcttgctagcaggtttaagtgtaataatgtgtgggaatgactgcaccgtgactaacatgcagtgacagcttaattaatgttaacccttatcattatcatataagaatgtgagttacataagagaggagtcctgtcagttcgttctctgctgtgtccccaagaccatgaatcatggctggcatgtagtaggcatttaataatatatgttcaacaagtatttggcagtcttggagggcagaaaaggaggtggggaagatttttaaataacattttttaaaaagtcacattgtcctacaataccgatttttcttgcatatttaggaaattgagggtttttttctaaaacatgcggacatatgggaaataggatgcaacatttgcactaatgtttcagacacagttagaggtttccaagagattttgcgctggggaggctgcttgctacaagctcccaaagctctgggaggacatagtattcattcctccctcagcagaagcggtgaggcaagaagctctggggagcacccagcgttggacttttagcatagtgtgtcaggtcttcatagtttgggcccagggcacagagaagtcacagctctccggcatcctgtgacctttaccctctttgccaagggaaaatgtggcccaccaaagcaagaaacttgagggcatgggtcaccccagccctggcatctgcccagagcccgagaaggaaggaacaatgatcctccagctacctcacggggctggcacaggtgaccactgccctggcatcacccagctgtgtccggcagcctgaaccccatctgtggggatgcgaggaggaaaatacaaaagtccttaggtgaacactgagaaggcagatgcagcagaaacctccaggccagaactacccagtcttggacctatggtggagatagagcatagctggcgatcatgtgtacttacactctaaggtcacctggttgcactatggcctcatctgtggctctgaaaatgaagatttggaaggagatcatcacagctaatgtttaacaagcccctcctgtgtgccaaatcattcacccctcaccacaaccgaatgagctaaggattctcattatatatagtttatggagagggaagtgcagacataaagaggtgaattatcttacccagatcacacagctgataagtggtggaggcagaatagaatctaaacagtgtggctccggagcccacatgcattgattcgacaagtgtttattgagcacctgccgcggacaaggccttgtgtgattaaatagggttataattagtaatataaaaatgagaaatcactaatgctttttagacttaacattttctttttttgtaggtttcaggcacagaactgtatatccaataatagtgaaatggatcccactaattatgacagaaatgatgatacatttaaatgacttggatgttttataggtatgatctcgtgaaaccttgagagaaactgaatgacgaatgaaactattgttcctgtttcacacagaagaaaactgaggttaaaaggggtaaagtaattttgcatggcatgaagtagaaattcaaagtacaggaatttgaacttggttctgtccttttctgaagcccttgaccactatagactcaaacatcaccttgtttttccactcattcaacacttttttttttaaattatctaataggttggcactcatcatgagcccctgttctcattctgcaaatggtgaagctctctattgtcctgaccccacagttcctgtcccatgaccagggccagctcaccaaggagctgcagcagcatgtaaagtcagtgacatgcccatgcgagtacctgaggaaggtgagtgagtgcagacagatggggcctggtgcccttgagcagttcccgggtctcagctgccacacatctcatagccggtgatgctgggggaagcttacgcagtcacagtactggcttcttcctctttttctttccatacaagtggcttagggatggggtagagtagttgacttatttggatgaaaaccactatcttctgtcagaaactcaaaaggaatcattgctggcatggtaacctaaagaaaaacaaccagacaagtgcccaacgacacttaaaaaggtgatttattatcttgccaagtttaggctgggcatggtgactcatgcctctaatcccaaagtgctgggactataggtgtgagccgctgcacccggtccaagtaaaattattttaacaatatactatgaagagaaaaacactggctatgaaagaatatgcatagttttaccctgtttaaaaataaagattgaaagaatacatatgca

SEQ ID NO: 590665 - DNA, 3356 bp, Homo sapiens
  misc_feature (60)..(60): n is a, c, g, or t
  misc_feature (67)..(67): n is a, c, g, or t
  misc_feature (70)..(70): n is a, c, g, or t
  misc_feature (73)..(73): n is a, c, g, or t
cattgtgtgtttgcagctggtcaggctggtctcgaactcctgacctcaggtgatccaccngtctcgnctngantagctgagattacaggcatgtgccaccaggcatggctaatttttgtatttttagtggagacagggtttcactctattaggctggtctggaactcccgacctcaggtgatccacgtgcctttgtctcccaaagtgctgggattacaggcatgagtgacggtgcccagccattcgtgacatgtttatacaaatataactttagcaaatatttagcataactatcaaaattacaaatcatattaaatttgtataaatgtatgcaatttttggaacacgcatatcaacaacatacccataaatataactgagatgagatctaatgtcacctcacttgacagtgccctcccatgcagtatcgccacatttgacaatgcctgcccatttaatctaccaaataaatcgaatcacttaatacctctacaagatgagagatacattctttagactccccaagggatgcagctgaaaaaaatcccaaagttagttttaagccaaaaagacttgatttaggattttgacactggagaaacccatcaaagatgtcaagtttgaaaacacttgatcaaaacagaatcacaggtcactattaaaagagtattaatttaaccagagacttccaaagcaatacagaaacttacatggatataaaaaccctaacccttttaaaggtcagatttgctaagtgatcaaaaggggtacttgaattgaatcgacacaggaagagtgtgtacagggttatgagtgtaggcagatggttactttggtcatatctccatttgccacctgattacacatgagaatggcatctttactcaccagaaagccagtattataggaggtgtaggaggcattcttggacttgagacaagaacattgttgtgtagaaatttcattgactgtgttaaaattattctccatgggctggagaacacataacatggcctttagaatgagacgggcattgattggatgcaaggtctccacacttactagctgtgtgacattggacagagtgcttcatcattccgagactcagtttttaaaggaaaaacaactaactaccttgcaagcttgctagcaggtttaagtgtaataatgtgtgggaatgactgcaccgtgactaacatgcagtgacagcttaattaatgttaacccttatcattatcatataagaatgtgagttacataagagaggagtcctgtcagttcgttctctgctgtgtccccaagaccatgaatcatggctggcatgtagtaggcatttaataatatatgttcaacaagtatttggcagtcttggagggcagaaaaggaggtggggaagatttttaaataacattttttaaaaagtcacattgtcctacaataccgatttttcttgcatatttaggaaattgagggtttttttctaaaacatgcggacatatgggaaataggatgcaacatttgcactaatgtttcagacacagttagaggtttccaagagattttgcgctggggaggctgcttgctacaagctcccaaagctctgggaggacatagtattcattcctccctcagcagaagcggtgaggcaagaagctctggggagcacccagcgttggacttttagcatagtgtgtcaggtcttcatagtttgggcccagggcacagagaagtcacagctctccggcatcctgtgacctttaccctctttgccaagggaaaatgtggcccaccaaagcaagaaacttgagggcatgggtcaccccagccctggcatctgcccagagcccgagaaggaaggaacaatgatcctccagctacctcacggggctggcacaggtgaccactgccctggcatcacccagctgtgtccggcagcctgaaccccatctgtggggatgcgaggaggaaaatacaaaagtccttaggtgaacactgagaaggcagatgcagcagaaacctccaggccagaactacccagtcttggacctatggtggagatagagcatagctggcgatcatgtgtacttacactctaaggtcacctggttgcactatggcctcatctgtggctctgaaaatgaagatttggaaggagatcatcacagctaatgtttaacaagcccctcctgtgtgccaaatcattcacccctcaccacaaccgaatgagctaaggattctcattatatatagtttatggagagggaagtgcagacataaagaggtgaattatcttacccagatcacacagctgataagtggtggaggcagaatagaatctaaacagtgtggctccggagcccacatgcattgattcgacaagtgtttattgagcacctgccgcggacaaggccttgtgtgattaaatagggttataattagtaatataaaaatgagaaatcactaatgctttttagacttaacattttctttttttgtaggtttcaggcacagaactgtatatccaataatagtgaaatggatcccactaattatgacagaaatgatgatacatttaaatgacttggatgttttataggtatgatctcgtgaaaccttgagagaaactgaatgacgaatgaaactattgttcctgtttcacacagaagaaaactgaggttaaaaggggtaaagtaattttgcatggcatgaagtagaaattcaaagtacaggaatttgaacttggttctgtccttttctgaagcccttgaccactatagactcaaacatcaccttgtttttccactcattcaacacttttttttttaaattatctaataggttggcactcatcatgagcccctgttctcattctgcaaatggtgaagctctctattgtcctgaccccacagttcctgtcccatgaccagggccagctcaccaaggagctgcagcagcatgtaaagtcagtgacatgcccatgcgagtacctgaggaaggtgagtgagtgcagacagatggggcctggtgcccttgagcagttcccgggtctcagctgccacacatctcatagccggtgatgctgggggaagcttacgcagtcacagtactggcttcttcctctttttctttccatacaagtggcttagggatggggtagagtagttgacttatttggatgaaaaccactatcttctgtctgcactcactcaccttcctcaggtactcgcatgggcatgtcactgactttacatgctgctgcagctccttggtgagctggccctggtcatgggacaggaactgtggggtcaggacaatagagagcttcaccatttgcagaatgagaacaggggctccag

SEQ ID NO: 590666 - DNA, 158 bp, Homo sapiens
tcgtcttttgataggcagggggcacaagatagactgcgagagtctgttgaacatatatgtacgcacattaactctaacccgaagtgctacaaggttccgaactaagctaagccctatcacctaccagtggacccaacatacatgcgcggccgcacagt

SEQ ID NO: 590667 - DNA, 335 bp, Homo sapiens
tagatgtttcacctcctttcttgataatttcctcacattctttgccacacaccacagaaatattgcagctgacagtgcatggggtgcgccaatattccaggattgatcaaagcactgaaggttagttggacatattcatattcacagtctcatctatatacaatcggtgcttatccagttgtgagcagtattctttcacaacatgttcattatttttaacatgcttgtgcctcatttgccacaggtctttcagcaaatacatgtactataaggtagaagaggaggtgtggaaaacagctatcactgtgatagtaaactcatcacctatatttcag

SEQ ID NO: 590668 - DNA, 3432 bp, Homo sapiens
  misc_feature (60)..(60): n is a, c, g, or t
  misc_feature (67)..(67): n is a, c, g, or t
  misc_feature (70)..(70): n is a, c, g, or t
  misc_feature (73)..(73): n is a, c, g, or t
cattgtgtgtttgcagctggtcaggctggtctcgaactcctgacctcaggtgatccaccngtctcgnctngantagctgagattacaggcatgtgccaccaggcatggctaatttttgtatttttagtggagacagggtttcactctattaggctggtctggaactcccgacctcaggtgatccacgtgcctttgtctcccaaagtgctgggattacaggcatgagtgacggtgcccagccattcgtgacatgtttatacaaatataactttagcaaatatttagcataactatcaaaattacaaatcatattaaatttgtataaatgtatgcaatttttggaacacgcatatcaacaacatacccataaatataactgagatgagatctaatgtcacctcacttgacagtgccctcccatgcagtatcgccacatttgacaatgcctgcccatttaatctaccaaataaatcgaatcacttaatacctctacaagatgagagatacattctttagactccccaagggatgcagctgaaaaaaatcccaaagttagttttaagccaaaaagacttgatttaggattttgacactggagaaacccatcaaagatgtcaagtttgaaaacacttgatcaaaacagaatcacaggtcactattaaaagagtattaatttaaccagagacttccaaagcaatacagaaacttacatggatataaaaaccctaacccttttaaaggtcagatttgctaagtgatcaaaaggggtacttgaattgaatcgacacaggaagagtgtgtacagggttatgagtgtaggcagatggttactttggtcatatctccatttgccacctgattacacatgagaatggcatctttactcaccagaaagccagtattataggaggtgtaggaggcattcttggacttgagacaagaacattgttgtgtagaaatttcattgactgtgttaaaattattctccatgggctggagaacacataacatggcctttagaatgagacgggcattgattggatgcaaggtctccacacttactagctgtgtgacattggacagagtgcttcatcattccgagactcagtttttaaaggaaaaacaactaactaccttgcaagcttgctagcaggtttaagtgtaataatgtgtgggaatgactgcaccgtgactaacatgcagtgacagcttaattaatgttaacccttatcattatcatataagaatgtgagttacataagagaggagtcctgtcagttcgttctctgctgtgtccccaagaccatgaatcatggctggcatgtagtaggcatttaataatatatgttcaacaagtatttggcagtcttggagggcagaaaaggaggtggggaagatttttaaataacattttttaaaaagtcacattgtcctacaataccgatttttcttgcatatttaggaaattgagggtttttttctaaaacatgcggacatatgggaaataggatgcaacatttgcactaatgtttcagacacagttagaggtttccaagagattttgcgctggggaggctgcttgctacaagctcccaaagctctgggaggacatagtattcattcctccctcagcagaagcggtgaggcaagaagctctggggagcacccagcgttggacttttagcatagtgtgtcaggtcttcatagtttgggcccagggcacagagaagtcacagctctccggcatcctgtgacctttaccctctttgccaagggaaaatgtggcccaccaaagcaagaaacttgagggcatgggtcaccccagccctggcatctgcccagagcccgagaaggaaggaacaatgatcctccagctacctcacggggctggcacaggtgaccactgccctggcatcacccagctgtgtccggcagcctgaaccccatctgtggggatgcgaggaggaaaatacaaaagtccttaggtgaacactgagaaggcagatgcagcagaaacctccaggccagaactacccagtcttggacctatggtggagatagagcatagctggcgatcatgtgtacttacactctaaggtcacctggttgcactatggcctcatctgtggctctgaaaatgaagatttggaaggagatcatcacagctaatgtttaacaagcccctcctgtgtgccaaatcattcacccctcaccacaaccgaatgagctaaggattctcattatatatagtttatggagagggaagtgcagacataaagaggtgaattatcttacccagatcacacagctgataagtggtggaggcagaatagaatctaaacagtgtggctccggagcccacatgcattgattcgacaagtgtttattgagcacctgccgcggacaaggccttgtgtgattaaatagggttataattagtaatataaaaatgagaaatcactaatgctttttagacttaacattttctttttttgtaggtttcaggcacagaactgtatatccaataatagtgaaatggatcccactaattatgacagaaatgatgatacatttaaatgacttggatgttttataggtatgatctcgtgaaaccttgagagaaactgaatgacgaatgaaactattgttcctgtttcacacagaagaaaactgaggttaaaaggggttggcactcatcatgagcccctgttctcattctgcaaatggtgaagctctctattgtcctgaccccacagttcctgtcccatgaccagggccagctcaccaaggagctgcagcagcatgtaaagtcagtgacatgcccatgcgagtacctgaggaaggtgagtgagtgcagacagatggggcctggtgcccttgagcagttcccgggtctcagctgccacacatctcatagccggtgatgctgggggaagcttacgcagtcacagtactggcttcttcctctttttctttccatacaagtggcttagggatggggtagagtagttgacttatttggatgaaaaccactatcttctgtcagaaactcaaaaggaatcattgctggcatggtaacctaaagaaaaacaaccagacaagtgcccaacgacacttaaaaaggtgatttattatcttgccaagtttaggctgggcatggtgactcatgcctctaatcccagcattttgggaggctgaggctggtggatcaccggaggccaggactttgagaccagcctgaccaatatggcaaaacctcgtccctgctgggaatgcaaaaattagccgggcatggtggtgtgagcctgtagtcccagctactcaggaggctgagacaggagaattgcttggattcaggaggtgggggttttagtgggccgagatcacgccattgcactccagactgtgcgacagagcgagactctgtcaaaa

SEQ ID NO: 590669 - DNA, 1063 bp, Homo sapiens
  misc_feature (48)..(48): n is a, c, g, or t
  misc_feature (59)..(59): n is a, c, g, or t
  misc_feature (71)..(72): n is a, c, g, or t
  misc_feature (82)..(83): n is a, c, g, or t
  misc_feature (105)..(105): n is a, c, g, or t
  misc_feature (107)..(107): n is a, c, g, or t
  misc_feature (117)..(117): n is a, c, g, or t
  misc_feature (168)..(168): n is a, c, g, or t
  misc_feature (170)..(170): n is a, c, g, or t
tggctgtgaatattatgatgtagatggtcgagagggaggggggcctgnttggtcaacgnagcatattcttnntactggaaannacaaaaatggaaaggaagagtnanaaagagaaanttccttatattctgaaacggcagctgtatgagaataaacccagaagacccnanatactcaaaagagattcttactatactgagagaataaatcatttatttacatgcgattgtgattcatcacgcgttacttacctctcataccatatttgcgtgaaacagtgacaaaccgactcatatgtttcttctctcctcgcgcctctcgcctgccccctcccccgcgtcccgcccctctccccccgcccctccccccgcctactcccccctccccccccaccccgcccctctccctcgccctccctccctctctccgtctcccgtttgtttgctcgtccccgcctcccacccgccctcccttccggtctcgactaaacaaaaactaaaaatcaaccctcagccactcgccctcccgctcctcgccttatccgcacgtactcacgctctcatccccccctccttccattccggtatgacaggcgcccccccaaccccaccccgcgccctcgagagaaacgttcacgacatccggcgtgcgtcgtccccaagacgccaccggccccgggatgacaacttcgacgcgatttaccagcgacccgcacaaccgtcactaatccgccccgccggacgagtacgcacctccgcaccccctttagctcactccccgcaccatccgcggaccttcttcttccccccgtcgatccccatcccatccccattcgtcccccgtttcccccctcaagcgccattcccctactcccgcaccgccttattacacccccaacatcttcaatcccacgaaccgttgggtgcctgcgccacgtcctcccgctccatctcaaatcatgatgtgcctatccccactcaattatcacacaccatcgcaattagaagcaccctcccccgctatatcctatctcccagccgtgtccccctcgcccgcccccgcg

SEQ ID NO: 590670 - DNA, 646 bp, Homo sapiens
  misc_feature (618)..(618): n is a, c, g, or t
ggggggccaattttgtttttttttttaaaggttaaattgagtgttaaaaaacgcgggtttattttttaaagaaataaaaagtggattggggtattaaagacatattttgggttataaaaaatgatgatggatactttaaaaagggatataattaggttttttttggtaaaaaaaaaaaaaaaagtgttaattgggacagggtaaggtgggaattttgtgtttagaggttttataatggaagaaaattttaaaaattttttgtcgcattttttgacagtgtatatataaaaaatgccttttaataactggatttttatggaacatttttgggataataaagtagaaaagttttaagggaaagtttctgttttgttattatgttttttaaaaaaaaaataattttaaaaggggttttgtggtgttgagccgataagaagtggattgttaaaaagtgataaaaaggtttttttggggttatatttgcagaaaaaaaatgcagatttttttacttattagtgaggagcaaaaggtttaaaatataaagtaattaaaatataaataaaaaaagaaaaaatgggagagttatattttttttaataaagcacagtaaagaatggntcgagactagttataactcggtgcgaat

SEQ ID NO: 590671 - DNA, 3717 bp, Homo sapiens
  misc_feature (60)..(60): n is a, c, g, or t
  misc_feature (67)..(67): n is a, c, g, or t
  misc_feature (70)..(70): n is a, c, g, or t
  misc_feature (73)..(73): n is a, c, g, or t
cattgtgtgtttgcagctggtcaggctggtctcgaactcctgacctcaggtgatccaccngtctcgnctngantagctgagattacaggcatgtgccaccaggcatggctaatttttgtatttttagtggagacagggtttcactctattaggctggtctggaactcccgacctcaggtgatccacgtgcctttgtctcccaaagtgctgggattacaggcatgagtgacggtgcccagccattcgtgacatgtttatacaaatataactttagcaaatatttagcataactatcaaaattacaaatcatattaaatttgtataaatgtatgcaatttttggaacacgcatatcaacaacatacccataaatataactgagatgagatctaatgtcacctcacttgacagtgccctcccatgcagtatcgccacatttgacaatgcctgcccatttaatctaccaaataaatcgaatcacttaatacctctacaagatgagagatacattctttagactccccaagggatgcagctgaaaaaaatcccaaagttagttttaagccaaaaagacttgatttaggattttgacactggagaaacccatcaaagatgtcaagtttgaaaacacttgatcaaaacagaatcacaggtcactattaaaagagtattaatttaaccagagacttccaaagcaatacagaaacttacatggatataaaaaccctaacccttttaaaggtcagatttgctaagtgatcaaaaggggtacttgaattgaatcgacacaggaagagtgtgtacagggttatgagtgtaggcagatggttactttggtcatatctccatttgccacctgattacacatgagaatggcatctttactcaccagaaagccagtattataggaggtgtaggaggcattcttggacttgagacaagaacattgttgtgtagaaatttcattgactgtgttaaaattattctccatgggctggagaacacataacatggcctttagaatgagacgggcattgattggatgcaaggtctccacacttactagctgtgtgacattggacagagtgcttcatcattccgagactcagtttttaaaggaaaaacaactaactaccttgcaagcttgctagcaggtttaagtgtaataatgtgtgggaatgactgcaccgtgactaacatgcagtgacagcttaattaatgttaacccttatcattatcatataagaatgtgagttacataagagaggagtcctgtcagttcgttctctgctgtgtccccaagaccatgaatcatggctggcatgtagtaggcatttaataatatatgttcaacaagtatttggcagtcttggagggcagaaaaggaggtggggaagatttttaaataacattttttaaaaagtcacattgtcctacaataccgatttttcttgcatatttaggaaattgagggtttttttctaaaacatgcggacatatgggaaataggatgcaacatttgcactaatgtttcagacacagttagaggtttccaagagattttgcgctggggaggctgcttgctacaagctcccaaagctctgggaggacatagtattcattcctccctcagcagaagcggtgaggcaagaagctctggggagcacccagcgttggacttttagcatagtgtgtcaggtcttcatagtttgggcccagggcacagagaagtcacagctctccggcatcctgtgacctttaccctctttgccaagggaaaatgtggcccaccaaagcaagaaacttgagggcatgggtcaccccagccctggcatctgcccagagcccgagaaggaaggaacaatgatcctccagctacctcacggggctggcacaggtgaccactgccctggcatcacccagctgtgtccggcagcctgaaccccatctgtggggatgcgaggaggaaaatacaaaagtccttaggtgaacactgagaaggcagatgcagcagaaacctccaggccagaactacccagtcttggacctatggtggagatagagcatagctggcgatcatgtgtacttacactctaaggtcacctggttgcactatggcctcatctgtggctctgaaaatgaagatttggaaggagatcatcacagctaatgtttaacaagcccctcctgtgtgccaaatcattcacccctcaccacaaccgaatgagctaaggattctcattatatatagtttatggagagggaagtgcagacataaagaggtgaattatcttacccagatcacacagctgataagtggtggaggcagaatagaatctaaacagtgtggctccggagcccacatgcattgattcgacaagtgtttattgagcacctgccgcggacaaggccttgtgtgattaaatagggttataattagtaatataaaaatgagaaatcactaatgctttttagacttaacattttctttttttgtaggtttcaggcacagaactgtatatccaataatagtgaaatggatcccactaattatgacagaaatgatgatacatttaaatgacttggatgttttataggtatgatctcgtgaaaccttgagagaaactgaatgacgaatgaaactattgttcctgtttcacacagaagaaaactgaggttaaaaggggtaaagtaattttgcatggcatgaagtagaaattcaaagtacaggaatttgaacttggttctgtccttttctgaagcccttgaccactatagactcaaacatcaccttgtttttccactcattcaacacttttttttttaaattatctaataggttggcactcatcatgagcccctgttctcattctgcaaatggtgaagctctctattgtcctgaccccacagttcctgtcccatgaccagggccagctcaccaaggagctgcagcagcatgtaaagtcagtgacatgcccatgcgagtacctgaggaagacgatcctacacctgccacctccgatggatccactgcctctgtgcctgcctgtactgctgatgctccagtggataactcagcatcccagcctaggcccaatgccactgaagatggacctgccccctggggacccaggagtcctaccactcagctgtccccaggagtgcccagaccctcattcttatccaggacctaggagccctacccctggccttccctcatcagccgtaaatgatgatttactgctgttaccatcatcactgccttcagtgaccaagggccttccaaggtgccagctctggaacgaaggatgcccttgggaggtgatgacactcaggtacacgggtgctcaacagattgcttcctcctatcctcagacggtctttgcatgcatgcagccattggcactcccattgtgtggaaggaaaccagcccagggtcacacagctggtcagcagcaacatagctggtctcaaatctaaggtgcctgaccatgcctccatgagggaccgcctccaagggaggttgatcctggctttggggagcctttcctgggctgcacgaataacctccattgttcgagaccccaaactctgctcacatcttcctttccctatctctgctgaggcaggagaatcgcttgaaccagggaggtggaggttgcagtgagctgagattgcgccactgcactccagcctgggtgacagagactctgtctca

SEQ ID NO: 590672 - DNA, 419 bp, Homo sapiens
  misc_feature (307)..(307): n is a, c, g, or t
  misc_feature (331)..(331): n is a, c, g, or t
  misc_feature (348)..(349): n is a, c, g, or t
  misc_feature (353)..(353): n is a, c, g, or t
attcgcggccgcgtcgaccagcaggttgagaatcgccagttccgagggcaggcccttgcggtagttgtcgacaaagtcgcccaccaccttgaccccggcggagccgattgcgccgcccaatacaccgcgcagcacgttgaagtggccgttgatttcaccgccgggaatcaggtgcatgcgcggctcgaccaccgcctcgctgcggccctggatcgccaggctggattcgatggcgtcgaggatttcgtcgttggtcagggccagttcgtcgatgtccaggccgttaaggaagtcgatgtagatcggntgcatggtctgctcactgatgggntacgaaggtcgacgctnnagangcttttatgtgccgagggagcttgttatggggccttgaacacaacttgctgcacatcgaccttttt

SEQ ID NO: 590673 - DNA, 1217 bp, Homo sapiens
  misc_feature (1025)..(1026): n is a, c, g, or t
  misc_feature (1033)..(1033): n is a, c, g, or t
  misc_feature (1036)..(1037): n is a, c, g, or t
  misc_feature (1058)..(1060): n is a, c, g, or t
  misc_feature (1064)..(1064): n is a, c, g, or t
  misc_feature (1076)..(1076): n is a, c, g, or t
aaaaaaattttttttttaaaaatagttggggtaaagccaggtttttttttctggtcaaataaaggccttttacccccaacccccctgtacacaactcactccttttaaagaaaaaaattgaaatgtaaggctgtgtaagatttgtttttaaactgtacagtgtctttttttgtatagttaacacactaccgaatgtgtctttagatagccctgtcctggtggtattttcaatagccactaaccttgcctggtacagtatgggggttgtaaattggcatggaaatttaaagcaggttcttgttggtgcacagcacaaattagttatatatggggatggtagttttttcatcttcagttgtctctgatgcagcttatacgaaataattgttgttctgttaactgaataccactctgtaattgcaaaaaaaaaaaagttgcagctgtttggtggacattctgaatgcttctaagtaaatacaattttttttattaagtatggtggtcctttccataggtctgaaatttttcttctggaggggaagctagtctttggctttggcccattttggaattcacatgaatttattacaggggtttatcctttcatatagttagctaataaaaagctttggtctacacacccggcatatcataatggggggtaaagtcaagtggagatagtttccatccataactggaacttccaaaatctggatcagttaagaaaatttcacatagcccatttacttttacaaactggaagagtaatcaatctactcaaagcatgggattatagaatcaaaccttttggaaagtctgtccttgaaggactaatagaaaagtttgtcctaccctttacatgaggactctattctttaactcccattaccatgtaatggcagtatattgtgcagtccccacattaaagaagacctgagaatgtatccccaaaagggtgagttaaaatacaagatgccatattaaattttggtggacataagtctcgctgaagactatgaaatgcnngctatanganngtctttcccatttatctaaannntggnctgtcaggaaangagacttccttacaagtatttcaatcacgtgggccagctttcaaacaaaaatgccctcaaaaaggtatattcccaatataggttgcccttaaaatccagtgaaggagaaaagacattggtcccgtgattaatatgaaatca

SEQ ID NO: 590674 - DNA, 1482 bp, Homo sapiens
atcttgtgttttgtgctttccctctcctctctcggctccccaacatgttgggtgagttaaatgtcaccaacagagtcttctgggggggttcctttttttgtgagccaacatgttggggacataatccagaacagcggggtgttttgaagcatattatattttttgcccctccttggtgtatgacccgcccaacgttggtcgcaacgagggggggcctgctccgctataagaggttgttataacggttgggctccggggtgtctcctccgaggggggggtccggttttaaaatatatgggcccccttccctccgtcggttgtaaaatttttttgtggtgggaaatattttgttgttgccgccccaccgccagatacggcgggttttatccaaacacacccatttgggtgtcacacatatgcgcacagaggtttttgtttgggcgttcttcggaagaggagccttggtatacaagggggggaggataacaatgaggatgtttttttggaaggttttctcccccccgcttattttctgtggtggtaatacacaataaaggtccttggggagaacagaaattggggctccccctctaaaatattttctcatcttgaaaaaagtttgtcatatggggttacgtaaattctgacatctgttccccccacccatggtgggtttgtagaaaaatataataggggttattttccccctctggggggcaccaatatggctccccacatctggtgggctggtgtttttttgaagtagagagccctttttgtcttgcccacaggacatcttaatttggcgcgcaccccccctcttgttgtggggggtttcctccccttcttgtgtgcgctctggtgttgtctgtggtgaatataacttatgagagaacccactagacgaccacagctttgttcccgcggttgtgggggtgtgttgtcactcgccacacaaacgccactacttggggtgacaccacacagagagaggggcttctctcttctggagagctgttctggggcacacaacaggtgtcaacccccacagagtgttctcgtccccaccgagataagtctctcacgagaagggctatatactgagaatatataatccctctctaatgaacctcgcaccacactcccacactctctctataatctcacagtcggtgtggagaagaaccgcgtgtctccacgagacctcgctgtttgttgtcacacatggccacatcttaaaggtttaggtacgtataaaagagactggttataatgagtaacccaatgcactcgctaaaccctctcacagagaaggaaaaggagagaaatgttttcgtggacccacctttggttttcttttttgcgtgtggcacagttttaagttattaggtttttaaaatccgtactttttaatgggaaccaccttggccccaaaatttgtccccagaagttttgagaccccatttaaaaagttcaatgaga

SEQ ID NO: 590675 - DNA, 1530 bp, Homo sapiens
  misc_feature (48)..(48): n is a, c, g, or t
  misc_feature (165)..(165): n is a, c, g, or t
  misc_feature (196)..(196): n is a, c, g, or t
  misc_feature (220)..(221): n is a, c, g, or t
  misc_feature (227)..(227): n is a, c, g, or t
  misc_feature (235)..(235): n is a, c, g, or t
  misc_feature (245)..(245): n is a, c, g, or t
  misc_feature (250)..(250): n is a, c, g, or t
  misc_feature (257)..(257): n is a, c, g, or t
  misc_feature (267)..(267): n is a, c, g, or t
  misc_feature (269)..(269): n is a, c, g, or t
  misc_feature (282)..(283): n is a, c, g, or t
  misc_feature (309)..(309): n is a, c, g, or t
  misc_feature (312)..(312): n is a, c, g, or t
  misc_feature (323)..(323): n is a, c, g, or t
  misc_feature (334)..(334): n is a, c, g, or t
  misc_feature (347)..(347): n is a, c, g, or t
  misc_feature (353)..(353): n is a, c, g, or t
  misc_feature (356)..(356): n is a, c, g, or t
  misc_feature (358)..(358): n is a, c, g, or t
  misc_feature (364)..(364): n is a, c, g, or t
  misc_feature (387)..(387): n is a, c, g, or t
  misc_feature (404)..(404): n is a, c, g, or t
  misc_feature (406)..(406): n is a, c, g, or t
  misc_feature (412)..(412): n is a, c, g, or t
ggcagggcatgctgatgctgagcgtacaggcagacaagagcgtagccntgctgttgcctccatcactatgaaatgacttattttacctgaaggacccatggtttatgttcctctaattcctttcactctccctaagccctctgagagagatgacgatagatgatntaatggctactaaatggaagggagcactatnctttggtctttggttagcaaaaanntggcanaaagaatngtacattctngctanaaataantaactaactncncacaattcaaaannacaagggacctaacaaaatcagcagngtnactgtattttnaaaaatatttnatagactcatttncaggtnatnanatgtangagaaacagatacccctcttttnaaagtaggtaaatcatngntgattnatataccaatttttagaagtaatttctagtaagcttgtggcatcagaaaatactagaagattttttagttaaattagttagaacatttatgatgaatatactaaactatttctttcagaataaaatatggaccctttgtgttactaatagataaggcagatataattttccgtctcttaaggccacaaaatatggcctttggttacagaacactaaagttagaaatctcacagttagagcaactttttaatggctatttcctcattattcgtcacgtgttcaaaaccctgccgaattcttgatacaggtgctactttatactatatttcttattcataacgataactgtctcttagtcttcttagtactagatctttattaggcactagaatcaaatcagtaaaaccatcatcattttcagccccaaattttgtccacagaaaaggcgtctcaacatgacaacataattttcccgaggatcctttccttttccacggaataatcttctccctgcatacactacattgggtccttgaaggtcacataccttggtgccaaacctaattgcacactcctggtgtcaatcctacagtaaactttagacccgggtttcaaccgcaatacattcaggatgctgacactgcgcactctttcacctggattcaccaatattccaggcaaaccgggtcaaaccgtgacaaccctactgtcgcggaagaatcccaacttgggtgaaaaacgcacctggcgaccacagcttcactcaactccacgcacgcgtcccgcaatcccacaagcacgggctccacggacgacatgcacagcgcaacccccaaccacactcgtcgacacaacaacccgctcaaaaccaggcacacccgggactcataagccgacaccgaggactgcagaacccatcgtcaccacgtctgcgccaacctcactccgaatccacccacagctaagcaaaccacgcttcctgatcttccgccagctgccgacatcaacgcacgtggaccacacatgcagaccgacccacaaaacgactcccccctaggtctttcttcttattctcctctcactctacaacacgacaccacgcccacaacacgcacgcc

SEQ ID NO: 590676 - DNA, 467 bp, Homo sapiens
  misc_feature (320)..(320): n is a, c, g, or t
  misc_feature (340)..(340): n is a, c, g, or t
  misc_feature (348)..(348): n is a, c, g, or t
  misc_feature (389)..(389): n is a, c, g, or t
  misc_feature (418)..(418): n is a, c, g, or t
  misc_feature (444)..(444): n is a, c, g, or t
  misc_feature (451)..(451): n is a, c, g, or t
  misc_feature (467)..(467): n is a, c, g, or t
catcttcttgaaatgggctccaagaagcaggtttgtggccagtagagccagctcagaacccaggagtggtacaaaaagcattcagatatcaagattcccctcctggctgcatcttccatgggggaggccatgaaaggggcccctggtgaaccattgagtcatttatagctaatcttagtacactccctgaagtagggaatgacatgggctgcaagaattcttcctaagcaccccagagagaacttcaccgatttaaaatatgagtttctgtaacctgagcaggagcttgcctgggtgcaagggcttatgcagcctgcctnccagggaggccaggagggtncgcacttnattgagctttgagcaaatggggggcttttggggaattcagncagcctccctggagcttttcctgggagcngagctggaactgtaccctgtaacttnggagggnttgctggggcaggttn

SEQ ID NO: 590677 - DNA, 1072 bp, Homo sapiens
atagtaccgctatcatatggttggttgtatggtgtactaccaggttgtattcagtgctagtccacaattgcattgagggctgagtgcagagcatcaactgtattcataaccggttatgcaactagctgctgatatctgatgtcgtgtgtgccagcaccgattgcttcattcgtatagtaaggctgtgtcgcatgagcgttcgtttcgaaaagtgcacgggttcgtgaacatatattctaaccacgaggtgagatgacttagtcatacatatgtatcacccgcaagatcaattgatgccatataaccgcattgtgggacacatatccgagcggagctgtccacagcgcatagtctagtcttcaatcataagagcgtaaggccgtatgctggcccatgttaaggtatggccggcaattaattggacagccttgtgtgggcggactcactctattgggcactgccttgtttgatgcggatttcacgaagctagtctgagtcgaggaaggtaactctgcatgcgaatacagaggactcacgtaagggtatccgcacaacggcccttccgatgaggctaactgtggtctagagttgcaccctcgcctactaccataggttaacgttgataccacacttcccatgtatagagaccattgaactctcagttcagcgggggaacgaatgaaacattgaacaaaatgacttccttgttaacccatttgactggttttgtgaaaccttacctattaaaatcccttaaagtaatagataaaccaggaagacggtactgatagttgtccttcgatcgttggagacctcagtgggccaactttaaagggagcttgcccatgtaaccgcttgaattgtccaaggcgccaggcccatctttaggctctagctgcgggctaatggcagttggggtccccgctgggggcgtcctggactgttgggccttctctttttactttcacaaattggcgggcgagccgcggcttataccgtaataaactcagcgcacatttgcgcccaacacatagtgagacaataaaccccgtcaaattacgagatttttccc

SEQ ID NO: 590678 - DNA, 185 bp, Homo sapiens
  misc_feature (8)..(8): n is a, c, g, or t
tgtctctnacagaaatacattagaaaaaaaaaatttagcggggcgtggcgatgggttgcccgtaatcccagctagtcgagaggcttaggcaggagaagggcttgaattcaggaggcggaggttgcagtgacccgagatcacgccatggctctccacccggggcaacaagagtgaaactccatctc

SEQ ID NO: 590679 - DNA, 269 bp, Homo sapiens
tcacaggatcttccaggtagacctaacccactaccacccaggttagctaaccaaatgcagtttggaaggcaaaacgagaaaaaaacacttcagtattatcaaaaccaaaagagatatgataaacataacatatttaacaatgtagtgtgggaatttgaagatacatagatcctgtttgcaaaatattggatattcaaatgaaacaaacagcctttggatccagtagccacaacgttaggtctacctggggggtacccgagctctgaatt

SEQ ID NO: 590680 - DNA, 327 bp, Homo sapiens
gtcacgcccacagactggcttgttatgaaatgaatgggggttagggcttgccataagacgctggatagaagatacactgatttggggacattattgagtccaatccaggcaatgcaaagggctagatcaacatgggggaagtgtcatagttcagatccctgatgtactggactggcgggtatgcagagtccacaggcaaatagcagtccacccggggagcctcgtaggggcaggtgccatgtctcagcagttgtcctagcaagctctgtgagaagcagatagagctgtcacgttctttctcatatttgtttaataatgacaggattt

SEQ ID NO: 590681 - DNA, 736 bp, Homo sapiens
gctctgaggctgagtgcgtttgggtgccctaggaggccgagctctgtttgttcgaactccagtggtcagacctgtcatatctcagcatttcttcaggaccgactatcccagaatggttgtggatgtgcagcacaatacacttgtcacctgagccaccattcgtggctccaaggttgcatctctccagtgactagcgagagggttgtcagtgtttgctcctgggtctgttccggtgcttatttgaatccttgctctgggatggactattcccctgggtgagccctcactcttcatggtcactgggcctgtggacaaatgtgtgttactgactatgttcatggggatggcttgcagaaagctgccaggcgagggtttgtgcactttcagctttaaccttgtgctgggctgtgtattttcaactatcacgatgtgggcatctgcaaagttgtgtgccatgctgtggaagctcttgaccttttgtgacttcatacttgtgaagaatgtgatgtagtgcctcttgttgcctctgcttgtgtcatgccattaagctcacaatagggaagacaatacaaagataagtccattggtggacagccttcttctctttaatcacaagatattttcagaattactctgtgagggacaggttgtgagaggatatactctcaggtggtggactgagtccaaatcgggggaaagggtggccccccttctaaagactccagggtattaactg

SEQ ID NO: 590682 - DNA, 406 bp, Homo sapiens
  misc_feature (167)..(167): n is a, c, g, or t
attggcatttgggaacttggagttcagggggcttccccccttcccaaaactggtcaaaggagctttctatatttaaactgtaaaacaaaatagtttttcctgaacccccgctttccttttgggggtttggaattttggtatgtgccaggcaaagactacctttgtgncacgctcccagtaaaaaccccaggcccccagtttttaacaagcttttttggttgacagggtttcccaagggctgttacaactgggtgctgggagaattaagctcctcctttgtgattcccctggggggggatttttggaaggttgcccttagtttcccccgacttccccccctgggttttttttcctttggtgattttgttttggatcctttccctgtaataaatcagggccgggggca

SEQ ID NO: 590683 - DNA, 728 bp, Homo sapiens
  misc_feature (51)..(51): n is a, c, g, or t
  misc_feature (83)..(83): n is a, c, g, or t
  misc_feature (100)..(100): n is a, c, g, or t
  misc_feature (354)..(354): n is a, c, g, or t
taaattttaaaatgatttttaattattgaacaaggggaaataaaaacaatnacaattatcaattaaaacattaaacaacccanttaccttttcttaacantcataataaaatatccctttcctgtcttatcaaaaaccttaattattctctaccacacacaccacaaaagcttcttaataaagcgggagtgtccatcacacctttgtgtaaaatacatagcaacaaggtgctgtctcctcttgccctacccccacatctgcttaactactcttatttctagaatgcctcttttgctcccattttgtaagctcctgccaatgtgtttaaggcccacctcagtgactacctcctanagccttgcttgaccacttaaacatacaaactaaaagcacaatgtggtcatttccaaaagatgattgataaattctcaacccacaatgtctagtttttaaaaaatgcaagccagggaggaacaaaagtgacatatcaaaaaattaaaaccccacattatacattgaaaaaactatactaataaaaaattccatttcccactcaaatattaagtggtaccagaaaaggacccaatctcaccctttatatttttccttaaatataaaaaaaaactttatatttataaaaatgttttaaagtttgcaaacattactactaacaattttagaaataaaactttctcgctaaatacctaaagcgtctcccacaatagttt

SEQ ID NO: 590684 - DNA, 371 bp, Homo sapiens
tggacatggccccctggtggcacgggtgtcgtcgcggtgatgtctcggctggtctcggtacctttttggccgctgggtgggcccgacggggctctcgtatgggcctccgggcgcgtctcagctcgtgcgtctcctggcgtgttcgtcgcctccgtgtacatagccgccgcgttggttcgcaggttgactagccgaccccgcatgggcgaggaactgggggcacggggcccgtcgtccccgctctccgccggcgcgggccacgggggcggggtgcaccaccgggagggcgggttgcaacgccgcggacccacccgcgggcactcggacccctagggcagagagggaaaaagaacacgcccatcaaagaacaa

SEQ ID NO: 590685 - DNA, 1037 bp, Homo sapiens
ggagacagagctacgagctgctgatccggcccaggtcatcaccattggcgatgagcggttccgctgccctgttggcactcttccaggccttccttcctggtgcatggagtcctgtggcatccacgataactaccttcaactccatcatgaagtgtgatcgttggacagtccgcaaagacctgtactgccaacgcagtgctgtcgtggcagacacgcatgcgatgtatccctatgggtattgccagaacaggaatgcatgaaggagaagcactgaccctggaaaccgatgtaccaagtgaagtatcaccgaatcagttgctcctccgtgatgctgcagagtttcttccggtgttggatcggctggttccattgctggtcctcgtcgtgtcctaactatccagtatgaatgttggatctagggcagaagcaagtgagttatgaccgagatcctgggccctcgttccagtcgcccccacactgctagaaatgtcttctagagtggagacttaattgcatcatctaagtctgtcggttaacttagcgcctattgcttggaacaaagaaacgctaaaatttggtgcagggaaagactaaagcagtcgtaggagtttggggccttggcctcttccattgtggtattataacgggggtagtcagtcttgccgcgtgtgtatggacattcgactttcagtggaggtagtctacatcacgttgtttggtacaagctgcgtttcaactgcgttagtgccggtttaccctttcctggtggctgtgcattccgggagttgtcattcctcacagcgtacgctgggtggtgcccggcagggaacgtatcgacccggccctgttgggacgtgtgtccgaattgacttgtgctttccgggtattttccaagagtccttgtggccctgagtaaggtacccatgtgccctcctagaggtgggtcccccccaattttttttcttaggggagggtggggccggtatctcttccccttcccccgtggcggggtgtacacctgctgcgggcacctgttg

SEQ ID NO: 590686 - DNA, 902 bp, Homo sapiens
  misc_feature (144)..(144): n is a, c, g, or t
  misc_feature (228)..(228): n is a, c, g, or t
  misc_feature (300)..(300): n is a, c, g, or t
  misc_feature (411)..(411): n is a, c, g, or t
  misc_feature (494)..(494): n is a, c, g, or t
  misc_feature (817)..(817): n is a, c, g, or t
tatggtaaaagtatgggaacagggtatggtggagggggaccagccttacattggcacccttccgatctgggagacgcaaaacactctgggatcttccagggaacgtgggcgaattaacacacatttcgcgtcacggtaaaaagnatagggtgggagcattagattctgggcggtcggttcatccagaggacccagacttggaagactgtcaaattggaagcaaacccnatgtgccaaagttttcattaaagggaccaatggatgggccaacaaatcatacttcctatggctggctcggtnacccacagacccacaactggtattggcgggtccataggtttggctcatggtattattaatcctccagggacatggacatgggccttccatatgggcgccttaaacatcctnattagacctggtccttggtggttaacccttggtccatggggggttcagaccacctggataatattccttatggtaccttgagngccattatggttaaacatacatcctgagggcagagttccagaagaaaatttgggaaccaggtggaattgggtccaggaattggctggaaaaccacctaatggggcaaccagcagaggagagtccccagagcaaagggtgggttttcccaaaacgtgtgtttggaaaggttacccttagacaggttggacatgggttcacccgggggctcctttcactcacgacacaggcgaaccggaggaactggttagtcccaacaaatataccaggaagcaaacaatttaggaccgggtatttttcccttttttcctctaatctggaaggngggttcacacgtttaccccatggttcggaccttaggcaggggaccgtctgggggccggtccgtgatgtctggtataccatacccg

SEQ ID NO: 590687 - DNA, 327 bp, Homo sapiens
cctcgctgccctccctcccagcctgggcaacaagagcggaacactgtcctcaaaagaaaaaaaaacttgaatcccatatgtagtcttccctacttggaggaggcagcgagaaaaagaaaaagaaggaaaaagaaaaaaaaattttttttgaattaggctgggcatggtgctcatgcctgtaatcacagagctttgggaggccaaggtaggaggattgcttgaggccaggagttcgagaccagcctgggcaacatagtgagttcccccatctctaccaaaaatgagaaatttagtgctgtaacaaatgagcaccaagttaagttttta

SEQ ID NO: 590688 - DNA, 670 bp, Homo sapiens
aggtaggccggacgtctctcgtgcgtgctgtcgagcgttcactttcagcctgcagtggtgcttgcaaacatttaacataaaaatggcttccaaaagagctttggtcatcctggctaaaggagcataggaatggccgacgcacatccctgcagatgacatgaggcgagctgtgattaaggacaccgattcagacctgtctggaagagacccagtacagtgtaaccgtgatgtggacatttgtgctgatgccagccttcatgatgcaaaccaaagaggtaccatatgatgtgcagggtctaccaggaggtaatctgggcgcacagaatttatctgagtctggtgctgcgaaggacacactgaaggagcaggaacaccggaaggacctgatagccgccatctgtgcagctgctactgatatgatgactcatgaaaaaggttatggaagtaaagctacaacacaccctcttgctcaagactgaatgatggagtgctttacagctactctgagaaatgcgtggataaagacgccctgattcttacaggccaggagcctgagaccagatcgagttcgcgcttgcaattgttgaagccctgaatgagcacgaagtgccgcctcaagggatgctccacttgtcctaaagactagatattgaactgcacctattaggcg

SEQ ID NO: 590689 - DNA, 252 bp, Homo sapiens
ccacgtactacttacgtactacgacgacggtacgacgtttttttcgtgactacgtggtccactggactaacgtggcgttggcttgccactgactggtgacggggtacggacgtcacggtacgttacgtacttacggacggaggggttcgttacgcggggctcggacggacaacacggttaggggacacacgtctacacactacggttggattgtatgacttatgagttacacacacacactacgtacgacgt

SEQ ID NO: 590690 - DNA, 1338 bp, Homo sapiens
  misc_feature (1146)..(1147): n is a, c, g, or t
  misc_feature (1154)..(1154): n is a, c, g, or t
  misc_feature (1157)..(1158): n is a, c, g, or t
  misc_feature (1179)..(1181): n is a, c, g, or t
  misc_feature (1185)..(1185): n is a, c, g, or t
  misc_feature (1197)..(1197): n is a, c, g, or t
gacctgcgacttttactacagagaaaccagctattacctgtggtctgctgggaaataacctccattgttcgagaccccaaactctgctcacatcttcctttccctatctctgcttgggctatgatcacggtgactctagcagcccttcatggacattatagtactctctgccattcacttttgctctaatctgacttcaacccccctgtacacaactcactccttttaaagaaaaaaattgaaatgtaaggctgtgtaagatttgtttttaaactgtacagtgtctttttttgtatagttaacacactaccgaatgtgtctttagatagccctgtcctggtggtattttcaatagccactaaccttgcctggtacagtatgggggttgtaaattggcatggaaatttaaagcaggttcttgttggtgcacagcacaaattagttatatatggggatggtagttttttcatcttcagttgtctctgatgcagcttatacgaaataattgttgttctgttaactgaataccactctgtaattgcaaaaaaaaaaaagttgcagctgtttggtggacattctgaatgcttctaagtaaatacaattttttttattaagtatggtggtcctttccataggtctgaaatttttcttctggaggggaagctagtctttggctttggcccattttggaattcacatgaatttattacaggggtttatcctttcatatagttagctaataaaaagctttggtctacacacccggcatatcataatggggggtaaagtcaagtggagatagtttccatccataactggaacttccaaaatctggatcagttaagaaaatttcacatagcccatttacttttacaaactggaagagtaatcaatctactcaaagcatgggattatagaatcaaaccttttggaaagtctgtccttgaaggactaatagaaaagtttgtcctaccctttacatgaggactctattctttaactcccattaccatgtaatggcagtatattgtgcagtccccacattaaagaagacctgagaatgtatccccaaaagggtgagttaaaatacaagatgccatattaaattttggtggacataagtctcgctgaagactatgaaatgcnngctatanganngtctttcccatttatctaaannntggnctgtcaggaaangagacttccttacaagtatttcaatcacgtgggccagctttcaaacaaaaatgccctcaaaaaggtatattcccaatataggttgcccttaaaatccagtgaaggagaaaagacattggtcccgtgattaatatgaaatca

SEQ ID NO: 590691 - DNA, 172 bp, Homo sapiens
gattcacattacaatgactcctctttgtacttgtaccccttttaaatttaaactagaccttcctagaagtaatcctatcatccccgtggcaagggtccacagactcctgttgggaccttttgtgggggttccctagccagtagtactgcagtagattgatactgcacaaaag

SEQ ID NO: 590692 - DNA, 1321 bp, Homo sapiens
  misc_feature (1237)..(1237): n is a, c, g, or t
aaaaaaaaaaaaaagcctttcgcacgcagctataaaatgtaaaaactgaccgttggtacaaagtgcttcataacaatatataattgggtgtcttatgcctgtgagaaagaaaggctttattttattgtattgtttggtttaacattcttggcaaaggttcctttggcacaaggtttccccacacgggtcttggcgagttttcccctttcgtgaggggtttttgcaccccatatttctgtcgtataaacccgttgcgcttctcgatccagagcgttgataccctgtgtgatgtgaagcgcttggtggtgcgtcgtgtcactcggcggttgcaggccagggtgccccgtagacctcggatccccgtgagaccacccctctggggggaggtgagtgattacccatttttcttccttcgcagggcggggatactgtggggctccatttcccacgctttcataccagcgttcgctgtaacccggacttttgggggcccccttcgcgggaaagacactttgccatttgagggacagcgttcacaaaagcgctcgccggtgtgattaacaaggggtcacagcaagacagccgagagaaggacagcacgacggacccgactcctaaaaagtatattccccctcgaaaggggggacacacaaagtattatagagcggtatactcccaagttttcttctgtgtcgtcacaacgagtgtgggtgtcccccaaataaagggacagctccgacaatatataaataaagccgatcagagcaacaatcgagggaccagcacgcgttttcaaacacaacagcgcttctgcgagaaatgggggcgacaacaacagtgtgggtcaaaacacgatgggggagaacatcacttcgggggcgaaaaaggagacacgccccgtataacttcacgcgagaggggcgtgggcagccaacccaaatcaagtgggggggcaccgacaaaataccaacacgtctacaacgaacgagagacattttcaaaaaaggccccctctcagaaggggggtcaacaacattatctaaccaccattctttctcaaaccggggaggcgacaaaccaccgtgggggttcacaaaccaccacatagcgctgggcaaataattagcctgtcgccgcgctctgatggacaaacagtctttggcgcctcaccacagcagacggaatgtagatggcttactgagggacagcgacattctttttctaccgcacggaactngctggttgtgatgacacaacacgcaacgacagcacacaacagaccgaccacgcaacagtagatccaacacaagcagaagcggac

SEQ ID NO: 590693 - DNA, 3093 bp, Homo sapiens
  misc_feature (60)..(60): n is a, c, g, or t
  misc_feature (67)..(67): n is a, c, g, or t
  misc_feature (70)..(70): n is a, c, g, or t
  misc_feature (73)..(73): n is a, c, g, or t
  misc_feature (2996)..(2996): n is a, c, g, or t
  misc_feature (3013)..(3013): n is a, c, g, or t
  misc_feature (3022)..(3022): n is a, c, g, or t
  misc_feature (3030)..(3031): n is a, c, g, or t
  misc_feature (3037)..(3037): n is a, c, g, or t
cattgtgtgtttgcagctggtcaggctggtctcgaactcctgacctcaggtgatccaccngtctcgnctngantagctgagattacaggcatgtgccaccaggcatggctaatttttgtatttttagtggagacagggtttcactctattaggctggtctggaactcccgacctcaggtgatccacgtgcctttgtctcccaaagtgctgggattacaggcatgagtgacggtgcccagccattcgtgacatgtttatacaaatataactttagcaaatatttagcataactatcaaaattacaaatcatattaaatttgtataaatgtatgcaatttttggaacacgcatatcaacaacatacccataaatataactgagatgagatctaatgtcacctcacttgacagtgccctcccatgcagtatcgccacatttgacaatgcctgcccatttaatctaccaaataaatcgaatcacttaatacctctacaagatgagagatacattctttagactccccaagggatgcagctgaaaaaaatcccaaagttagttttaagccaaaaagacttgatttaggattttgacactggagaaacccatcaaagatgtcaagtttgaaaacacttgatcaaaacagaatcacaggtcactattaaaagagtattaatttaaccagagacttccaaagcaatacagaaacttacatggatataaaaaccctaacccttttaaaggtcagatttgctaagtgatcaaaaggggtacttgaattgaatcgacacaggaagagtgtgtacagggttatgagtgtaggcagatggttactttggtcatatctccatttgccacctgattacacatgagaatggcatctttactcaccagaaagccagtattataggaggtgtaggaggcattcttggacttgagacaagaacattgttgtgtagaaatttcattgactgtgttaaaattattctccatgggctggagaacacataacatggcctttagaatgagacgggcattgattggatgcaaggtctccacacttactagctgtgtgacattggacagagtgcttcatcattccgagactcagtttttaaaggaaaaacaactaactaccttgcaagcttgctagcaggtttaagtgtaataatgtgtgggaatgactgcaccgtgactaacatgcagtgacagcttaattaatgttaacccttatcattatcatataagaatgtgagttacataagagaggagtcctgtcagttcgttctctgctgtgtccccaagaccatgaatcatggctggcatgtagtaggcatttaataatatatgttcaacaagtatttggcagtcttggagggcagaaaaggaggtggggaagatttttaaataacattttttaaaaagtcacattgtcctacaataccgatttttcttgcatatttaggaaattgagggtttttttctaaaacatgcggacatatgggaaataggatgcaacatttgcactaatgtttcagacacagttagaggtttccaagagattttgcgctggggaggctgcttgctacaagctcccaaagctctgggaggacatagtattcattcctccctcagcagaagcggtgaggcaagaagctctggggagcacccagcgttggacttttagcatagtgtgtcaggtcttcatagtttgggcccagggcacagagaagtcacagctctccggcatcctgtgacctttaccctctttgccaagggaaaatgtggcccaccaaagcaagaaacttgagggcatgggtcaccccagccctggcatctgcccagagcccgagaaggaaggaacaatgatcctccagctacctcacggggctggcacaggtgaccactgccctggcatcacccagctgtgtccggcagcctgaaccccatctgtggggatgcgaggaggaaaatacaaaagtccttaggtgaacactgagaaggcagatgcagcagaaacctccaggccagaactacccagtcttggacctatggtggagatagagcatagctggcgatcatgtgtacttacactctaaggtcacctggttgcactatggcctcatctgtggctctgaaaatgaagatttggaaggagatcatcacagctaatgtttaacaagcccctcctgtgtgccaaatcattcacccctcaccacaaccgaatgagctaaggattctcattatatatagtttatggagagggaagtgcagacataaagaggtgaattatcttacccagatcacacagctgataagtggtggaggcagaatagaatctaaacagtgtggctccggagcccacatgcattgattcgacaagtgtttattgagcacctgccgcggacaaggccttgtgtgattaaatagggttataattagtaatataaaaatgagaaatcactaatgctttttagacttaacattttctttttttgtaggtttcaggcacagaactgtatatccaataatagtgaaatggatcccactaattatgacagaaatgatgatacatttaaatgacttggatgttttataggtatgatctcgtgaaaccttgagagaaactgaatgacgaatgaaactattgttcctgtttcacacagaagaaaactgaggttaaaaggggtaaagtaattttgcatggcatgaagtagaaattcaaagtacaggaatttgaacttggttctgtccttttctgaagcccttgaccactatagactcaaacatcaccttgtttttccactcattcaacacttttttttttaaattatctaataggttggcactcatcatgagcccctgttctcattctgcaaatggtgaagctctctattgtcctgaccccacagttcctgtcccatgaccagggccagctcaccaaggagctgcagcagcatgtaaagtcagtgacatgcccatgcgagtacctgaggaangttgatggacggatggntacatgatntgatgganngtttantatcgggacttccgaccctgctgatgttttgttgcttaagatataaatggcttaac

SEQ ID NO: 590694 - DNA, 104 bp, Homo sapiens
taaatgcttagttaatgtcagcctagtagctgatcttaggcttgccctgcacttatttttttcgtttttaaatttatggaggtcagtcccgctaggctggcaag

SEQ ID NO: 590695 - DNA, 3278 bp, Homo sapiens
  misc_feature (60)..(60): n is a, c, g, or t
  misc_feature (67)..(67): n is a, c, g, or t
  misc_feature (70)..(70): n is a, c, g, or t
  misc_feature (73)..(73): n is a, c, g, or t
  misc_feature (3181)..(3181): n is a, c, g, or t
  misc_feature (3198)..(3198): n is a, c, g, or t
  misc_feature (3207)..(3207): n is a, c, g, or t
  misc_feature (3215)..(3216): n is a, c, g, or t
  misc_feature (3222)..(3222): n is a, c, g, or t
cattgtgtgtttgcagctggtcaggctggtctcgaactcctgacctcaggtgatccaccngtctcgnctngantagctgagattacaggcatgtgccaccaggcatggctaatttttgtatttttagtggagacagggtttcactctattaggctggtctggaactcccgacctcaggtgatccacgtgcctttgtctcccaaagtgctgggattacaggcatgagtgacggtgcccagccattcgtgacatgtttatacaaatataactttagcaaatatttagcataactatcaaaattacaaatcatattaaatttgtataaatgtatgcaatttttggaacacgcatatcaacaacatacccataaatataactgagatgagatctaatgtcacctcacttgacagtgccctcccatgcagtatcgccacatttgacaatgcctgcccatttaatctaccaaataaatcgaatcacttaatacctctacaagatgagagatacattctttagactccccaagggatgcagctgaaaaaaatcccaaagttagttttaagccaaaaagacttgatttaggattttgacactggagaaacccatcaaagatgtcaagtttgaaaacacttgatcaaaacagaatcacaggtcactattaaaagagtattaatttaaccagagacttccaaagcaatacagaaacttacatggatataaaaaccctaacccttttaaaggtcagatttgctaagtgatcaaaaggggtacttgaattgaatcgacacaggaagagtgtgtacagggttatgagtgtaggcagatggttactttggtcatatctccatttgccacctgattacacatgagaatggcatctttactcaccagaaagccagtattataggaggtgtaggaggcattcttggacttgagacaagaacattgttgtgtagaaatttcattgactgtgttaaaattattctccatgggctggagaacacataacatggcctttagaatgagacgggcattgattggatgcaaggtctccacacttactagctgtgtgacattggacagagtgcttcatcattccgagactcagtttttaaaggaaaaacaactaactaccttgcaagcttgctagcaggtttaagtgtaataatgtgtgggaatgactgcaccgtgactaacatgcagtgacagcttaattaatgttaacccttatcattatcatataagaatgtgagttacataagagaggagtcctgtcagttcgttctctgctgtgtccccaagaccatgaatcatggctggcatgtagtaggcatttaataatatatgttcaacaagtatttggcagtcttggagggcagaaaaggaggtggggaagatttttaaataacattttttaaaaagtcacattgtcctacaataccgatttttcttgcatatttaggaaattgagggtttttttctaaaacatgcggacatatgggaaataggatgcaacatttgcactaatgtttcagacacagttagaggtttccaagagattttgcgctggggaggctgcttgctacaagctcccaaagctctgggaggacatagtattcattcctccctcagcagaagcggtgaggcaagaagctctggggagcacccagcgttggacttttagcatagtgtgtcaggtcttcatagtttgggcccagggcacagagaagtcacagctctccggcatcctgtgacctttaccctctttgccaagggaaaatgtggcccaccaaagcaagaaacttgagggcatgggtcaccccagccctggcatctgcccagagcccgagaaggaaggaacaatgatcctccagctacctcacggggctggcacaggtgaccactgccctggcatcacccagctgtgtccggcagcctgaaccccatctgtggggatgcgaggaggaaaatacaaaagtccttaggtgaacactgagaaggcagatgcagcagaaacctccaggccagaactacccagtcttggacctatggtggagatagagcatagctggcgatcatgtgtacttacactctaaggtcacctggttgcactatggcctcatctgtggctctgaaaatgaagatttggaaggagatcatcacagctaatgtttaacaagcccctcctgtgtgccaaatcattcacccctcaccacaaccgaatgagctaaggattctcattatatatagtttatggagagggaagtgcagacataaagaggtgaattatcttacccagatcacacagctgataagtggtggaggcagaatagaatctaaacagtgtggctccggagcccacatgcattgattcgacaagtgtttattgagcacctgccgcggacaaggccttgtgtgattaaatagggttataattagtaatataaaaatgagaaatcactaatgctttttagacttaacattttctttttttgtaggtttcaggcacagaactgtatatccaataatagtgaaatggatcccactaattatgacagaaatgatgatacatttaaatgacttggatgttttataggtatgatctcgtgaaaccttgagagaaactgaatgacgaatgaaactattgttcctgtttcacacagaagaaaactgaggttaaaaggggttggcactcatcatgagcccctgttctcattctgcaaatggtgaagctctctattgtcctgaccccacagttcctgtcccatgaccagggccagctcaccaaggagctgcagcagcatgtaaagtcagtgacatgcccatgcgagtacctgaggaagacgatcctacacctgccacctccgatggatccactgcctctgtgcctgcctgtactgctgatgctccagtggataactcagcatcccagcctaggcccaatgccactgaagatggacctgccccctggggacccaggagtcctaccactcagctgtccccaggagtgcccagaccctcattcttatccaggacctaggagccctacccctggccttccctcatcagccgtaaatgatgatttactgctgttaccatcatcactgccttcagtgaccaagggccttccaaggtgccagctctggaacgaaggatgcccttgggaggtgatgacactcangttgatggacggatggntacatgatntgatgganngtttantatcgggacttccgaccctgctgatgttttgttgcttaagatataaatggcttaac

SEQ ID NO: 590696 - DNA, 980 bp, Homo sapiens
gattgctgccttcatacaacgcctcagtggatccagcaacatctttgagcctggagctgatggggcccttggattctttggggccttgctttctcttctgtgccagaacttctctatggtggacgtagtgatgcttctccatgggcatttccagccactacaacggctccagccccagctgcgatccttcttccaccagcactacctgggtggtcaggagcccaccaaccccagttacccttcgggtgggacaaccaccacaacttgtgtactcagcggggcgtctagaaagagtatgtgcgaggagagttcctccttgggtgcatggttcagccaggtgtggtcatcatccggacaaacctggaatttctccaagagcagtttaatagcattgctgcgcatgtgctgcattgcacagatagtggatttggggcccggttgctggagttgtgtaaccaaggcctgtttgaatgcctggccctaaacctgcactgcttggggggacacgcagatggagcttgctgctgttatcaatggcgaattcgtcgtatgtctcgtggggtgaatccctccttggtgagctggatgaccactatgatgggactgaggcttcaaggtgggtctggagcacatgccttgtaggcctgatgccatagttcagaatacgtacgcagggttgggatccccccagcactatcgtgaggagcaatgcaaggccagggaagcagaagagctccctgacgccagcgggagaagggtcccaggccgtgaaacagcaggcgaaagccatgtcgagcgtcaccccgcccgggaggggccccggagaacgagtggagttcacctaacaaacctgggggacgcccggaggccatacaacgagtgagcggagggaacggccctatgcgaccaggtccgaaaacaaaagcgggccatctacggagggaagggcacaccaaaagggacgagcaacactgcaacgc

SEQ ID NO: 590697 - DNA, 781 bp, Homo sapiens
  misc_feature (5)..(5): n is a, c, g, or t
  misc_feature (7)..(7): n is a, c, g, or t
  misc_feature (10)..(11): n is a, c, g, or t
gacananggnnaggtgaggaggctgcgtctggctcccgctctcacagccattgcagtacattgagctccatagagacagcgccggggcaagtgagagccggacgggcactgggcgactctgtgcctcgctgaggaaaaataactaaacatgggcaaaggagatcctaagaagccgagaggcaaaatgtcatcatatgcattttttgtgcaaacttgtcgggaggagcataagaagaagcacccagatgcttcagtcaacttctcagagttttctaagaagtgctcagagaggtggaagaccatgtctgctaaagagaaaggaaaatttgaagatatggcaaaagcggacaaggcccgttatgaaagagaaatgaaaacctatatccctcccaaaggggagacaaaaaagaagttcaaggatcccaatgcacccaagaggcctccttcggccttcttcctcttctgctctgagtatcgcccaaaaatcaaaggagaacatcctggcctgtccattggtgatgttgcgaagaaactgggagagatgtggaataacactgctgcagatgacaagcagccttatgaaaagaaggctgcgaagctgaaggaaaaatacaataaataatatactatcctaacaaaaaacatgtctgccgccttcgcccaatcgactttagactcgagcaagcttatgaatgccgccgcaatttgacctaacttgtcaaattggccttaagtgagccgatttcaattcaatggccgtcgtttaaaacgtcggactgga

SEQ ID NO: 590698 - DNA, 1409 bp, Homo sapiens
  misc_feature (60)..(60): n is a, c, g, or t
  misc_feature (67)..(67): n is a, c, g, or t
  misc_feature (70)..(70): n is a, c, g, or t
  misc_feature (73)..(73): n is a, c, g, or t
cattgtgtgtttgcagctggtcaggctggtctcgaactcctgacctcaggtgatccaccngtctcgnctngantagctgagattacaggcatgtgccaccaggcatggctaatttttgtatttttagtggagacagggtttcactctattaggctggtctggaactcccgacctcaggtgatccacgtgcctttgtctcccaaagtgctgggattacaggcatgagtgacggtgcccagccattcgtgacatgtttatacaaatataactttagcaaatatttagcataactatcaaaattacaaatcatattaaatttgtataaatgtatgcaatttttggaacacgcatatcaacaacatacccataaatataactgagatgagatctaatgtcacctcacttgacagtgccctcccatgcagtatcgccacatttgacaatgcctgcccatttaatctaccaaataaatcgaatcacttaatacctctacaagatgagagatacattctttagactccccaagggatgcagctgaaaaaaatcccaaagttagttttaagccaaaaagacttgatttaggattttgacactggagaaacccatcaaagatgtcaagtttgaaaacacttgatcaaaacagaatcacaggtcactattaaaagagtattaatttaaccagagacttccaaagcaatacagaaacttacatggatataaaaaccctaacccttttaaaggtcagatttgctaagtgatcaaaaggggtacttgaattgaatcgacacaggaagagtgtgtacagggttatgagtgtaggcagatggttactttggtcatatctccatttgccacctgattacacatgagaatggcatctttactcaccagaaagccagtattataggaggtgtaggaggcattcttggacttgagacaagaacattgttgtgtagaaatttcattgactgtgttaaaattattctccatgggctggagaacacataacatggcctttagaatgagacgggcattgattggatgcaaggtctccacacttactagctgtgtgacattggacagagtgcttcatcattccgagactcagtttttaaaggaaaaacaactaactaccttgcaagcttgctagcaggtttaagtgtaataatgtgtgggaatgactgcaccgtgactaacatgcagtgacagcttaattaatgttaacccttatcattatcatataagaatgtgagttacataagagaggagtcctgtcagttcgttctctgctgtgtccccaagaccatgaatcatggctggcatgtagtaggcatttaataatatatgttcaacaagtatttggctcttgctgtggcagtcttgctggtggaaggtaccgagctgatgta

SEQ ID NO: 590699 - DNA, 348 bp, Homo sapiens
aggccacatctggggacgcccatgatgtggctgatatgcgagagcttacgctgtgaaggaagcaacagcctcaagctcgaacctactgtacctgtcctgcacgacggcgtcctgaccgaggccatgatggacacccatgtgctagatgctgcccaacctcacgcatcaaatgatgctctggctgaagagggggaggcctgggccctaggacggactaacctgatgctcgtgtgcatggcggatgaccatacactgacgggagcctggacgatgactccctcacatgcctgcctttgctgccccgcacatttgggaaatgctgcctgaaataaatcaccggcggggccg

SEQ ID NO: 590700 - DNA, 831 bp, Homo sapiens
  misc_feature (5)..(5): n is a, c, g, or t
  misc_feature (7)..(7): n is a, c, g, or t
  misc_feature (10)..(11): n is a, c, g, or t
gacananggnnaggtgaggaggctgcgtctggctcccgctctcacagccattgcagtacattgagctccatagagacagcgccggggcaagtgagagccggacgggcactgggcgactctgtgcctcgctgaggaaaaataactaaacatgggcaaaggagatcctaagaagccgagaggcaaaatgtcatcatatgcattttttgtgcaaacttgtcgggaggagcataagaagaagcacccagatgcttcagtcaacttctcagagttttctaagaagtgctcagagaggtggaagaccatgtctgctaaagagaaaggaaaatttgaagatatggcaaaagcggacaaggcccgttatgaaagagaaatgaaaacctatatccctcccaaaggggagacaaaaaagaagttcaaggatcccaatgcacccaagaggcctccttcggccttcttcctcttctgctctgagtatcgcccaaaaatcaaaggagaacatcctggcctgtccattggtgatgttgcgaagaaactgggagagatgtggaataacactgctgcagatgacaagcagccttatgaaaagaaggctgcgaagctgaaaaaaaaaaaaaaaaaaaaaaaaaaaaaaaaaaaaaaccccgggggctacttttgggggggggcggaacaaagaggggttcacgacaaaggcggccacgcggcccacaagagggtgtctcggggacccggagctttctggtgtcaccaagggggaaaacaccgcgggggtcccacacaaaagggggacacgaaaaaaatcgggcaaagaccccggggtaaccgcgcata

SEQ ID NO: 590701 - DNA, 1006 bp, Homo sapiens
  misc_feature (814)..(815): n is a, c, g, or t
  misc_feature (822)..(822): n is a, c, g, or t
  misc_feature (825)..(826): n is a, c, g, or t
  misc_feature (847)..(849): n is a, c, g, or t
  misc_feature (853)..(853): n is a, c, g, or t
  misc_feature (865)..(865): n is a, c, g, or t
gcggccgcctactactactactactactactgctcgaattcaagcttctaacgatgtacggggacatggaaatttaaagcaggttcttgttggtgcacagcacaaattagttatatatggggatggtagttttttcatcttcagttgtctctgatgcagcttatacgaaataattgttgttctgttaactgaataccactctgtaattgcaaaaaaaaaaaagttgcagctgtttggtggacattctgaatgcttctaagtaaatacaattttttttattaagtatggtggtcctttccataggtctgaaatttttcttctggaggggaagctagtctttggctttggcccattttggaattcacatgaatttattacaggggtttatcctttcatatagttagctaataaaaagctttggtctacacacccggcatatcataatggggggtaaagtcaagtggagatagtttccatccataactggaacttccaaaatctggatcagttaagaaaatttcacatagcccatttacttttacaaactggaagagtaatcaatctactcaaagcatgggattatagaatcaaaccttttggaaagtctgtccttgaaggactaatagaaaagtttgtcctaccctttacatgaggactctattctttaactcccattaccatgtaatggcagtatattgtgcagtccccacattaaagaagacctgagaatgtatccccaaaagggtgagttaaaatacaagatgccatattaaattttggtggacataagtctcgctgaagactatgaaatgcnngctatanganngtctttcccatttatctaaannntggnctgtcaggaaangagacttccttacaagtatttcaatcacgtgggccagctttcaaacaaaaatgccctcaaaaaggtatattcccaatataggttgcccttaaaatccagtgaaggagaaaagacattggtcccgtgattaatatgaaatca

SEQ ID NO: 590702 - DNA, 124 bp, Homo sapiens
  misc_feature (65)..(65): n is a, c, g, or t
ctgactcttgagtgatccccggatctctctggagctatcttctgatgtagcagcaggtgcagggngtgcttgtaggcgatcagaagctggtggtagtcatacaccatgaggccagtgagggtct

SEQ ID NO: 590703 - DNA, 199 bp, Homo sapiens
ggaagggtcacaaatcatgatggaggcaaaggacattttgatgatggcggcagaaacagaatgaaagccaagtgaaaggggaaactcttgtgaaacaactagatctcatgagacttattcacgtaacatagagaaagaagtatatgcggggaaaactgggccccatgatttaattagcccccactgagtccttcccaca

SEQ ID NO: 590704 - DNA, 951 bp, Homo sapiens
tttcaccattacatgagccagtgcatgtagcttctctgagtacaagacaaaatttatggcaatgggcaattagacttatactcagagaagcaacatgcgctggctcatatatgtgcaccagaaacgatatcaccattaataaaaattaacttggctaggtatggtgtctcacagccctgtaatcgcagcacttcgggtggctaacggcagatagactgcttgaacccaggagttcaagaccagcctggacaacatggtgaaaccccagtctctttaaaaaaagaaaaaaaagtccaaaaaatcaacgctgggcatggccgcacaatcgcagtggtagacccagcaaagtcaggacggctgaggtgggaggatccactggagaccaagggagcccagcggacgggacgccgaccctcgcagaatcgcccaacctggcatccccagccagagcaaccagacgcaaagacaacagacagcaagcatcacgagcccactttgaccactgggtataacagataggggctaataagttagaagacctgacctacgcctatacagggagaaggcagccgatcccagctaatggaatacaagaggagcaaaccccaaagggaacatacccaagcacgcccccaggatagagcgtgcagacaacacgacccactgccaggacacaattgttggacaacaccgggcacactagataccattgtacacacaaagagcttgaccccccaaagaagcgaatacaaggacacccagcgcccaagaatattaacacacggcgcgaagaaaatgagacagatagagacgggaaccagagcgcaagaggatgatcgagcatgcaaaatcgcaggataaatgacctgcatacatacggatggaagagcggacccaagtccaaccagcggaaacgaggccgggccgaaagaaggcacaagaagcaccgga

SEQ ID NO: 590705 - DNA, 342 bp, Homo sapiens
cttacagatttttaggaaataaaaagactttctaaataggaaataaaaatattttcttactttcagggaataaaaatatttgttaggaaacaaaaagacgtctgatggaaacaaatcaggattttaaggtggaatgcctaatgatttctcaacaaaacttttgcaaaactactcttatttgatgagagaaatgagcagaaacattgtgtggtgaagaaggcttccctggtgaacttttcctgagcatttttctgctaaagcttcggctaactttctcaaaacactctcataataagcagatgttattgttctttggccctccagaaaatcatcaatcaaaat

SEQ ID NO: 590706 - DNA, 443 bp, Homo sapiens
  misc_feature (283)..(283): n is a, c, g, or t
  misc_feature (411)..(411): n is a, c, g, or t
  misc_feature (439)..(439): n is a, c, g, or t
tgtgtgcctactaagtctctctctcctgctcctttatatgaagatgtgcctgcgtccccattcgccttctgctctgccatgattgtaagtttcctgaggcctccccagccatgcttcctaaacagcctgcagaacttgttgctttccagtccacacttcaaacccgagagtatttacaagcatggggaatagagacctaaaatgaagattctgcactcgtgcaaatctattctcaaaaagagcacgtgtctttgagcctgtctgtgttgccggttgactgtgncagttccctgaatcttcctgtggaacgcaaggctcatcgaaagacaacaaatatcttgatgctctcatatacaatattattattaaaacgcaaaagcagctgtatcattttgcaataatatcagcttngtactttgtaaataaagttgtgaagaangaaa

SEQ ID NO: 590707 - DNA, 236 bp, Homo sapiens
ttacttttgactgctctagttttatacacagttgaagactcttaataaacatgccctatatcttatgcaagtactgcatacatcaaagatctgcttaaaaggcaacgtactagacatcagctaatttactgcataattacattctcaacagcaacagtctgtatattctgaatatttaatagctgtgttcttaatgaaacttgttaagcactggaacttccacttcggggaagtca

SEQ ID NO: 590708 - DNA, 118 bp, Homo sapiens
ctgcttctgctatctgccatagccgccactgatggcacagtgcccctccaatggagatcctcttggagccccccaggccatacagactgcttcctgcttctgcccctcaccaagtacc

SEQ ID NO: 590709 - DNA, 678 bp, Homo sapiens
  misc_feature (50)..(50): n is a, c, g, or t
  misc_feature (146)..(146): n is a, c, g, or t
  misc_feature (162)..(162): n is a, c, g, or t
  misc_feature (173)..(173): n is a, c, g, or t
  misc_feature (180)..(180): n is a, c, g, or t
  misc_feature (184)..(184): n is a, c, g, or t
  misc_feature (678)..(678): n is a, c, g, or t
gcggagggaaccatgcgaggttctgagaattgcggcgagggtcgcctcgnagagacggtttctagaggaattctgaaatccccaccacttcctccctccgggggatttgatcccctatgggccaccgctaacagcatcatcgtgcntggatgatgatgacgnaagatgaagcnagctgcntcangccagggtccctctccatcctacttcgtcccaatgcggtcctcacctggggcttgaagccccatagcgtcctctgagtccgtcatggggccagaggaagtcagtagttcggagcggcgaagcaaatgctacaagctgtgagcaatagagaagctgttcgaacgagttccttggaacttctgtaagatgctacgtacagcagtaccaccctggaggtggtcccattcctctataaccggcagcaacgtgcccactctctgtgtttggcctcgtgcggagttctgcaacatcctctctagggtcctgtctcgggcccggagccggccagccaagctctatgtctacatcaagtgagctctgcaactgttctcaaggcccactcagccaaaaagaagctgaacttgtgcccctgtccgccaaccacctccaatgagccctcgtgggaataaccctcgcaaacacctctccttggaccccaacaaatgctgaaaacan

SEQ ID NO: 590710 - DNA, 116 bp, Homo sapiens
  misc_feature (6)..(6): n is a, c, g, or t
gagtangcaggcttgtatccttcccttcagtgatagtaagtcacctgcagttccctggcagttctagaggtggcgtcagggagctagcgattagagtcgagagacttagagcacca

SEQ ID NO: 590711 - DNA, 334 bp, Homo sapiens
cggtgttatctcgagctcactgcacctctgcctcccaggattcaagcattctcctgcctcaactgccaagtagctgggattacagacatgcaccagtacgcccagctaatttttgtatttttagtagagacagagttttaccgtgttggccaggctgggctcgaactcctgacctcgggtgatccgcgtgcctctgactcccaaagtgttgggattacaagcattagccaccatgcccgggctgcttttccattcttaagtgtacatgctctattttagagcccttaaatagcctagtcttttttgcctagaatattcttcacctcttctcttc

SEQ ID NO: 590712 - DNA, 774 bp, Homo sapiens
ggtgatgtggcttctgatgggaaaaaggaacccactcacgactacacacgctgtgacaacaacagactggacagtgcttcagcagcacgcaaagacacaacagcttaaaacacggtggaccaacgactcgacggaaccttgactacaagacacaccgaacgcacgcgttgggaaccactgggaacttaacaacactgacggacacacacaacaagacacccacggatgctgaactcattctgacggaaccgctgactgactcccaaccaacacgactaccaacggtgacacaaccgcagaactggtcaaacaggctgactgacgacaccaaaggacccgacgttacttacaagtacaccaaggaactgacggtactacgacattttggaccccacttaattcaggaccccaattgtataccctgattaggggttacttagatcgctaattgatgactacgtcttacataacacaggggggtatattaacctagtaacacggctatgtgcttacacatcctttgttatcattagccacaacatttggcgcgcaccatggttttgacaaaacaagacaaaattacctatccacattttagccacgggacaaggcccacaagtatccccgttcgcatttaaattccaagacacacgtttccacacggacaaacctttatccatatggacacattacaaaagtatggggccacggcatacggtcaccctgccaacggacccacgggcaagggaccccgcgcaccacacttttacacgg

SEQ ID NO: 590713 - DNA, 210 bp, Homo sapiens
  misc_feature (15)..(15): n is a, c, g, or t
  misc_feature (81)..(81): n is a, c, g, or t
  misc_feature (87)..(87): n is a, c, g, or t
  misc_feature (91)..(91): n is a, c, g, or t
  misc_feature (207)..(207): n is a, c, g, or t
ttagtaaggtcttgntgttatttttcatcgtatcaggtattgttgctattagagaaaaaagtaggataacttgcaacattnagctcngggntttcctaccacattttagagatttaccgtttccatatatttaacatccctggttacataatggacatttgtcttttaatgttttttcaatgtggggtaaataaaacattttgtctncta

SEQ ID NO: 590714 - DNA, 824 bp, Homo sapiens
cgtctctccccggagagcatgagcttcatcactcgctccaccttctccaccagctaccggtccctgggctctgtccaggcgcccagttacgagcgcccgggcaggtcagaagcgcggcagcgtactatgcaggcgcatgggggctctggttgcccgagatctcctgctgtcccgctcgccaccagcttcagtggtgcgagtctatggtgtgtccggagggcgtccctggtccatcgctgtggtatagtcctggtgggtctgtgcagggaatgggaggcatccagaacgagaaggagaccatgcaaatagtccgtgaatcgactccgcctgtgcactacttgacctggaacaagagtgagagagccgtggatgaccgagaacccggaggctgtagagcaaaatccgggagcacttggcatgaagagagggagccccaggtcatagacatggagccattagcttcaggatcatcgacggacctgagggctcagactcttcgccaatactgtggaccaactgccccgcatcgtactgcgggattgacaatgccgcgtcattggctgctgatggacttgtacgagtcgagttttgatgacagagctggtcaatgcagccgtgatcgtgtggacgagacggacgatccagtgggcctccggcggaggttcacttgttgaccaccaagtgttcactacagacttgctgctgggagaccacgagaatcgagggctcctcaggggcggggctgctcttcatgaagatagaaaccccgattgagggaagtcgcatgggcgtgcaacgcccggattgcccagctctggggtgac

SEQ ID NO: 590715 - DNA, 392 bp, Homo sapiens
tcatgagcctttagacattcccgcgcccgcaaagactgagacggcgtcctgctccaagtcctagacgaactctttaatgaacgtttagatctgatgttcaggtgtcatgttcttccagccttctgccttaatgtatggctacatgccggagtcgggtctctcacgccgagtacttgtgccaactgaaggtcggctgcctgaagtcgtcaagagtcacccagcccgccgccttttcgacgaacacatcttttttcgtcgtgccctagtagcttttgagtgtaattcaggaggtcggtcgcgatggcctgccccggccaatatgtcttggcgagatctgtggcgatcgataggaccaagaagtcgttgtcctgggactgcagctttcccagagc

SEQ ID NO: 590716 - DNA, 172 bp, Homo sapiens
ccctctttcatcttccttcgtcaccgtcttctccttcttattactttcttcttccttctccttccttcgtcttcttctccttctcctcctccttccttctccttcgttcttcttctccttcttttctttttcttccttcttcttctccctcctccccttctgtcgtcttatc

SEQ ID NO: 590717 - DNA, 108 bp, Homo sapiens
agagcatgtggagtacatgtcagaaacctggggtcaagagcagagagcctgagagctgagggtccgtatatgtggttggggcatgcccttccttctttctctttcttt

SEQ ID NO: 590718 - DNA, 954 bp, Homo sapiens
  misc_feature (1)..(1): n is a, c, g, or t
  misc_feature (63)..(63): n is a, c, g, or t
  misc_feature (67)..(67): n is a, c, g, or t
  misc_feature (73)..(73): n is a, c, g, or t
  misc_feature (76)..(76): n is a, c, g, or t
  misc_feature (164)..(164): n is a, c, g, or t
  misc_feature (245)..(245): n is a, c, g, or t
  misc_feature (264)..(264): n is a, c, g, or t
  misc_feature (278)..(278): n is a, c, g, or t
  misc_feature (462)..(462): n is a, c, g, or t
  misc_feature (468)..(468): n is a, c, g, or t
  misc_feature (487)..(487): n is a, c, g, or t
  misc_feature (558)..(558): n is a, c, g, or t
  misc_feature (569)..(569): n is a, c, g, or t
  misc_feature (677)..(677): n is a, c, g, or t
  misc_feature (707)..(707): n is a, c, g, or t
  misc_feature (720)..(720): n is a, c, g, or t
  misc_feature (738)..(738): n is a, c, g, or t
  misc_feature (769)..(769): n is a, c, g, or t
  misc_feature (869)..(869): n is a, c, g, or t
  misc_feature (876)..(876): n is a, c, g, or t
  misc_feature (931)..(931): n is a, c, g, or t
  misc_feature (933)..(933): n is a, c, g, or t
naaacactaggtgatgggttgagggtggaggtgggggacaaaggtgcgccgtgcacagaagtnagcngcagcngcntgctccccgcactgaggactcggcctggactgcagtacctccaaatcaacacgcagcaagaggggagtgcagggagggccctgaacancaagcctctgaaaggctaagggacaaagctccagctgtcccaggaaaaccagcaataaataaaagtgagggacggccccanccacacatattaactagtnacccatcttcactntggaggactgaagaattgcgacgatgaccccaaagaggccaatggcgctgccaaagatcttcacgatgagaatttattacaaagaggctggggttctgagcatcggccagggcagcaccactgcccacgatgcccacgcagactaccacagaagaggtaagaaaggactacggtgaggccagcnccaaanatggagtggcctgcatggnagtaccgatggccgagggcctgggggtctgtggaactgaaaggctcagccatgtggctaatgacaatagcnatgatgaagcngtagatggccacagcctcacagaagaggaggctgaacaggttcttggtcttgatcctgggggccttcactactccaccaatgaaggaggagctggtaatatagatgcnccaggctgccccaaccacagaaagggaganagctaggccaatncccaggttggaccacatnaagggcgaagtctccgtaaggaccatgcaanaacaaagcggaacccaaaacaaaaatggtgtagcagaatcccacggccagcgcgcaggcccagaaggccacgaagaccccggagtagagcagttctagcnccgtaanggcggcgacggcggcgggggtaggaacggcggggccggagctacaaacgcgttcnancttacaccgtccgttccgcag

SEQ ID NO: 590719 - DNA, 600 bp, Homo sapiens
aacaagacgtgagtttacaaagtcctaaaatggaggccaagagttggaccgcgtggactatgacatacagaaaaagactgtataccctctctatataactcaaaccgtccatagagaagctgtttctccatacacagaaacacacttgaaagagtctcaaatattttcaggcacatcttataggacatgtgcttctctcaggaatggaaggcatccaaatgagataaacaaagtgtgcaggatttacttaccattctcttccaacgggcaaataatgaaggtgcacaagtaaatgcgctcaagtgttctctagggcaccctcacagcgcatactttgaagaataggcttaccagattcatgagcactatacctttttaagccgcgattaccgtaaatgccacactatatggaatatgcttctcggttaaaaatgtaagcctagggtataacctccctcttatgtttaaacgcattgctaattcccagcttttcacagcttcccttgtttcatattcctgtgcgcgttccagcgtgcaatatgcgcgctgtgtatcaagagtctcgctcatggtgagtcgaaaagaacacctacaagacag

SEQ ID NO: 590720 - DNA, 534 bp, Homo sapiens
ctgtgataatataggactttagagtggagacgcctttcctgacaagtctagggttgattttatgtatttgctaagatttattaaaataaaaaatggcatattctataaggaaaaataatattaatggtattttaattaagcttaagcaataaataatggttatcacataatttttatttattattctttaccttatttcagggtctgtcttactgtgaagtttcaataaaatgcttagaactacattttcctggccaggtgcagtggctcatgcctgtaatcccagcactttgggaggccaaggcaagtagatcacttgaggccaggagttcaagaacaccctggtcaacatggcaaaaccctgtgtctactacagattaaaaaaaaaaaaaaatcatccgggcatggtggcacacgcctgtaatcctagctactcaggagaatcacttgaacccaggaggcagaggttgcagtgagctgagatcatgccattgcactccagcctgggcaacaagagcaaaactctgtcttaaa

SEQ ID NO: 590721 - DNA, 290 bp, Homo sapiens
tgtttgtaaacagctgttaaattcatcatgtcttaagtttaaattatttgagttccattttgtcctctgatcaattgactcatccattcatttgacaagaatgtagagggaaaaattacatgccaggaatctgggttctgtaggcaatattaacaacaaaaaaagacagttgaggaccctgagaagcacctgcactgataatgcattagagggtgatgtatgtcaagtcttctatagtctcaaatttaagaataccatcatagcatattttttactccattaaaaaaaaa

SEQ ID NO: 590722 - DNA, 784 bp, Homo sapiens
ggccctgggagctggcatgtggaacctgactcccatgaactccggacgtgtgctggctgcatgtgagtcgcagccatgttcctggttaactcgttcttgaatggtggctgggtggcttggtgtgctggtgggggaggctgggggcctgggtggggggcctgggaaatgtgcttggatgtgcctgatcatgctgtgggcctggggtgcgttgtggtgcggcggatgggctggcgtgctgtgcagggtggtggacgtgcgtggcgtgtgtggcttcgatgtgacttgtgtcgattgctgcatcccttaggcagtcaggtcatcatgcgccatcaagacagaaggctggcttgcgcaagtacaaacgcctgagaagcccccctgaccacacatctgcatcacatttacctcccaaacatttgaaagtgccaaaaccagagaatgttgagggacggtccggtaccatgcttcctgggagacacttcttttggagcgcaagattatggcttgggatgacttgaaagaattgtgaagagtcaagccggcccaatagaaattcattgaaagcatatattcaaagtaaacgggttttgtatgaaaaagagaacaacgctcttgattctagacagacattgataggagttattgtggactttgaccaacaaatatgtacgcagaaattgcgtggacatgtgaattggaataggcggaaacctacaagggaaaagctggggccttatgcgggaactccaagtactttgttggacaaaatataaaaaaagagtgg

SEQ ID NO: 590723 - DNA, 418 bp, Homo sapiens
  misc_feature (27)..(27): n is a, c, g, or t
  misc_feature (67)..(67): n is a, c, g, or t
  misc_feature (88)..(88): n is a, c, g, or t
  misc_feature (104)..(104): n is a, c, g, or t
  misc_feature (115)..(115): n is a, c, g, or t
cattggccccgtggggataattatatnaaaaccctcccgggagtaccccccctacacacctttccangataaccaaccaaacccccanggaattattgaaaagngggatgaaccnggagttttggggattgacctattttccaagggatttaaaatttgtaataaggttcctcaaagcaaagaggttttgggtctcatcatgagaaagtaagacagataatagaatatgaaactgccccacatagtaaattaccgactgaaaacaaacctgagtacaagtaagtaattttcttctttcaaattcagggaagggtgttggaaacatgacaattaggagaattattacaaagcttatgtattccagagctcatccagagaattctgtttagaaagatctttcagattaattcacgctata

SEQ ID NO: 590724 - DNA, 206 bp, Homo sapiens
aaaaaaaggaaaaacccccccctttattccttcatttcataaaccatttttgggtttttgtgtgggctggggcagcccaactgtggtttttttttcccaagacaatttttaattcccatgtccggtatgttcaaagtcaaaaaactcctctttgtaaacaaattgggtaattgcccaaagcagcctttataaatcaccctaacata

SEQ ID NO: 590725 - DNA, 397 bp, Homo sapiens
  misc_feature (87)..(87): n is a, c, g, or t
  misc_feature (89)..(89): n is a, c, g, or t
  misc_feature (103)..(103): n is a, c, g, or t
  misc_feature (106)..(106): n is a, c, g, or t
  misc_feature (181)..(181): n is a, c, g, or t
  misc_feature (188)..(188): n is a, c, g, or t
  misc_feature (196)..(196): n is a, c, g, or t
  misc_feature (202)..(202): n is a, c, g, or t
  misc_feature (230)..(230): n is a, c, g, or t
  misc_feature (256)..(256): n is a, c, g, or t
  misc_feature (268)..(268): n is a, c, g, or t
  misc_feature (275)..(275): n is a, c, g, or t
  misc_feature (285)..(285): n is a, c, g, or t
  misc_feature (291)..(291): n is a, c, g, or t
  misc_feature (299)..(300): n is a, c, g, or t
  misc_feature (305)..(305): n is a, c, g, or t
  misc_feature (307)..(308): n is a, c, g, or t
  misc_feature (322)..(322): n is a, c, g, or t
  misc_feature (331)..(331): n is a, c, g, or t
  misc_feature (335)..(336): n is a, c, g, or t
  misc_feature (339)..(339): n is a, c, g, or t
  misc_feature (368)..(368): n is a, c, g, or t
  misc_feature (375)..(376): n is a, c, g, or t
ccggtcccccttgccttttttgtcaaagggtttttttcccggggcattcccctggggtgggggggccattggcccccgggggacaantnccaggccccccctnccntgtttgggtccggggggtccttttttcttttccgcaaggttccccttggccagggccggttgcccccgggggaanttttttntttgcccntggtgnctgggggttttccccaccccttcccgcnggggggccttttcctttttccgggtnaatgggttgggnggccggnaaaccccccnttcccngggttttnnggttncnngggggttttttgcncgttccccntttnnatnttttccgggggccccgccttggaattaanccccccnnggttcccttggccccttggga

SEQ ID NO: 590726 - DNA, 396 bp, Homo sapiens
ggcataaagcaggctgccgctatagtggcaactggctcaggtctcttccacgctcacgcctatgggagtgtgtttctttgatctttgagataagcttgctgtctgttcattctttgggtacacactgagtttatgagctgtaacactcttcgtgaagctctggagcctcaaatcctgaggccaccgatgacatgaacccatgggaggactgagtaactccagaagcgcatgcctttacggagggtggtaaatactcacggtggaacagtctggaggttccattccctgaaggccggtggagaacacaaaatccacccgaagggaagaaaattccaaaaaaggttttggaaacattcagaagacaagggttgcaggggactcttctaaaaggtccga

SEQ ID NO: 590727 - DNA, 463 bp, Homo sapiens
ccggtcttcctttgtctcaaacaaaacacaacaacaaaagttactgcaagggtcctatcaggagatgatgaaggactgacaggtacagcatttaccaatggcctactctatgctgtccctgggtgaaattcctgcaagagaggaggaagaatacaaaaactaatggcattagctgggcatggtggctcatgcctgtagtcccagctactcgggaggctgaggtggagaatcacttgaacccaggaggcggaggttgcagtgagtcgagatagcaccactgcactccagcctgggcgacagaatgagatcctgtctcaaaagaaagaaagagagagagagagagagaaagaaagaaagaaagaaagaaagaaagaaagaaagaaagaaagaaagaaagaaagaaagaaagaaagaaaagaaattgacaggaggctaaacgagttttcctagacaaagggaaaca

SEQ ID NO: 590728 - DNA, 81 bp, Homo sapiens
ccctcatgttcacactcctatcccccattctcgtctcatcctacaacatttggatcattaccgcgttttcctcttaataag

SEQ ID NO: 590729 - DNA, 789 bp, Homo sapiens
cgatgttgctatcattagttgagaaattgtcagaagaaatcatggagataatgcgaaatttaagtagtatacaggcctttggagggcagctagagagcttgaaaatcttattggaatctcctggtgctcacatttcttaaaaagagaaatggcgaacacccacaaactatgaccgaacggcgataaccaaaactggctgacaaagaagacagggaccttctctccaaggcattccgcgctcttggccgccgcaggaacccctcaagcccattttaaagtgggggcttctacaaagaaacagcacctgctctgagcaccgaagctcgtgcacgtgcgcctacctatctccaagggaaacaagaaccctgttgcatgggggcgcggcccccggaaccaatgtggccgcgtgcgggtcctggctccccgccccaccccgcaccgcccgcaccgcgctcacaccagtgtcctaccaccgggcgcccccgacgcgcacccccggtgcgccgcaatgcgaccaccccgccccccccaccggagcagcccgccccgcgccacgacacgcacagggcccccacgccagcctccccctcccccacccccccccccccccacgcctccgccccccgcccgtcgacctatcccgtcccccgctgtccgcccccccgtcccatgcgctcgcccgccctgcccccttccacccactcacgccctacctcacctccctccagcacccctcctcgtccacccttttccaactctccgctcccgctccctcgccaacccgtgcgc

SEQ ID NO: 590730 - DNA, 127 bp, Homo sapiens
gaggatctttagccgaatgtatgcgctcgatctcgtctggctcaggtgacaggtcagcatctggggagtgatacgctcggcgttggcgggatgcattggtcggagcagcactcaccggcttggcgtg

SEQ ID NO: 590731 - DNA, 139 bp, Homo sapiens
tattgctaggtctaggtctctggattagcacatgccaggtctactggcatagaagcaaagaatgacacaaaagatacgaacatgttataaaaggcagcgtctaacttacttggcaaatgtgcttgctattattggtttg

SEQ ID NO: 590732 - DNA, 207 bp, Homo sapiens
gggcttatgctgaggagagagctgagcctcagggtgggtttcctgttcccagtgctaccctgcataggggctccttcccaggctctgggcagcgaagaaggggtaggctgggaggggctgccgcagttgtttcacttgggcatggacgtcagacggactcaagacaccaagctttcccatacaccgtgtctctgactcttctttcac

SEQ ID NO: 590733 - DNA, 174 bp, Homo sapiens
  misc_feature (168)..(168): n is a, c, g, or t
aactggcatgggccaagctctgcgtaatagtgaacggttttttggtctggaaggaggctcatgtgagcaccatggttgaaaaggacaccgacggtggtggtctggagagcgggtacccaagagccatatttggttagatgtaatcaacccattttggtgacccactgnaaatga

SEQ ID NO: 590734 - DNA, 418 bp, Homo sapiens
caattaaaaggagcaggttatacagtaccaagagtaccattaccagtctcgactgggagatcaaaaaccatcgttcagctcaacatcacgcagtccagaccatgtgttcaagaacaccatatctgtcaaggctagtctgtagactacaggcagctcgcggttactatttgcaaaaatgatgactgtgtgctagaaagataattctcagcggaccaaatggaaagtgatcagccccacaggaaacgagagcaatggtgccgtcagtctgcttcctcatccccccacccaataaggatgccattgagctggccagcagggtcgaacaatcttatcagaaggtcatggcccttagccatcagctgcatgtcaccaccacaagcctcatctcttggaactatctgcgtaaagaccttgacct

SEQ ID NO: 590735 - DNA, 178 bp, Homo sapiens
tgatgagctcgtaccgactgcatctgtgctcaggatttattaaaacgatggcacatcggatgggcacggtggctcacacctgtaatcccagcactttgggaggctgagatgagcgggtcactggaggtcaggagtttgagactagcctggccaaaatggtgaacaccttttctctact

SEQ ID NO: 590736 - DNA, 513 bp, Homo sapiens
  misc_feature (54)..(54): n is a, c, g, or t
  misc_feature (96)..(96): n is a, c, g, or t
  misc_feature (105)..(105): n is a, c, g, or t
  misc_feature (116)..(116): n is a, c, g, or t
  misc_feature (169)..(170): n is a, c, g, or t
  misc_feature (174)..(176): n is a, c, g, or t
  misc_feature (186)..(186): n is a, c, g, or t
  misc_feature (188)..(188): n is a, c, g, or t
  misc_feature (190)..(190): n is a, c, g, or t
  misc_feature (212)..(212): n is a, c, g, or t
  misc_feature (215)..(215): n is a, c, g, or t
  misc_feature (219)..(219): n is a, c, g, or t
  misc_feature (241)..(241): n is a, c, g, or t
  misc_feature (253)..(253): n is a, c, g, or t
  misc_feature (257)..(257): n is a, c, g, or t
  misc_feature (261)..(261): n is a, c, g, or t
  misc_feature (266)..(266): n is a, c, g, or t
  misc_feature (275)..(276): n is a, c, g, or t
  misc_feature (341)..(341): n is a, c, g, or t
  misc_feature (347)..(347): n is a, c, g, or t
  misc_feature (350)..(350): n is a, c, g, or t
  misc_feature (371)..(371): n is a, c, g, or t
  misc_feature (380)..(380): n is a, c, g, or t
  misc_feature (387)..(387): n is a, c, g, or t
  misc_feature (415)..(415): n is a, c, g, or t
  misc_feature (511)..(511): n is a, c, g, or t
ttttgccaacttccgcccagggattttttcacaaccaaactaaaaatgacttantacatgggaacatcaatgcaaaaagtagaatttgtaaactcnagcccccanattagttactnctcctggttacgggaccttgcccacgagcacctgatgcctcagtgaagtttgnnagannntctgctattntntnccggcagcgaagacatatgccngcnattntgcttccccgacaatttgcatngaaatggccccntgcnaganccttnaaaaaaagnnaaattgcaaagcctcaacacagattcacctcaatccccagagcacaaatgtatataatgggagcnaaggtnggnctgggcattgaacttccagcnatgcaactngcagggnacaatttcaagtgtggaaaccatctgtnggcaagctcttttaaaaacatgaattttagacaccgtaaattctactgcagacacttttgcattactgtttgaatttcagaagggcaccacaaggnac

SEQ ID NO: 590737 - DNA, 110 bp, Homo sapiens
aaccagggtggggggggtttttaaccccgggtggggggggaggggggggttttacggccccgtggcccttgttttactttttttttgaaaaaaaaaccaccttgttttta

SEQ ID NO: 590738 - DNA, 264 bp, Homo sapiens
tattgtcgtgctgggttactgcgtggttacgtgccctcctaagttcttaatacacttttaaaagtacactttagatttgggagtagtttccaatttctggaaaagtgcaaagatagccaagagtgttccctgggtgccctcacaccactatcctccatgtgttgatggtcttatgtctacctcaggtacgttgtgttgtagcgtaagaaacccacgtgacaagcggcctcacgtgacaagcggcctgggctaccgacgctcgaa

SEQ ID NO: 590739 - DNA, 453 bp, Homo sapiens
  misc_feature (167)..(167): n is a, c, g, or t
aggtttcattatgtagacatgattgatgaagtcattggccattggtgattgaactcaacctccaaacccctctctcttccttggaggctggcgggtggagctgaagtttccaaacttctaatcaaggcttggtctttttggtggccagcccctatcctaaagctatntaggtgccagccaagagttgcctcattaaaacaaaagatggtagtcctagcactttgggagggtgaggtgggcggatcacttgagatcaggagttcgagacctgaccaacatagtgaaaccctgtctctactaaaaattagctgggtgtggtggtgtgcacctgtagtcctgttactcgggacactgaggcaggagaatcgcttgaatccgggaggcagagtttgcaatgagctgagactgcaccactgcactccaacctgggcaacagaatgagactctgtcttt

SEQ ID NO: 590740 - DNA, 1114 bp, Homo sapiens
ctgtggttcccgttcttttgcccaatacctttgtttcccccttcgagtgtggtctcttgggggttagagggccccgtggttttccattgtgtttttagcgccccttggtccccccccgcgttttgccaacccccttgtggaccccagccctgttggcccgggcgagtgcccccccccacttattgggcttattcttgggtgggcccagtgaccccctgggggaccatttcctgtcttccaaaccggggcccccgaaatgtggttcccgggagtgtgtccaaccccaaggagtacctgccccctcgcctggccaaataggcctccccgggattatatttccagggagctttttgtcccaagccgctttcaagccagcccttgaatgcctataaaatgtgtttttgagaaaagttacctctaaaagagtggtttttttcccgaggagcccaagcccctcgagggacttggagttttccccgtggcctcagactttcactgagtcctgaaatttccccgctgtaaatgttaataaagagaggcgagattttttgtgtggccctctgacccctcggttctttttcacccctctgttttggacttatttccacgctaataatggttttgggaattttttctgttaaaatgggtgtaaattttcctcaaatacccggtaatgtaacaccccaaaaaaatttgccctgcacatgcccggtcccaaatttttctctgattataaagaatgcgtcctttaaaagacacccaagaagttattcctatgaacaccttaattctttttttatattttgaaattttaaatccaatccctttatataagaccctacgcccgtggaaaacccgtgtacctttttataaaaatttcctgaaatattaaatctcttttagaaattttctctttaatgtgtgaagaccaccaagtatgggggaagaccacgcccatccaaaactaacatttttgtagatagcccatttctcatttcttttataacctgtttctcaccgccccatatgtattcttacccaaagagaatggttttaggctcccgtgttatacttttttttatatatatatataaaaattaactttacgtagtga

SEQ ID NO: 590741 - DNA, 200 bp, Homo sapiens
ccccggagaacgaggcgaacgcggaagagcgccaggaccgaccatgaatcctacctagagaagtagtcctctcaggaaaggagaagcgccactcaagtacttgaaacccaagaccttagagaaattaggtccaagatatatatatgttcagttgtatatgtataaaaataactttactggatttttagcgggggaacagg

SEQ ID NO: 590742 - DNA, 249 bp, Homo sapiens
tttaacctaatcgcggaagacgcttggtcactggagcttctagtggggagtatacctgtggaatggactcactttccatttttggaaacataattccaggtcacgacagcccagtgagggccatgacgtggtcacataatgacatgtggatgttgacagcagaccacggaggatatgtgaaatattggcagtcgaacatgaacaacgtctagatgttccaggcacataaggaggcgattaggggttagt

SEQ ID NO: 590743 - DNA, 154 bp, Homo sapiens
tagctgtactgcactccttatgtatgagggtaaagatataatacagtttattaaaactcttttattatcagtttatatcatccattacatctggcaatgcgcagtggttttatatgtgtgtaaaataatgtatatatcatcttataatggacta

SEQ ID NO: 590744 - DNA, 209 bp, Homo sapiens
atggtaccgccaagcggggaggtcgagggctggcgtaggagacggcgaagacgagcgaatcaccgtacgcctcggcgccggtgcggtgaccggtggcgaggacgaacgcggcgaactcggcgcgtgtgaccgtcgtcgccgcgatcgcgaatggagcgatatccacctcacggaccggcccctcaccgtcctccgggtaggcgagggaa

SEQ ID NO: 590745 - DNA, 769 bp, Homo sapiens
  misc_feature (718)..(718): n is a, c, g, or t
caccgcactgggcgtcggtggggggagcgtaccatccatggcaagacgcctcctgctcatcaacggcgccaagatgcccatcctggggttgggtacctggaagtcccgtacaatgcaggtgattgaagccgtgcaggtgtgcatagacgtcgagatcacgcacatcaactgtctccatgtggaccacaatgagactgaggtgggcgtgcgcattcaggacatgatcagggagcccgtggtgaaacttgataagctcttcatcgtaagtgaactgtggtgcacttaccatgagaagggtctggggtaaagagcctggcagaagacactcagcgatctgaagctgaactaactggacccctaccttatatactggacgactggatcgaaacctgggaaggaattcttcccattggagagagcgggctatgcgtttcatagggacaccaacactttgaaacgtgggctgccatgtaaaagccgatggctcaagggatggtgaaagccactgagcatattaaattttaacctttcctggggaaaatcccttaaaaaccctggtttgaggataaccctgagttaaccaataaaaggccccccttgttcatcaggagaaggtatacaatatggcaggccaaaaaaaattgggacccattaagacactaggctttttgcacggctgggaaaaaagagaaccttaaaatcgtgggggccgtggtangcgattctgtctaacccataaaaaaatccggggggggccgtgtccataaag

SEQ ID NO: 590746 - DNA, 342 bp, Homo sapiens
  misc_feature (29)..(29): n is a, c, g, or t
  misc_feature (31)..(31): n is a, c, g, or t
  misc_feature (253)..(253): n is a, c, g, or t
  misc_feature (312)..(312): n is a, c, g, or t
  misc_feature (316)..(316): n is a, c, g, or t
  misc_feature (319)..(320): n is a, c, g, or t
  misc_feature (327)..(327): n is a, c, g, or t
caggaaacagctatacgattgtgacccanangtccttctatccaaaataatccccatcaatttctgtcctatagaattccacactaaatgtaaataaaacccaaggctttaacaatggatactttaatgccattggaaaacagtgtgctttaggaatgtgagaatttgagacagacccaaaggtggggcaacaaaaagaccccatgaggcatggatgctagggaaatggtgagagcactgaaaacaaactttnaggactttactttttaatccagaattaagcctacctgtgtcctctcaaaaacctgtatntatnttnntctttanggatccattataata

SEQ ID NO: 590747 - DNA, 346 bp, Homo sapiens
ggatccggttgcagtgagccgagattgcaccactgccctccagcctgggcaacagagcgagactgtgtctcaaaaaacaaaaacaccactaatagctataagaaaaaataattgactgggcacagtggctcacacctgtaatccccgaactttgggaggccgaggtgggtggatcacaaggtcaagagttcaagaccagcctggccaacatagtgaaaccctgttctctactaaaaatacaaaaattagccaggcatgggtgtcgtgcgcctgtagtctcagatactaggaaggctgaggcaggagaatcgctttgaacccgggaagcagcagttgtggtgaactg

SEQ ID NO: 590748 - DNA, 169 bp, Homo sapiens
gtaccgcacagcgacggcaagtcaatgcatgcatgacgtgctctccccttgttgtcggcggccgcctggtcactgccacggctcgtgaaaattagtctaggaatcaactatttatgtgtcaaatttatgggtattattcattgcataaaccagactaataacaagggcg

SEQ ID NO: 590749 - DNA, 410 bp, Homo sapiens
gtcgaccagggctgggcgcaatggctcacacctgtaatcccaacactttgggaggtcaaggtgggcagatcacttgaggtcaggagttcgagactagcctggccaacatggtgaaaccccatctctactaaaaatacaaaaattagcccagcgtggtggtgtttgcctgtaattccagctactcaggtggctgaggcaggagaatctcttgaaggtaggaggcacaggttgcagtgagccaagattgcgctgcagcactctagcctgggcaacagagcaagactgtgtctcaaaaaataagaaaaaaatttactgaagaccccaaagagcttttgttacgtgtattaaatctatcaatatttactgtattataaattataacaagcagtttaccgttaagaactgctgta

SEQ ID NO: 590750 - DNA, 111 bp, Homo sapiens
ccctaatattgctgtgagtggtgactggtaaatactcctcacagcagcgggaatgatcaagacctattaatcctgggtgtgggtggctctcgcgagaaacaatcagagaca

SEQ ID NO: 590751 - DNA, 735 bp, Homo sapiens
gacgccgtgtgcagcgggggggcccggaggccctgtgtggccctgtggatgtgggaaccgcgtgtggcttccgcgtgaggtttcggcagtggcattcggggcctggtggtcgcggtccgtggactggggccggggccgaggccgcgtgagctcgcggtagtgcaacggccgacgtgataaggagtggattgcccgtcaccaagttgggccgctttggtcaaggacatgaagatcaagtccctggaggagatctatctcttctccctgccctattagaggaatcagcagatcatatgatttctctcctgggcgagcctctctcagggatgaggtttttgatacggattatgcccagctgcagaaagcagaaccctgttgccggccagtgcaccagcgtttcaacggtcatttgttgctatcggtggtactacaatggccacgatcgtgtctgggtcgttaagtcgctccaaggtacgtgtcggccaccgccatcgcgtggggccagtcatccttggccaatgctctccatcgtccccgttgcgcagaggctactgggcgcggaacaagatccggcaagccccacactgtcccttgcaattgtgacaggcctgcgtgcggctcttgtgcttgttacgcctcatccctgcggcccagggtgcactggcatctgtctcctgcacctgtgcctatgaagctgctcatgatggctggtatccgatgactgctacactcagc

SEQ ID NO: 590752 - DNA, 129 bp, Homo sapiens
gaggatccgtgacagcacagaggaggtggacagcacagagaggaacagaaaggataaggatgctaaattccgtctgcattctaatagagagccgagattcaccgatttggctcgcatattataaagacc

SEQ ID NO: 590753 - DNA, 305 bp, Homo sapiens
tccactagtgtaggctgataacgaggacggtagtgcgagaccagactgaccactatggtgaatgccggcacatgctgaacacacaaacctgagctggtcacggaggagcatgcctgtaatgacatctactcatgaggctgagactgatgtaatgctagagccccatagtcagagatagcagggagccatgatagcgcgactgcactgcagcctggatgacagagctagagtccatctcatgtgattgcccgcttggtctttccgttctgaaaacggaaactacattttgacagctacttggccca

SEQ ID NO: 590754 - DNA, 462 bp, Homo sapiens
  misc_feature (84)..(84): n is a, c, g, or t
  misc_feature (210)..(210): n is a, c, g, or t
  misc_feature (243)..(243): n is a, c, g, or t
  misc_feature (253)..(254): n is a, c, g, or t
  misc_feature (267)..(267): n is a, c, g, or t
  misc_feature (287)..(288): n is a, c, g, or t
  misc_feature (299)..(300): n is a, c, g, or t
  misc_feature (424)..(424): n is a, c, g, or t
gcaaacgcagaaggactgcctcactgagcaaccaagagtgtcagttgtacccgagcgcgttctcagacgagcagcaagtacctncgtggtggactttccacggctgaactgaggcaggcattcttagctgagacaccaagaggtggttaaagccatattggagtagcgaggaatctgattccaagcaaaaaccaggctccatctactctnttgaagcttctgcccagctgtgcattgtgttcntcaggagaanncccgcgtcatacnctttgatctatagcgcttcnnccctaggtctnntcagaagcatcaagttttaacttgtggacattggattcggtggaacagcaatcatgactgttggcaagagtagcacagatcgctgcatgcacaatttgaactatcagacatgagcatgtatccntgcaagatggcccgaatcttcatcggcacctttaagcg

SEQ ID NO: 590755 - DNA, 351 bp, Homo sapiens
tagtttttaacagcatattttttacaaaggaaaaaaaaaagccagatgtggtggctcatacctgtaatcccagcacttttggggaccgaggcaggtagattgcttgagtcctggagtttgagaccagcctgggcaacatgataaaactctgtctctaccaaaaatacaaaaaattagcgaggcatggtggtgcacacctgtattcccagctattcgggaggctgagctagtgaggattaaccgagcctgtgaggttgaagctgcagtgagctgtgattgtgccgctgaattccagcctgggtgacaaagtgagatcctgtctcaaaacaaaaacaaaaacaaaaacaagaa

SEQ ID NO: 590756 - DNA, 688 bp, Homo sapiens
  misc_feature (1)..(1): n is a, c, g, or t
ngtaattttcatccttaaacacccaagaaggttcttgtggtccaggttggttttagggcggtgtcagcatctttgggtgtccttgaacccaagttccgttaagaaaatggccttcaggcacccaggtgctcaagttgcccttcaagggcgtaactttctccagggacctcttaaagccgaagcctcatattagcctgtctaagctgtataagatctctctcctaaaggttctcaaaaaggggctgcataaattgaattagatgatgatggtggaccacacgtgccgcaatagcattcaggacggtttcaggtccaattaataacaaaaaggcatggctctcgcccttctggtcaactttgtaaactcctttctcccaggtattgttgcaaaagtcccagatgtcctttatgtaacagatgcattccataaggcctctcttcaggtacatgaggaacgcagtacagcaggttcaagatgcgtggttgtgaaagatgggcgttcgataaacttaagcagggtaacattcttgaaccaacaggcctcttttggttttaaaaagacaagttcctctgtacacaatagtcctcatgggcatagtattcaacccctgtgttaagtttaatgttctaaagcgttgccggcttccaatttttggtgtgtgctcagaagtaaaaataaatacaaact

SEQ ID NO: 590757 - DNA, 393 bp, Homo sapiens
cccgggctgcaggaattggcaccaagagatagagaattacagaacctgcgatccattctggaaatactactactatggatatgactacattgacttcaacacagaaatcccaccctgtgtcccatgtgaatcaactgcccagataaccaagcagatgtgataggcagaaccagtctacgtgcattgctcctaggcttacctggaggacgattgccctgcgactctgcagaagtacctgatatacagcataaatattctgcaccggcaggatcctacctctgtgatggtcatcagtcaccaagcccacgcaggaagaaactggcgccttgcctactactactacctagtgggagatgttctctacactggtggcacttaccagccctgggtggg

SEQ ID NO: 590758 - DNA, 177 bp, Homo sapiens
gcggctccaggggcgggggtcccagaattttttctacagtggtttcaggcggctcgccccggttactttcatggcgatcgcgccggagatcgcgcggatgaagcgcacgtaggcttttcggctcggaacgtcgaagttcatgtggatgtggttgtagttcaccgcgtagcggatgag

SEQ ID NO: 590759 - DNA, 544 bp, Homo sapiens
  misc_feature (459)..(459): n is a, c, g, or t
ctctgggtgattttttcatttaattaagttttaaaatcacagtaaatgtcattatctctatcaagattgagattaataaacgtattcagagtgttaattatttaagcacttacaaaaggaaaattgcaaaactgcaatgggtaatgaatctaatagtaagtctaaatagagaattatttaatttacttcctgtaattgatgaaacaaatatagagaatgttttttaaccagtacatgtattattacacccccattttggagtacacactctagggcctttcttctaaatattacaattaaccatttttcttccctatgctcaggccctttaactcctcagtgaattaatttaaatgggtaattatcttcaactatccaatgacgttgttcttttcctgtctgcctgtcctcatcccaaatttaacaagtgcttattttagtttagatcacgagtgtttngcagtatttttgactccgttcttaatgccataatttttttcccaatctttttaaacttacgaagcagtttcatataaatgatctt

SEQ ID NO: 590760 - DNA, 516 bp, Homo sapiens
  misc_feature (459)..(459): n is a, c, g, or t
ctctgggtgattttttcatttaattaagttttaaaatcacagtaaatgtcattatctctatcaagattgagattaataaacgtattcagagtgttaattatttaagcacttacaaaaggaaaattgcaaaactgcaatgggtaatgaatctaatagtaagtctaaatagagaattatttaatttacttcctgtaattgatgaaacaaatatagagaatgttttttaaccagtacatgtattattacacccccattttggagtacacactctagggcctttcttctaaatattacaattaaccatttttcttccctatgctcaggccctttaactcctcagtgaattaatttaaatgggtaattatcttcaactatccaatgacgttgttcttttcctgtctgcctgtcctcatcccaaatttaacaagtgcttattttagtttagatcacgagtgtttngcagtgagccaatatctcgccattgcactccagcctggatgacagagcgagactcag

SEQ ID NO: 590761 - DNA, 373 bp, Homo sapiens
  misc_feature (13)..(13): n is a, c, g, or t
  misc_feature (16)..(16): n is a, c, g, or t
  misc_feature (71)..(71): n is a, c, g, or t
  misc_feature (139)..(139): n is a, c, g, or t
  misc_feature (195)..(195): n is a, c, g, or t
  misc_feature (261)..(261): n is a, c, g, or t
  misc_feature (327)..(327): n is a, c, g, or t
  misc_feature (337)..(337): n is a, c, g, or t
  misc_feature (343)..(343): n is a, c, g, or t
ggcgcaggtggtnacncctgtaatcccaacaacactttggaggccccaggcaggcgggtcatgaggtcagnagattgagaccatcctggctaacacggtgaaaccctgtctctactaaaaatacaaaaaattagctggncgtgatggtgggcgcctgtagtcccagctactcgggaggctgaggcaggagaatgncgtgaacctgggaagcggagctcgcagtgagccgagatcacgccactgcactccagcctgggcaanagtgagactctgcataaagagcatacccatgtgtgtacctatctatctatctatctatctatctanctatctatcnatctgnatatagatatattaaaatgtaaatggtggc

SEQ ID NO: 590762 - DNA, 155 bp, Homo sapiens
agcgctcggatccccatctctttcttctttttcttcttcttctgcttggggttggtgacgcgacgacacgctagactcccgaacaacggcgtaaggtttgggaggctcacggagctggtgtttagcttctcgggcacgacgctgaggatcaaaag

SEQ ID NO: 590763 - DNA, 227 bp, Homo sapiens
cacgacatcagatagctattaaacaccagcatcttctaaaattaggcagcgttatcatagccgccaaggctcatatagatgacttatgacccctttatccaccgcatataaaatgccttgcggcaatcgtgtagatcgctcgcaccccagccgccattaaagcacgtcaatcggcaaacattttgacgttagggttgattccgtgcgccccgcagggcacccactcg

SEQ ID NO: 590764 - DNA, 362 bp, Homo sapiens
  misc_feature (155)..(155): n is a, c, g, or t
  misc_feature (192)..(192): n is a, c, g, or t
  misc_feature (201)..(201): n is a, c, g, or t
tcctccccacggtgagacatcactacagccacactccatctgcccacagtgagacatcactgcagccacactccatctgcacacggtgacacatcactgcagccacactccatctgcacacggtgagacatcactgcagccacactccatctgcncacagtgagacaccactgcagccacactccatctgcncacagtganacatcactgcagccacactccatctgcacacggtgacacatcactgcagggtagaaactcccccatctcccatgcagcccccagcggccgccatcacaggtctcactgtctcgccgtgtgtgtgtaacctgctttctccccagctcccacttcgtgggcag

SEQ ID NO: 590765 - DNA, 332 bp, Homo sapiens
  misc_feature (56)..(57): n is a, c, g, or t
tgccctgctctgttccccccaggtggagtgcagtggcacgatctcggctcactgcnnaccccccccctcggttcaagcgattctcctgcctcagcctctggagtagctgggattacaggtgcccaccacctcgcccagctaatttttgtatttttagtggagatgggattttgttggccagggtggtcttgaactcctgacctcagatgatccacctgcctcggcctcccaaagtgctgggattacaggcatgagctaccacaccaggctttctttgttttcttctagaaggtttagaatttacctttcttcttttttttccctccctccct

SEQ ID NO: 590766 - DNA, 264 bp, Homo sapiens
  misc_feature (179)..(179): n is a, c, g, or t
acaccaggcatcgcatccatcaggcaaggtcagcagagcagcaacagtttggtattgcaacgtggcagcacctgcaggtcagcatccatgcaatgcaccacagtcccagcccacacatgcaaggcaggggccaccatctgcacttccagcgcacatgtggccatcattcacagggcaanacattcaatcctccagtcaacacacattgtagtcgttttcatcacaagcgcattctcaacatgaggcccaatggcacagcacaac

SEQ ID NO: 590767 - DNA, 457 bp, Homo sapiens
  misc_feature (450)..(450): n is a, c, g, or t
atcctatgtttgaaccatgcccaaatgtggtcttgctgcggatgcattctgctgtaatctgtgggtcacatgttcactcctgggagtatggaccggttgcgaattttatggacgacatctggatagtacctcagtcctgcctagcgttatgtcatcgcgcctgatgctacgcgagacactgctgaattctgctggatggaacgatacctgtgaccgttgcatataatttgtggcactatctgagatgaccatgaacctctgccggtgctataagcgcaatgcaggcttttatcacaagcatgctgtcagtgtgacctttaaggtatgccccctgactaacccactatctgtgaagatccatgccagtagactatgggagataacctgttacacagagtgcttacgatgtgagctgagacaatgcgcttgcgcactatgctctaggacaangtatgtg

SEQ ID NO: 590768 - DNA, 1871 bp, Homo sapiens
  misc_feature (402)..(402): n is a, c, g, or t
gtacacgagtctctccaatctgcaaacttggtctattagcttgaccgagctctggccataagacgagcttccgacagtgagtcattctgatgaatgattgacgtacctgaatttctgttgtcatgcttggcagtggcggcgaatcgttgcgaaagactcttcatgtggacaagtggcgcacctatgtagtcctgggtttcatgcatctgtactgtaagcgtggatagcataatggtgtttacggagtatcttgcgtctctgtccctgtctatgcctgtgtgatgtaccaagcatgcaatgaaaatttattacaaatggctcaacaagtcgctgcacggtagtcgacacggtttctgtgcgaggagcctatcttgtgagttggcccgaagcaagtaggatgcnaagcgacgcccttgtgtcgtagcatacgcgccgctgtctactctatcggtaaagtgagtacttcggctcatggcgcttgtgctactgcgagggacactctgaggcctgtgaagactggttgtcttccacgatgagtcttttgcgttacaacccaacgacccaggttcgcttctcgttggagaagtccttttacactcctcagcggtgtctagcttcctatgttatcatccactggttccatgccaaagcccaactactaaggcacgcattttttcctactccaataacgctctatccccttctcctacgtctctagatctaagtacatttccctccgtggcggtttgatagatagcactatcacgatcaacgccaaataatatgtccttgttcacccaccgagggcaaagagccaacagtcttatgggaatctatacggaacatggcgcacttttatagccacggtaaactttgccctaataattgcttagaattgcaaaagcccaacggaccgcaagtgggccacctttccctgggcacttctgagccgctttgaccttccggaacaagtcgctttgacagacacctccctcgtgcattgagccgaaatttagagctcgccccttcaacatctttcaagccctttgaagcaactatcttttaaccaacgccaaggcgcgggccgcgccttaaccttaacgccccacggtcaatgaccactctcttggtgccactccagcgtgcgtcccgcgcatcgggcgtgccccctctgcgcgcggacttccacctctggttggacacgcccgctcactcacccgacacggcgggtatccccctccgcgccctccgcattcagcacgcgcgccacctctgcgtctacgggcggtctcctcccgggcagacgcgtctcgccgtacaacgtcgcgcagctcgccctgtatccccgcgagccctcttcaacaattctccgctctcaccacgcgtccctgttagagggtccctcacctctttcttcttctcggcgccgccgcctctctgtgatgccactcattctcctccctcgcaggaggagtgccccacacaaggaaaatcacgctcaaggcacgcgttccgccaaacgataccacacgtgccggcgacaccaatcacgggggaacgtccaccaagaattgctcaaccctcggccgacgtgtttcaatcacggtgggacaatgaaagaacaacaaattgccgcccacaagcgatcgtctgcctgtcacacacccatcacgcgccgcagagcaataacacgaacgagcgagcaccagcacgaatgatctcgcccacacgcacacgacgacttctcagcacagcacagaaccaagccgaacttcgcgcagccgtcaaccaaccacgcacgggcggactaaccaccactcgcacacctctaacatccagtacgaacatccgaggcacacacgaaccactca

SEQ ID NO: 590769 - DNA, 569 bp, Homo sapiens
tcggtctacctgtttgtaaaatattatttctctttcccttatgaagcttaattaggctggatacgaaattctaggtcgaaaattcttttctttaagaatgtagaatattggccccactctcttctggcttgtagagtttctgcagagagatctgctgttagtctgataggcttggctttgtgggtaacccaacctttccctctggctgcccttaacattttttcctttatttcaacttgggtgaatctgacgattatgtgtctttgggttgctcttcttgaggagcatcgctgtggtgttctctgtatttcctgaatttgagtgttggcctgtcttgctaggttggggaagttctcctggataatatcccgaagagtgttttccagctcctttccattctcccagtcactttcaggtacaccaatcaaacgtagatttggtcttttcatatagtctcatgtttcttagaggctttgttcattctcctttttcattcttttttctctaatctggtcttgacacttcatttcattaagtcaagacaaggtagagccgaggggtaccgagct

SEQ ID NO: 590770 - DNA, 201 bp, Homo sapiens
ctgactactggggaaggccaagctggacaggaggacagggctgctcaccggaagccatctacggagtggacagacgctgattactgatttatgaagaaccgcacgtcgctgattggccagcggtcggagcggcagggtttcacaaacttcttcacgaggtgcacaaacaggtgtctgacatctttattgggggggagcgcc

SEQ ID NO: 590771 - DNA, 1254 bp, Homo sapiens
gagctgggttattaggcgtggcgcgagggtgctgagtttcttgtcgcgcccgcgtcgtcccaggctcctctgtgactaccatgtattcgtcgccccatcgttgggcttctctttcgtccgctcaggcctcgctttgtctccgctcatatcaccccggtcacgcattaggagtctggccccaagtctgttcgtggagcggcccaggtgtagccggtacactgcggtgcaagtagtcctgtgtgagcactctaccatacgaccagtatgggagcgtgcagcatcgatctcagtgcatattgatcctctgatcggaacgaaactaaatactgtgggcctatggactgacttgccacgataactaacctcagatataaaacactcgaagaagcccagctacttctagcatcatccgatactcggtgtgacgtgttggacatgtcacgggcatggcggttacctctttggagagactgggaactctgctccaatagattcaacctccaatggtacgaagatgacccagccattctgcaaactaacatgaacacactttaacctctattgaaatttttaactcaatttatttgtatccatgaaggatcagagaggatcatctggctctcatgtatcagacccatgcgtcgtggatgctgcaatgttgtgcagacgtaggtctccggagctcagcgtgctaaaacttcctgctcatcaccggcgagttcatcggccaaattcgtgctgcacatcaactccatctcgacagatagccttggagcacttatcaaacgtcgccacgtcgacccaacgccccggctctaaatgttgcaagtacgtgaacattttacactagcgtcaattaagctactcactagcgattatggtggaggacatattagagtggatggaatgccctagacagcaataaccaattcaccatgtcacctcatgcgtttcagaccatacccttcaagatccatcaagtctcttcagtagcgcaattcccaatggacccgcacaattgtttacattaaatatcccctcacaagaaagaaatgccaagaaatccctacgcagggaaccttcggagaaagcaaattaccaccgccaatggaccatttgtaccaatcgacgccaaagttacagcacgatgacaccgttaacgagagacacactatgggaccggaacaacgtttataggatacccaaggcttgatcccaaaggcttacagaggaatttgaccgagggtggatagc

SEQ ID NO: 590772 - DNA, 151 bp, Homo sapiens
tgtcaccttgtcacaggaatattttgagcatggagatactaattgaagttgcggaaatgttaagagatttaaatcttggtgaaatgaaaagtggagctaccagtgttggtcacgtatccttatgcattggtagggcgaaggctagatcata

SEQ ID NO: 590773 - DNA, 694 bp, Homo sapiens
  misc_feature (78)..(78): n is a, c, g, or t
tagcttttaggcctgtgtatttctgtttgtgggttgtgcccccccgcacacgtgctgctttccaaggaagttcccttnaaaaaaaaaaaaaaaaaaaaagcacataggcacatacctagtgctgtttctttcctcttcagcttgtttgtggttgctctgtagtgtcttaatagactttgtccagagtttatagttgttatctgctggagagttggggttttaacctgaggctttttgccactactggtggaaatctacactgctcgcccttttaagtctttttttatcctctaagtttcctctccagtcactcattcttattctctgccctcctgctaaccaagtcatttattccaccttctggattttgctaatgccatccacgtagtgtcaacgttcctctgttctcccagttacctataaaccggtggttggctgtagtagtttcttaagattcaggcttaatttcaggaatgggaaagatccactatttcataggttgtgtggtgtttttttaatcgaaaaccactttaaaagttttaatttttggtcatgttagcagctaatgctcagtgcctacatccactaattagcagttgtaaaatggtgatagtctaactcagtagttttccaagtacagtttgggacttgtaagggatccttgagaccttttcagaggttctttaaagttaaa

SEQ ID NO: 590774 - DNA, 164 bp, Homo sapiens
  misc_feature (144)..(144): n is a, c, g, or t
ttgttctctatgaattagccgcagtactttgacatctgatgcccggacacgagcataatcaaactgttacaggcttcaggctgactgtgctgtactgatgtgctgctggtgatgtgaattgagctgtctcagaatggcgacccngggctgcctactggctacac

SEQ ID NO: 590775 - DNA, 513 bp, Homo sapiens
ccccacagtattcatttcttggtctacgcctgtgactccagctacaggaaagttttccaccaaagtcacgctttgtacagatgctggagcgaacaccgacccccgccccatcaggtatgttggcatttatctgagaagttcgctgttgtcttagtgcgctgtctaatccaggtttctcagccttggtaccgttgacattttgggctggatgattttgtgttgtaggggttgtcctgtgcactgtgtaggatgtttagcaagcgtccctggccttaactggttagacaccagtagcacttccaccagttatgacaaaccaaagtatctccacatgttgcccatggcccctggggggacaaatcagcccaagttgagggctcttggcctaactgaataattcttgctggagttatcggggtgtggggatcgggtagtgtagaagagtggtaaaggcctgaacaccgtctgggactgaatctcagccgtgctatttactacttgggtaatgttgga

SEQ ID NO: 590776 - DNA, 275 bp, Homo sapiens
aggtatcccccccctccccgggtaatgttaacattgacattatcttctttattattctactttgagtgctgtctccatgtttgatgtatctgagataggttgacctccacaggtagactctagagtatggctggcgacttagagatggggagcagcagcaatctcttatccgacatccacctcttgagtcagatttgaactctctcagtctcttgcactcaaagcttgttacgatagttaagcgtgcattatttaacttccaatttccatatccc

SEQ ID NO: 590777 - DNA, 281 bp, Homo sapiens
tgcctaagccacccaagtagctggaattacagtgtgtgccaccctgctcagctaatttttgtatctttagttagagttggggtttctccatgttggccaggctggtatcaaactcctggactcaagcaatctgcccaccttggcctccccagagtgccaggattacaggcatgacccatcttgcctggtcagtttttttttttttaaatccagttaatgctgggtgccatgactcacacctgtaatgccagtgctttggaaggctgaggcgggaggatcac

SEQ ID NO: 590778 - DNA, 514 bp, Homo sapiens
aaaccaattttttgaggccttgcggtatccgcccccaataaaagcaattccaacctttaaaaaaaaaaggggaaaaaaaaagaaaaaaaaaaaaaaaaaaaaaaaaaaaaaaaaaaaaaaattacggaaaaaaaaaaaaaaaaaaaaaaaaaaaaaccatgtgggccgcctgggcccaatcgattttaaactcaacaaagttaatgcatggggccgaatttcgagccaactgggcaaattccccctatagggagtggtttaaaaattaacgggccgtggtttaaaaacgccgggacgggaaaaacccgtggtttcccaaattaaatcccctttgaaaaaatccccttttcgccacctgggtaaaaacaaaaaaggcccgaacctaatcgcccttccaaaaaattggcaaaccctgaatgggaaatggaaaatggaaccgtaaaaattttgtaaaaattccggtaaaattttggtaaaacaaactaatttttaaacaatgggccgtcggtccttt

SEQ ID NO: 590779 - DNA, 285 bp, Homo sapiens
gagagcgcgaagtagagaacaataatgaacaattattgtatgaacactagttagagacagctaatcacaaacaacctgcgggcacaatgacctcattccacacgtagacacccttcaacaggaccctataaaactttcctccagcccttgcctctttgcaggtagccccttctctgctgagctgcccactgcaacatatttacacaatttctctaataaatctgcccttctttacctacaactatcttggtaaatggctttaccacctgcaaaactgaccctagg

SEQ ID NO: 590780 - DNA, 259 bp, Homo sapiens
caatagagtcggtggaggagggagacaaacaccacctgacactactgcagaagtaggaggacaaactagaaccggcacctgagctagaacctgatgccaaatgagaatatccccgagtcggcggctgagctggtgcagctgggcttcattagtttttgcagaccagagccggtcgacttctctgctagaagagaccttgaacaagtacaattttgccaggatcagtaccctcaactcagccgctgccggcgctgcagac

SEQ ID NO: 590781 - DNA, 746 bp, Homo sapiens
gatttttagttatgtaactgatatttgttagatttctgatcttcattttactcatccaagtacggaatcaatattgaaaggctcttctgccattctgtatatctcagattgagttctgttcaatactagtctgtaaaaggatttagtagatattttggggaaggtgtccttgattaaatagatttgggaaactataacaataatcctctttggaaatatcacagtgcatattatattttaaatgccccagtgattcctgtagttgagaagtttgtttaaatgtgtttaacctagcattttctttctctgtgggacatctgttaatatctcaagagacattaggattctgaggaacataatatgggaagctctacattagattaaggtgatttaagaatgtcactacttgtttatatttgtgtccttgggatgttgagagggagtgagaatactaaaatatgtgttataatttcctgttgttttacatattttttattaatcctgaaaaattaatatcagctgaagaattacttgtagtaatctttaaataatttggctcttaatgacttattagatagttagaaccttctatgttcactgactagatcaaagtaactttgatatgcttattgacaaccatgggagatgttttaataaggagatagtctaagtaattcttagtatacatagaattgaaaatattactttggtaggaatatgaaagataataataacttaaagaaaaa

SEQ ID NO: 590782 - DNA, 208 bp, Homo sapiens
attgccctagggtgtccaagaggccaccatatagagctcaccttttatggacaggtgggagatgtctgaacgcaaccacatgttgcccggtgacaggggctgtgctgaccaggacacggagagtgacttgccttctgaggctgagctagtcactcatacgcccaggtaggcatgcctacctgggcgtatggcagccaaggttaggcgg

SEQ ID NO: 590783 - DNA, 1304 bp, Homo sapiens
gatgtgtgtgtgtgttgggttgtgatgtggtgtgatcgtcgtgtgtggttatatgttcgtggcttgttgtcgtttcatcgtggtcgtctgtggttgatgagttgggtgggtgattgtgcggagtcctggtgggttgagcttgtgtgttgtgtggattcctcgtactgtgttgtctgttgtgggtgctctttatatctcaactgtgatgagtgtgattccgactgtcgtcctatctcactgtctgtcttgtcctctggtggttctctctgtgtgtgtctggtgtgcgggcgtgtgtcttcggtgttgatcagatgttgttcctgttgtgagctcagcgctgtgtggtgtgtgtgagccgttctggaatatgcagtccgttgttctcgtgttcttctgtcggtgggttgtcggtggtgcggccctggggcctgtggttgtatgccgcgtgcctgtggtgatgggtgatctcttgtgtttttatgtgtatggtgaagttgactgctgctagcctctgggatgaggtgatatggctcacttcgttagcggtaggcgtagatcccccagggaaggtggagctgttacaatggtatataagttcaatctgtaatgttgcgactgagtttgatgtgttaagagtaatcattgtggttacttgttgtgtttgtaaattgctgttggtttgtggtttgatgcagatgactgtggaatggaagcaccttttgcgtgttctcactaacctacacagctctgtgcagaggcgttcaggtgttactcagctgcatagttacgcagatgtaatgcacattacttggcgtatctttaagttggattcaaatggccatttttctccaattttggtaaattggatatgctttttgttgtacaaatacgaccattaacctcagttaaatttttgtgtgttttcctgttgtgatgctgtctatttgcattgagtgtaagtcatttgaactgaatggtataactcctaaagctttctctgctccagtgtgatttttattaaatatttttcacttggcttatttttacacaactgggaacataaagtgcctgtattgtgtcaaaagctgtcactcttgtttcttagtggttcagagaagcttcatcttatgtctcataatgacgttctatctctatgttcatacaggaaagacaaagtgtacgtgaatgctcgctgtctgatagggttccagctccatatatatagaaagatcgggggtgggatgggatggagtgagccccatccagttagttggactagtttaaattcatgcttttccggttta

SEQ ID NO: 590784 - DNA, 887 bp, Homo sapiens
  misc_feature (8)..(9): n is a, c, g, or t
  misc_feature (16)..(16): n is a, c, g, or t
  misc_feature (22)..(22): n is a, c, g, or t
cattgaanntcccttngctagngacgcgcgccattgtgttggtatccgggacttcggccattatggccgggggcatctcgaatcgccgagcgacttaggagtgggagctgacatctgacccgagtacccattagtctgccttgtgccttggtgcttcaagctaaatcgaaatgcctaacggttggcctgaaaggtactacggactgcccaaggcccaggccaattgccgttcgccgatcgccgagtgccagttcccagttccccgtgttcatcgtcacctgacacctaggacgtccaacgaccaaccatggacctctactcccgactgccactgcgcacacatcatgcattccgtaacccctgacctactaggtccttcaactgacgcgtcatgcgtcttaaggcttaagggtataaccgattaccacttgcaacttgctactcgctatgatgaagaatggagaactgtaatcaaggatacaggctccaatggctgtgggaggccacacatcccacattctctgatcgctaataggggacacggacaactgactactggctgcctggagcccgggatacctgatgactcaagactctaaatcatctgacaactgtccatgagtgcacgattccatgtgacttggataaatacacaaatcctcatttttggctattttgaaatgatcatggatgcaagtttgaaagtctatttcgccctttccaccttcccaaatttcgggttttaagccttaaccagttttaacggggaccttaaaggttcctataagctcttgaattgtggagttttgggttttgttaacggttttccgaaaaccagcttttttaaatttaatccgctccataagtccaaggctgctttgtggctt

SEQ ID NO: 590785 - DNA, 101 bp, Homo sapiens
tctccttccagagctagaaacatcagggtgtcccaacccagtaggtgtaacgtcaccttgactgcaattcttccccagtcacacgcaacatttagacatcg

SEQ ID NO: 590786 - DNA, 122 bp, Homo sapiens
taaaagttctctttgtgacccttcatttctgaaagtctaaaaatacaatttgagaatgtctataatacattctctcctgtctcttcacggttacgtctgttattgctgaaatacaccacatt

SEQ ID NO: 590787 - DNA, 146 bp, Homo sapiens
ttagccacctcccacagtgagaaaaacaaaacaaaccaaagggtcttaattaaacaggatgaacatgaacaataaatacttaaatagacatcacgacatcctacagttctcgacaccagataaacataacagtattaataataaag

SEQ ID NO: 590788 - DNA, 170 bp, Homo sapiens
  misc_feature (108)..(108): n is a, c, g, or t
  misc_feature (113)..(113): n is a, c, g, or t
  misc_feature (140)..(140): n is a, c, g, or t
  misc_feature (160)..(160): n is a, c, g, or t
gtgaagcgcagctagctgcgaaaaattaatgtgaattgcaggacacaaagatgggaacaaaagacctggggcctccttgaattgtaaagggcaggaagaaaggacaanagcanaaaaagtaactattggggtgctaggcnaggtatccgggtgacaaaanaactgtacac

SEQ ID NO: 590789 - DNA, 508 bp, Homo sapiens
tctcccgaatcccggacatggcatcctgtaacaggctgcggaacacccaactaacgcggtttgctgaagactctactcaacccgcgaccctgtcctatcagaacgagagtcttgttccctgccctgaagctggcagttcagtcccttattctgccctgttggaagccctgctgaaccctcaactattgactgctgcagacagcttatcttcctaccctgaaatgctgtgagcttgacttgactcccaaccctaccatgctccatcatactcaggtctccctactcctgccttagattcctcaataagatgctgtaactagcattttttgaatgcctctccctccgcatctcatctttctcttttcaatcaggcttttccaaagggttgtatacagactctgtgcactatttcacttgatattcattccccaattcactgcaaggagacctctactgtcaccgtttactctttcctaccctgacatccagaaacaatggcctccagtgc

SEQ ID NO: 590790 - DNA, 326 bp, Homo sapiens
  misc_feature (72)..(72): n is a, c, g, or t
  misc_feature (128)..(128): n is a, c, g, or t
  misc_feature (144)..(145): n is a, c, g, or t
  misc_feature (149)..(149): n is a, c, g, or t
  misc_feature (151)..(153): n is a, c, g, or t
  misc_feature (156)..(156): n is a, c, g, or t
  misc_feature (160)..(162): n is a, c, g, or t
  misc_feature (184)..(184): n is a, c, g, or t
  misc_feature (189)..(189): n is a, c, g, or t
  misc_feature (193)..(193): n is a, c, g, or t
  misc_feature (200)..(200): n is a, c, g, or t
  misc_feature (212)..(212): n is a, c, g, or t
  misc_feature (218)..(218): n is a, c, g, or t
  misc_feature (265)..(265): n is a, c, g, or t
  misc_feature (297)..(297): n is a, c, g, or t
  misc_feature (302)..(302): n is a, c, g, or t
tggaaggcgggaccccctctggtggcgggaccccctcttgcggtggtcttgcggggccagccgggacctgtnactttattatttaaggagtgtgtgtgtagagtcgctggcttattaacagtattgtntgtgggttgggttttnntttntnnnttntttnnnaagtcccttcatttcaatcctngactntttntcccctncccttgcccagntctgtngaatgctgctgtgcgcgtgtgagggccgctctgaacacagggccctngggttgtgtgaactgaaattctccctgtattngtganactcgcaggagtccccatctgtag

SEQ ID NO: 590791 - DNA, 739 bp, Homo sapiens
gggttccccctcccccttttatgagtgtgtgtccccgcttttgtgaggtgtggcgggtttctccacaccccgcatgtgtcacactgtcccctgtctcgtgtttcacttgtctgggaatacaaccacacacgccgtgggagccccccctgggtcccccccgtcggaccactctttcggtgctttcgtgggaagggagaggggcacaccataggggggaatggcctagttgggaggccacgagagaagaaaaagagagtggcgctgtgagtatcacttgtgagagagaattggcacaccttgggccacaatgccactggacgtttctctcgtctctcccacagagcgcgcacagagacttgccttggtctgtcacaggtgtttatactttagctctaaaggcgttcttctcttgtgtgattaactcgtgtgtaataatgataatagataaaaaagtgtgtcgtgattaacacacggctctgaagagccacctcttggagtaggtagaaaagctctgtgtcacttaggtgaggttgtttgtctgtcacacacctgtggcacccagttcactttgagttgatggaaatatttcacgtgaccccacatggaatgccctatcgcgtttttttcaaccactctttatgctattactcatatctgatttatagaaatgaatttctccttttggccaagcgtaccccattccatatgggtataattaaagactttatgtccaactgta

SEQ ID NO: 590792 - DNA, 970 bp, Homo sapiens
ggtccggctcgtgggcaccgtcctagggggttgttgcgcgggtcgacagtgcccccatgaacgggcggcagcccagtctgggggagctctcggcgctctgaacggtcgggccagtgccggcgagaccggtgtgatctgtgctccccctagcggcctatatcgagatcgcgccggtgtacagctatcaactggcaagatctggtgtaggctggacagagagctgcctactagagtgactaacaggagggcttcaaccttgcgagtgatgatcacgccgctggacgagtgtatccagaaggagcatgccgcgcagcgcacgctggcgtggcgctgccgtgcgtgcgtcgacctcaacagatgagaaaacggtgactgctcattagcgcgggaggtccaagaaatagcaagcatgggactatggcgctaggcacaatcgctggcgcgcaagtgctttcgttggccatggacgggcggacatccggcgaagtaaaatcggccatagcgatccgagccgcagcaagcgtatgcactagcaacacgggcaacgatcggctttaccaatggatggaaccgtacgtgggccgagccagtagagaaaggaccctctgacaacatgaagcgtagcaacgcgtaactgacaggcaagacggctacgaactctgatgcgcctatcgtacgcgctcgccgctaggcgaccaagtgcgtgactcactgtgtgcccactacctggtcaaagtatggcatcaaattaaagaggcctctatgcgtagagtaatgccagaagcacggtctcacggttcgaattgcgcatgaacaggatcccaaacagtacatcttggactgacgagatgagctaccagaagacaacccagtacttacatctttctcaactggacacagcctcctggtagacttggggcggccaaaaccctggcacagggaagacctgaggccagcccagaacctgaat

SEQ ID NO: 590793 - DNA, 1191 bp, Homo sapiens
gggtcggcgggatggccccgccgatgctcctagttgtgccggtttgtgtcctgctggtcccttctctgtgtgaggccctgatcccgtgccggtgcctcaggcccgcacctatgccacctcgcgggggctccggcggggcctgcgctggttcaccgtgcaaattcggcctctgttgggtggctgggggggatccccttgagttgctttggagccaggcgactgcaacggcacctcttggccttggtgagttaaccctggagaacgctggagaagttgtgccttcctttggcgacacttccccgggcggggatcataaacgctgttggccgaagcgttcgtatccaggccgtttacccttggcattagctggggacaacccttgggcttaacccaatctcgagacacatctgcgtctgcgaacggtggaaacccctggacgcactattggactatatcaatccacacgcggtaagtagggcggccaagaaagaaaatatgcaaagcttgcctctgtgggaccactttcacaaggcccaccactatatgtaacccctattagggcagggggactattccgcacctatcacgcgtatgtcgcagtaccatacatttgcggagtgcgcctgcgactgggatatggcacgaaaccacaacaatattgctggcatagcgtaatcccctcgtggtaccccgtggatgggggacaaacccatgagtaacccggcacgggcagcaccaaaggaaagtattcctgagagagtcccccacatttgagagagggggccacaggggcaacaaatttccccaaatgctggaccaggggacaattccacaaggtgaacgtgcgccctggtatatataccccacaatactgcgcctcgatagggtgtagcccgaaaagacgttgtgggccaccttggacacacccaacataggcagacgcagggggaatttcgtaggtggttgctccgcaggaccttaatgaggggaaccagagggctcactgcgaaagttacgttcgcaagttatcaacaccacaggggtttggggctcacgcgaagattgtagacacagcgtgctgttcaacgtcgtgacactgcagttcggccattattattggcgacccgatacgaggcaccattctaataccccggggagagcaccaagaagggtaagccgccgcgtcatatg

SEQ ID NO: 590794 - DNA, 531 bp, Homo sapiens
  misc_feature (468)..(468): n is a, c, g, or t
acagagcataccctgctgcacttctttctttaacgctgtcttctgctgaatgattgaaacagtcgctatctggttttctgctcctgccttgtagaagccactcagcagacagaggcctcctggtaggactctctaatggcttcccttcttactctgaataaaagctaaaggcttaaaagggagccaggaggccttccgtggcctgcctttcccaaccagtctacatcatattctacttcttcaactctggccaccctatctctgtgccactcctcaagcctgctgtgcatgctcctgccatgggacattttcacacactgttcttcctgcctagaaagcctttccctcagatgtgtgtggctatgactccacctatacccatctatagcatcgtcttgctcttccacctcttccagatttatactcaaatttcactttgccatgaagcctcttttgaccactctcttntaaattgcagaccaaaccattccacacccccttttcttaggggtatggctctgatcgggtacc

SEQ ID NO: 590795 - DNA, 865 bp, Homo sapiens
gccatctcacttctaaggaatactgagtatatcgctcacacctcatatccttcctactatgcctagaaggaataatactatcggctgttcattatagctactctcataaccctcaacaccgcactccctcttagccaatatgtgcctatgccatactagtctttgccgcctgcagaaggcaggcggggggctagccctactatgtctcgaagtctccaacacgatatggggcctagactacgtacataagcctaagacctactccgaatgctaagaaccgtaaatcgtcgccaacgaattatattactaccaactgacatgactttccaagaaagacacataattggaatcaacacaaccacccacagcctaattattagcgatcatccctctactgatttttgtaaggcaaatcaacaagcaacctatttatgctgttcgcccaaccttttccgtccgaccccgctaaggaagccccctctcctaattactaactacctgactcctacccctcacagatcatggcacagccaaccgccacttatcgcagtgaaccactatcactgaaaaaaactcctacctctctataactagtctccgctagcaaactctccttaggttataacattcacacgccacagaagctaagtcatattccatatcttcttcgaaaccacaacttatacccacctggaatatcatcacccgagaggcaacagccagaacgcctgaacgcagggacatacttctatccgtcaacctcgagagcattcacggctttcctcgccataattgaaaaccgggggccgtagaacctaccattcgggcaccatacaggccagcatatgaaagggcacaatagaga

SEQ ID NO: 590796 - DNA, 86 bp, Homo sapiens
aaaagggccggattccaaaatttaaaagaatttttttttcccttttaaaaaaatttttttttgttttttactcccgggcgtggcca

SEQ ID NO: 590797 - DNA, 644 bp, Homo sapiens
agcaacatggttgtttatttcacctgggtgcaggtgggctgagtccgaaaagagagtcagcgaagggagataggggtggggccgttttataggatttgggaaggtaatggaaaattacagtcaaagggggttgttctctggtgggcaggggcgggggtcacaaggtgctcagtgggggagcttctgagccaggagaaggaaattcccagggttaatcactcagttaagttggggcaggaacaaatcacaatggtggaatgtcgtcagttaaggcggggcagggccttttcacttcttttgtgattcttcagttacttcaggccatctgggcgtataggtgcaaatcacaggggatgcgatggcttggcttgggctcagaggcctgacattcctgccttcttcggatttgagattggtgagatgtttcttgggctgatcagtctgaggacctgaggtcgtaggtggatctttctcatggagcaaagagcaggaggacggaggattgatctcccaagggaggtcccccgatccgagtcacggcaccaaatttcatgtgcgtccgtgtgaagagaccaccaaacagggctttgtgtgagcaacatggttgtttatttcacctgggtgcaagtgggctcgtgccgaat

SEQ ID NO: 590798 - DNA, 687 bp, Homo sapiens
  misc_feature (1)..(1): n is a, c, g, or t
  misc_feature (595)..(595): n is a, c, g, or t
  misc_feature (597)..(597): n is a, c, g, or t
  misc_feature (621)..(621): n is a, c, g, or t
  misc_feature (623)..(623): n is a, c, g, or t
  misc_feature (626)..(626): n is a, c, g, or t
  misc_feature (635)..(635): n is a, c, g, or t
  misc_feature (642)..(642): n is a, c, g, or t
  misc_feature (653)..(653): n is a, c, g, or t
nattcatccccaacactaccacattgggaatcatatttcaacaggagtttcacaggaaaaaaccatatccaaactggtagcacacaaatttcagggattaggatgtggacatcttcgggggccattatgctacctaccacagtggtatgtgaaagtttggcaggagaagagattaatatttataaatttagaatttttagagcctaatggtttttcttaattattggaaaatatttattatattaataggtcaaaaaaattcacatgattatcttaatagacgccaaaaatttatttgagaccatatttgataatatcgatttttaaaaagtattcagttgtagtaaaacaaatcacaacataaaattgaccacttaaccatttctaagggtacagtttagcactgttaagtatattcacattgttttgcaacttaatattcatttttatactttttatacactagaaatcaagtattaatatattttcttgacataatagtatttatctgaaaccaacatttgcaatattaatgtaagttaatgttactcattagtgaaatactagagatgtcccactaaaggaaggaaagacntntcattttggaattctcaacatggntnagnaaataaatntaatacngaaagcacacnttttgtaactatagtatcaaatccaggatgctga

SEQ ID NO: 590799 - DNA, 901 bp, Homo sapiens
  misc_feature (179)..(179): n is a, c, g, or t
  misc_feature (181)..(181): n is a, c, g, or t
  misc_feature (222)..(222): n is a, c, g, or t
  misc_feature (241)..(241): n is a, c, g, or t
  misc_feature (245)..(245): n is a, c, g, or t
  misc_feature (252)..(252): n is a, c, g, or t
  misc_feature (254)..(254): n is a, c, g, or t
  misc_feature (308)..(308): n is a, c, g, or t
gactaggtcgcggcgacatggccaaacgtaccaagcaaagtctgggactcgtcgcgtaagatagcggagaaccctgcctagtgtggcgcactccgcgtccgtgagaaactgcgtgaacgaaagacttgaaagtcatgcacacgcatcgcgcacagatacgacgttgtcgtcgttgtcgnangtgtgcagaatagcctagagtagtgaccgcaggaacgaagncgtgatgtggcgtagtctngagncacctgngntgcgtatcgcctgtcactgtaacgcaacaggtgtgcgtgagcgaggtggcctgnggaacgttacaaggtgaggtctaggttcccttggtgggtaattttggcaaagttggtggtttgggacccaacattaaggggcccaaaatttccaagggtttggcttggcttgggaattggtggctaaggttttaaacaacttttctcaaggaactgagaagaataatggatgccttggtattttcaggattcttccggggggggttaattttcagtctattggaaggagtaacacgcaaaactaccaaaatagaagtcggaaactctaattcacagactactttagaattgtgatggtcacgtggggcacatggttgtgaacattgtcatgatactgtgcaggtccattagtggggctgaatctactgaacgttgatttgcactgcaagtttgataaagaataggtgaaggggtcagttagttcaaaactgtatttggaacttgaggccatcagtgaccaccacagtttcgtctttctgaacagtattagacttgctgcaggtttcgtgaatctgcaactcagtatcacctggactagggcgatactacaaaacactatacgtacaaacgtagcatctagacctgtgttggca

SEQ ID NO: 590800 - DNA, 544 bp, Homo sapiens
atggagagcagagtttcaacatataaatttgaagggggaggacacaaacattaagaagtctatagcaactagtgtccagctttgtttatttttaatacctcacaccagcatattgtgagttctctataaataattggtgctgattaacaatatgtatgaatgtggcctttgccctgaagctattatatatgtaaccagaccccgctatggtcagagaatatccacaaagataatagtatcttgcatctgaataatgttttatacttttactttgctttttctttatgtaaaaaaaaaaaaagtacttttaatgacatagacaaatgcttgtgcaatattgccaaatgaaaattccggacacttgccttttaaagctgaatatttctacattgtaaaacccagtaattcaactcctagatatatgccctagagaaactcttacacatatgcaccaggagttataagtaagaatcttcatagcagcacagttcatattagcaaaaaacttgaaacaagccaaatatctgttaaccaaaaaaaaaaa

SEQ ID NO: 590801 - DNA, 170 bp, Homo sapiens
cttgggattaagggggtgggcccccaacccttttccccctggggttattgccgggatttatcattactgcaaaaacctgttttgttgtggtggggggcaggccctgtgggtgttggttgagggttttgttgtcctggggccccccattaaagggcagttccccccgggca

SEQ ID NO: 590802 - DNA, 174 bp, Homo sapiens
  misc_feature (161)..(161): n is a, c, g, or t
  misc_feature (174)..(174): n is a, c, g, or t
ttatcatgcacagggtatattccaaacatgacaggagctagagttattacattagaaattcatggggtttatggcctcatcctgatagtcactagagtttcaatgataatacttgacttttctaagtggttttcttcaccactacaggaatttacaggggnggggtgagggttn

SEQ ID NO: 590803 - DNA, 921 bp, Homo sapiens
ctggaacctttttccgtccaccaaactcgtatgggtcgagaaccccctctaaagtctaacgggaaaccttttgttaaagctttctgtcccactcttaagggactccctctttgccccaaagaccgaatattttccaacgatcatcaaagagctctatatgccccccgtgagacccaaccttgtcctccccgattttcggcacatacgcgtctgttaagaaacttctttccaacaaccccgcctgatcaatacactttgacagaacactgtcccccccaaatagtcccaaaaattacacgcctctgttttcgtacaccccactcccggatgtgggttaaccacacagaccccgcactaaggttaaacctttaaagttaataagaccacccccccttaacccagcggcataccctcaacgactctttaccagccattctcttgtatactaccgccaagaagaaaatttttcccaggtagtagacaacctgaatagcaagaaaattttaacaatagccctacttgttcataagcatcaagtaacttagcttatgtcccccctccccccaccaacggcaagatagaactccacgatttaaaaatcatgtggtagttacttattctttttttgcctcacaacaaatttattaaccactcctagtactgcaacaaattaaccccataaaacgggcggctttgtgtcaatcgggcctatccgaaccccacgcctgcttttggccccacaccccacaatgaacccccgaccttccttggaatagaaatacaattcaccaatgaatgtttatacccaccatcatcacaaattttctttttatcaataactggagatatgttcgccattgccctctggggtaaaccgggaaaacgtttcggctattcaaaaaagtgcccccacccaaaaca

SEQ ID NO: 590804 - DNA, 199 bp, Homo sapiens
atgtgtgcatgtctaggcatccttgactacttaggaggctgaggaggagaatcgcttgaaccaggggacggtgaacggttgcagtgagccaagactcatgccattgccctccacgcctgggccacaatgagttacaattccatttcaaaaaaacaagacaaagaaaagaaaagaaaaacacggctgggcatggtggctc

SEQ ID NO: 590805 - DNA, 725 bp, Homo sapiens
ggaagacgcggcggcgcgggatgggggcggcgcagtgcctcccggtgccacaggtctgccatcatggattgttctcgcagaagcaaatggcacctttgccttaaaccttgtgaaaacactgggtaaatgacaactcgaagaatgtgtgcttctcaccacatgagcatgtcctgtgccctggccatgtgtctacatgggggcaaagggaaacacctgctgcacagatggcccagattctttctttcaattaaaagtggcggtggctggagactagtccacgcagggcattccacgttctctttctcacgcgaagtgaacaagtactggcacgcagtacttgcttaggatggccaacaggctcttggggcgcatagaagtcttgtgatttcctctcgatcttttagagcattcctgccaaatattctaccaagcagagatggtggagcttgacgttatcgagcgccgtagagaagtccagaaaacacataaatcacctggtgtagctgacaagaccgaaggtataattgcggagttgctctctccgggctcaggtggatccagttgacaaggctggttctggtgaatgctggtctatttcactaggaaactgggactgaacagtttgaccaaggagaatcaccgatggagagactgtccaaagtcagccagaatgaggagaaacctgtgcacatgatgtcaacgctggtctacttgtaacgaagacc

SEQ ID NO: 590806 - DNA, 352 bp, Homo sapiens
acagggtccggccggccacttggttttctggacatgctttggactgtgagccgagcctctatgaatcatcacttcagcctctgattggtcctgggccaaactttcacttcagcccctgattggtcttgggccaaaatttcacttcagcctctgattggtcccaggctaaggtcccgggccaagcgaagtcgtgctatctccaagacagctcacagaccagtgagcacattcttcctcttcccagttcacaaaacccccagattcagcctcctagttggcaaccctctttcgggtcccctctctgctggggagagctttcttcttttgcttattaaacttctgttccaaactc

SEQ ID NO: 590807 - DNA, 153 bp, Homo sapiens
cgggtgatgatgtgctgactgtaacataggtaactgcgtcagagggttggtgtacagattattcatcacccaggtattaggcccattaactattagttatttttcctgatcctctccttcctcctaccccctccaaccttttcaacaggaccc

SEQ ID NO: 590808 - DNA, 90 bp, Homo sapiens
aagacagcagcatatatctctgcagcgttgaaggactgacagggatcaccggggagctgttttttggagaaggctctaggctgaccgtac

SEQ ID NO: 590809 - DNA, 181 bp, Homo sapiens
gctaagtacttgaggatcttacgctgccggtgccagcggttatcgatcaagactgcagccgccgtgtccaactgcgccagacgccggtcaaaggggcactgctggaaacacccaggtagctacgagtgtctgtgcaagcccgagttcacaggtctcacctgtatcaagcaagcgcgcgttg

SEQ ID NO: 590810 - DNA, 1084 bp, Homo sapiens
agcggagggcggtgagttcgccagccgggaggaggggccggggacggtggcgtgctgatggccggtactgaacccgcgcggtattaatcgatgtggagggcggcagcggggcgctactcgcaggtccccgcaggtctgtttgtgtgctccgcgcatcgtgctgctaggggtggtagcgcgtggtggttcctgtgtgccatctagtgtgcgtatgcctgtctagaaaggcggccggggcgcgtgctggcgggggcggtagctcgccgtcgggcccctcatgctgtgatcacccccttctgacaggcacagcgcgcttgctccgttactccttcgaggctatactcagtcggacagcgctcgtcatcggagaatctctacactgaaacgaacagggcacggaggaattttgagcaagtcaaagtcgagagataggggagctggtccgaaagttttcgtgcacgatcgtcaaactcgttgtcaagagctcgggggaagatagctcacctcgatttacatttcatcctagttaatttgaccaacccaaaggatgggaatcggctatattggatcaaccaagaattacatgagcattgggaaaaacacaacctcgagggtttgtaatctttgccagcagccctttttggccccgtgcggggttggactgatttgaatactgcgggatagcatggttaaacgcgagactacacggcgcagccttaccaaccggactcattggaagagttgggaacgctttgagagcagaccttacacccatagaaaacgtttcagcggaggtaaagtgcctcggtgagctttagaatattttgtccccagcctctatttaggttcactcccgagagtactttaacgagatttgacattgaacagccagaagtgacatattcgcagaaaagggttctcttttcgaaggagagaactcgagatcccagaggccagaaccggaggacgcaatttttgcccagttcaacaacggttttgagaccacccagggggaacccccagtgagaatccagaatgttctccccttggcacaacgtaggggtgaagacggggcccagggaac

SEQ ID NO: 590811 - DNA, 366 bp, Homo sapiens
gaacaagcgcgctgggtatattagccatgctgcagctgtactaaggtgatccagacacactacggctgagctttctaaggagtagggattacagctgctaaccgcagctgccggccttatggtggcccacctaaccctgaatgttactgaggcccccaggatgtacacagagtactgtcctgtcatgatcatcacgtatcatgctactgagcacatggtataccgcacttaacgcgcacaacagagcctgctgtaagtgtataatacattcttatccttactagccgatgggggactaccacccgcgtatatgttctggcctgtgctgtgactggactgctggacgagcactttctgcttatgggc

SEQ ID NO: 590812 - DNA, 173 bp, Homo sapiens
tgatgatcccggtcggcactgaagcgtggtcaggcgggagttgtagggctcaccacggctgtgagactggggggctgggtaaatggcaaactctagcttggacttcttggcggtaatccacgtgagagcctgtccatgagcagagatgcgaacccgggcttcagtgcctaacc

SEQ ID NO: 590813 - DNA, 200 bp, Homo sapiens
gatttgttgctgatcccgacaccctttcatactcacgctgaacgtgactgactgaaaacaaactttctttggtacccgagatgtgtgcacagaacttactccctctaataaaaccccaagggagagctggtatagggtggtatagggcggtatagagctggtatagccgtgctatacgctgataccaccgatcagcagaa

SEQ ID NO: 590814 - DNA, 128 bp, Homo sapiens
cacgagggccttcgtaaaggttgcatctccgtcccttcgctcccggggaaccgcgggaaaaaaaaaaatccaacacccaagccccgcgggtaaccccttcccaaaaggtctccccgcccgaatttggc

SEQ ID NO: 590815 - DNA, 326 bp, Homo sapiens
aggactgcagaacgcgctaagagaactactgccattaacatgggtacaggagtggagatctcctggataggagtaggattacgacagaagatggctggaagaattgtgaatcttgtagtacagaaacttgaaagagagactacccattgtaacatcagtcacagcattatcttaaatagcgaagatagagaaatactccactaatgaagagcatgaatatagcatccaaaacacgaacaacaggaacattttagaaatgacacacatactcaaagcaaaaaactaccatgaaacatggatctatgtccatcaagaaagcacaaaag

SEQ ID NO: 590816 - DNA, 647 bp, Homo sapiens
atcacttgaggccaggagtttgagacaggcctgggcaacatagcaagacccttggctctattaaaagtataaaaaatacgccagacgtggtggctcatgcctgtaatcccagcactttggaaggctgaagcaggtggattgcttgagaccaggagtttgagaccagcctggccaacacagagaaaccccatttatgctaaaaatacaaaaatcagcctggtgcggtggcacacccattagtcctagctactcaagaggctgaagcataagaattgtgtgaacccaggaggcggaggttgcagtgagccaagattgggcccctccattccagcctgagagacacagcaacactcttgtcttgataaataaataaataaataaataaataaaaaaaaaaaaaaaaaaaaaaaaaaaaaaaaaaaaaaaaaaaaaaaaaaaaaaaaaaaaaaaaaaaaaaatgcgcccgaatttggggctaattggccaaattggccttatgggagggcggattacaatttcatgtgcccgggggttaacaacgttggggctgtggaaaaccttggggtaacccaacttaaatgcctttggaacaaaatccccttttggcaagttggcggatcgaggccccaacgggggcttttcccacg

SEQ ID NO: 590817 - DNA, 411 bp, Homo sapiens
gcaattacgaggacaggtcaatcacttatgccaacgggaacgttgtcccgtagtaacctagcacatctccatacacatgtgtctggatccctgcttcggggtcccgcttccatcggaaagtaatgacctggtgaagtgcatccccttaatgaaaacagcgaggcccttgaatgccgcaggctcagctccttcatggtgaaggagaatgaacagcagccagaccacaccagccggggtaccacagaggccttgcagactcagccaagatatcttgatctccaaagacacagagccagtagaattaaactgtaatttttcttgtcaaggaaaagaaaaagtgagctgtaccatctgtggtcataaattccctcgaaagagccaatggatggaagcgtcgcgcatgggtaccga

SEQ ID NO: 590818 - DNA, 150 bp, Homo sapiens
tatgtgatttccatataatttcctattatactattattgtacgtcatcagatcccgaacctctataagttagctgccctctgagatgtgagacgtgttcctaatatacaattgcctacttaaaatattttctatgtccatggtagttcgt

SEQ ID NO: 590819 - DNA, 592 bp, Homo sapiens
ggtgcgcggggctgtcgtgttccagtccgtgttccccgtcgctggagtgcagcttaagtgcgaatcatttcttggtctccatgcggtccacaggaatggccttgatgaagatgacaggcatggccggggtcagctctttcagccgcgcttcagcgatgactccagtctgggtgtcccagcgagcccctgcagggacagtatggctgagggtcaggtgtgctgccagtaagtgagggaggggctggcaggaagggtggggtcctcacactccccgccctctgcagagctgggctctaccccaaaaggcttcaggccagctgccacagctggaagcagaggccttcgtaggtgatggcctgcatgttgtaactaccccgtcccgctgggctcaaggaacagctcagctaaagccctcgggttccatccgtttaaatctgtggcattttcagagcctcatctgtcagccttaatgtcagtggcaggaagtcataactccagctaaaaattacagagtaaagttccctgattcttaatgtgtaatgtctgccctatgtgtacatacacaatataattatacatctgtgcatataaa

SEQ ID NO: 590820 - DNA, 168 bp, Homo sapiens
accgcgggggccccctttttgcaagcctccccggtccccaaaatgaatttcatttggggggtttgggttttttattttttgaaagggtcatttgtataattttaaaggcccatgatagtagtttcaaattggaaaaagggaaataaaataattcagtttgcggcccca

SEQ ID NO: 590821 - DNA, 865 bp, Homo sapiens
  misc_feature (201)..(201): n is a, c, g, or t
tggaggggccccaggggtttaaaggggcccccctttttccacccaacctcccaccttggggttcgagggggctgggttacaaaccccctgtttttttaggagaccgaaaacccccccccggttcctgtaaaaattaagtcccaggtccacaggtaaaggcttgatttggggcccaccccaagggagtgtggcctggaggcnagagcgagcctaaaccctgtaggagcagcgccacggttgccaggatccacttcgctgccttctctttggtcttcaagttaaaggtccagacataggtggggccgcggatgcgtgttttgtacacgggacactcatagatgttcttggtctccatgcggtccacaggaatggccttgatgaagatgacaggcatggccggggtcagctctttcagccgcgcttcagcgatgactccagtctgggtgtcccagcgagcccctgcagggacagtatggctgagggtcaggtgtgctgccagtaagtgagggaggggctggcaggaagggtggggtcctcacactccccgccctctgcagagctgggctctaccccaaaaggcttcaggccagctgccacagctggaagcagaggccttcgtaggtgatggcctgcatgttgtaactaccccgtcccgctgggctcaaggaacagctcagctaaagccctcgggttccatccgtttaaatctgtggcattttcagagcctcatctgtcagccttaatgtcagtggcaggaagtcataactccagctaaaaattacagagtaaagttccctgattcttaatgtgtaatgtctgccctatgtgtacatacacaatataattatacatctgtgcatataaa

SEQ ID NO: 590822 - DNA, 898 bp, Homo sapiens
gctctgtacataacaatgatgacagcagtactttaataggtgtatttccgacgtgaacttatatacatcgagagaggctgcattagggaaactgatgtataggaagacccattagttccctagctctctccctgcagggaagatgctatcgtcattgtatgcctcttaacagcagcactggccattcatagttgataaatcagtgtggtactacctttgggactgcccagaaacacttatatgatctggtgtttcgcattacctaggaagggcgcaaaagattcagcgtggtcatccaaaatctgtatgtaagactgatcttcatttcttcctcccacaccttctcctctctgggaaatacataatgctatcttccatctgacttacaaggcgcgagaggataccgctagacttgattgggactgagggatcttagggtggctaggagggccagacccttgtgctaaagatctcaagacatcgtatgcgtcgagttcctagcctatgtggtggcactccagaaactggtgcgtgccccggcataggctcatcatttctcgacgggtctcccatctctgaccaacttgcagcgttcagctacatacataccttgcagcatatgaactgactagtgtggtcactccagaagcccttatatatcccccaggttctgaaccattggtagcaatgctaacctgcaattaccattgaaacttctctggacacctgttggacatcctcacagttcactttacgcttctcttttccgaccatagaagtactccgcctcaaagaagcgtgtcccaaggtcaggcctgggccctaccccgctaataaccggctcccagaccacttagcggaaacgcggtcagatacacatagtactaaggacgccata

SEQ ID NO: 590823 - DNA, 704 bp, Homo sapiens
tgtgctgtggctcaggcctgtaattccagcactttgggaggccgaggtgggtggatcaggagttcgagaccagcctggccaacatgggaaaccccgtctctactaaaaatacattagttgtcggtgctgacgagcacctgcaatcacagctattcgtaaggccgcgccacgggaaccactagaccccagcattaggccttcgcacccgtccgagcttacgctatcgcactctagtgtgccatatcacgcgagtccctctctcagtcacttcgaccgtcctaccgaccccactttgctaatccatgctaagcgtgtacaccgccatcccagcatctagatcgatagcgacctacctcgctcagccgcttagcgatccctacgatcctgtacgtccacggcctcgctctgcctctaccttcccaccgcccctctactcacgcactcttccgatgcgtcaccttctcgcctcccccctctacctcttgtcccactatctcatcctcctctcctagcatctgacggtcacttctcgtctctctacccctacttcggctacttccgcctctactgcatgccctcgttctttcctcttccttctctgcctagccttttcctcctctccatctctcccctccctgctccgtccctccttttcccctcgccctcctcctctccccctcctcccctcccttctctctccttcg

SEQ ID NO: 590824 - DNA, 695 bp, Homo sapiens
  misc_feature (609)..(609): n is a, c, g, or t
ggtgcgcggggctgtcgtgttccagtccgtgttccccgtcgctggagtgcagcttaagtgcgaatcatttcttggtctccatgcggtccacaggaatggccttgatgaagatgacaggcatggccggggtcagctctttcagccgcgcttcagcgatgactccagtctgggtgtcccagcgagcccctgcagggacagtatggctgagggtcaggtgtgctgccagtaagtgagggaggggctggcaggaagggtggggtcctcacactccccgccctctgcagagctgggctctaccccaaaaggcttcaggccagctgccacagctggaagcagaggccttcgtaggtgatggcctgcatgttgtaactaccccgtcccgctgggctcaaggaacagctcagctaaagccctcgggttccatccgtttaaatctgtggcattttcagagcctcatctgtcagccttaatgtcagtggcaggaagtcataactccagctaaaaattacagagtaaagttccctgattcttaatgtgtaatgtctgccctatgtgtacatacacaatataattatacatctgtgcatataaatattgcctttaaccagnctgctattatttctactcgccctatttaatggtgtttttatttcctgtctgaaatctcaaaataaacaaacatggagagcttaaaa

SEQ ID NO: 590825 - DNA, 1146 bp, Homo sapiens
  misc_feature (1146)..(1146): n is a, c, g, or t
ggtgcgcggggctgtcgtgttccagtccgtgttccccgtcgctggagtgcagcttaagtgcgaatcatttcttggtctccatgcggtccacaggaatggccttgatgaagatgacaggcatggccggggtcagctctttcagccgcgcttcagcgatgactccagtctgggtgtcccagcgagcccctgcagggacagtatggctgagggtcaggtgtgctgccagtaagtgagggaggggctggcaggaagggtggggtcctcacactccccgccctctgcagagctgggctctaccccaaaaggcttcaggccagctgccacagctggaagcagaggccttcgtaggtgatggcctgcatgttgtaactaccccgtcccgctgggctcaaggaacagctcagctaaagccctcgggttccatccgtttaaatctgtggcattttcagagcctcatctgtcagccttaatgtcagtggcaggaagtcataactccagctaaaaattacagagtaaagttccctgattcttaatgtgtaatgtctgccctatgtgtacatacacaatataattatacatctgtgcatataaaaaaaaaaaaaaaaaaaaaaaaaaaaaaagggggggcgcggcccaaaaattctcccccgggggggcccaagtttccgccggataccccgagcttcctctggttcccaaaggggcccccatatgaggaggagccgaaattaaataagccaaggacagcgggccgcgcaagcgatactaacaagcgcccgcgaacgtgggcaaaacgcggccgacagcccgggggaaccccggggaaaaggaaccactatactgtcgtggggggggtgggccaccacatatgtgggggacacaaaagttacccccttcaacagaagaatttttaaaagagcgtccctaaggggggcacactttatatacaaacacttttctcacagcggtgtgtatctatccgcggtgttgaaaacaccttcagcccgtggcatatatgtgcccgtaggccagcggccttgagaaagaaagattcgtgagcgcctaccccgggcgttgagtgaactctcctgctgaaaccactcttttcattcacccccgggaagccctcgcgtggaacaacccggn

SEQ ID NO: 590826 - DNA, 276 bp, Homo sapiens
  misc_feature (46)..(46): n is a, c, g, or t
  misc_feature (76)..(76): n is a, c, g, or t
accctgcctcgatgtcctgccgcgcgttgtcatcagcggcgggatngggagactgtgagccaatgatattaagtangggttaacctcgcgctgaccgaaagttaacgatttcgttaacttccactctttcgcaatgatgaattcagagcttccaatccaatgcaaggctgatggagcgcgggtctccccaatacacgccgttataaaagccgacacgatcgtaatattttttatcaaataggttgttgatattaattgatgctggcaagtggtcat

SEQ ID NO: 590827 - DNA, 137 bp, Homo sapiens
actccgctgtgatgagcattttgaaaaggtgcccgacatcattggtcattagggaaatacaaatcaaaaccacagatgagagccaggtcgtggtggctcatgcctgttactctcggtactttgggaggtcgaggccg

SEQ ID NO: 590828 - DNA, 307 bp, Homo sapiens
gatcgaatgctgtcctgctaggctatcgtgatgaaccaatccatcacaccacctacaccccgccaatgtcccaacgcttccgcggctatctgcctgtagtggtcgacgttgaaacgggaggctttaactggaaccaccacgccctgctagagatcgcctgtatcccaattgaaatggacgacactggaaggctctaccccggagaagtcaccagcacccatgtcattccagcacctggttaccgatatcgacccaaatcactggaagtcactgggatcatactcgaccatccgtttcgcttcgccaa

SEQ ID NO: 590829 - DNA, 199 bp, Homo sapiens
ggccaatatggacacagccatgaacccgtcccttgtgaaactcagctcagaaggggacagaactgacttctgttcctgtctctgctccagtgacccttttcctgcaaaggggcctgaggaacttagtggcttttctttcatgttgacctgggcctcttgcctgtagatagatttgtgttcctggacaaagaggaacttg

SEQ ID NO: 590830 - DNA, 317 bp, Homo sapiens
ggaatcctggttttgcctttatgttgcccgctgcagcgatgcattgggagttgggagaccctcactctagtatactctctgtggcccgtttcacccggcttaatcttggaccagtggctgaactctccgacctcagcttcctgcctgtaacatgagaaggctccctacatgctctctagaccttttcaataacagcggaatacgattggaggctctccagttcccccccggggacaggttaatcttcagccacgtctagccaacgtgaggcagcagcccgcccgctcagcaggcacacactgagggcggcggcgcca

SEQ ID NO: 590831 - DNA, 250 bp, Homo sapiens
  misc_feature (80)..(80): n is a, c, g, or t
gatccccaagcagttcccatgactcatcaagccacatgacttctccacaatgcacgttcttaccttagccacgatagtcncagccacacgttactaaagggttgactcaaaggatattgtacgggaataaaccaattaccagggggaccggttacttccaatccagggccaaattcagcaacaggtcctccaacccagtgctgttatcagatcacaggctcagggccaattcctttcccgagggctaatc

SEQ ID NO: 590832 - DNA, 356 bp, Homo sapiens
gcccaaacccactccaccttaccaccagacaaccttagccaaaccatttacccaaataaaggataggcgataggaattgaaaccttgcgaaatagatataggtccccaaggggaagagtgagaaaattataaaccaggaatatatatgcgcaggcgtataccccatatcctactattgcatatgggagtatatttcgagaaattactattcgcaggagagacccactacggctagagactctcactacaccagcagatggctactcatgatggactacagcataactagaggcaacacccagtttactctgctagacacagctacgatagcagaaggactatgctgcgatgagcag

SEQ ID NO: 590833 - DNA, 186 bp, Homo sapiens
  misc_feature (68)..(68): n is a, c, g, or t
cacccctaccgagcaatatgaatggctaactcttccgcatacaagaagagacgtacagataactaccnccaacttcaaatggtgcgacttcagggaaagatcaccttcttcccccaccatccccttcctattccccattccactgagagccacatccattgcccaataaaatcctccacatatacc

SEQ ID NO: 590834 - DNA, 158 bp, Homo sapiens
cgtgctcactggtgtcactgagctgccccaagatcatcttgttgcaattggataggaccccctggaggacccggggggccgggccgccctctggggccgggaggacccctcggaccttgcaatcccatgtcccaccactgccttcgtgcgggggatct

SEQ ID NO: 590835 - DNA, 116 bp, Homo sapiens
caacgatcggggagtggctttgggtgcgtgtccgggtcgtgtgatgatggaacacggtgtatgctgtgagtcatggctgaaggcataacgctgacctgggattgcgactgcagtgc

SEQ ID NO: 590836 - DNA, 681 bp, Homo sapiens
ggccgcgatgacgtcactgcaaggcgccggggaacccgtggctgcgttcggcgggcttcccgggtaccaaaaatggctgtggtagcgatttctacctgcgctactttcgtagggcacaagggcacgttgggcacgagtttctggagtcgaatttcggccggacggaaagcttagatatgccaaacaacagcaattacaaacatgatgtgatgatcagaacacagaggcttatgtgcacaagagtgtattggacgactgacagcagacttatggattgacggtgacattaccaaacagaagatgatgcttgtggggcctcccccctgatagtggtttggccgacagggaggcttgacaagtggtaattgtggggatgagcacttatatctttttacccacattcaaaaataggtcctcttatttgatgtaaatcaggtcaaaaggatcttgaagggccttcgagtatttacatatttggtacacagagttgaacatgttaagttgcagtcttaatgtggattacacttcaagattaacccaatttaaatggtatgttcaggctgtggtataatacataagggatggaagggggtatcggcaattaccggatggggtctcatgcaatggtgacgcaacaaaaaatttgatgtaactggaacagacaacacagcaaacaccaca

SEQ ID NO: 590837 - DNA, 362 bp, Homo sapiens
tctgacggatgttcaggcgagtcggacgtcgtacagagcactcgtccatgtcacgcattccagcaggtatcccgtctgtagtagaagccctgcttgcagtagcactacgtagccaggctgcgtgtcacgcacttgcactccttgcaaatctccgacccgaacaacatgcactcgtacgatgtctagcggggtgacacaacacactggtgggtatgggatgcctgtcagttgacgatgttgtaagtccttgggtgtagcccatttccgtctgggcagaaggcttgtggaactctggtcagcaggtgggaactctggtcaagaggtgggaactctggtcagagattgggacctctggtcagagg

SEQ ID NO: 590838 - DNA, 1219 bp, Homo sapiens
  misc_feature (779)..(779): n is a, c, g, or t
cggcagcatctggttggtgtgggggcggtgatctccggctcggcgtgtgggtatggcggggcgttgtggggctcagtgagatgcgttgtggcgcgagtcgcggggtggtctcccgctgatgtgcggggtattgttgcacgcacgccgccgtccccgaggtgtgtgtcggcgcggtcgggccccgggcgtcgaggttcgctcctgttgtggtttgtctcgctggttacagacgagtggtcggttgccggggccctggtggccgcgtggcccattggcgcgcgtcgcggtggggggcgcgtgtgatggagtgctcgcggggctgtttcgtccatataccttttgagatgtgcccccgtgtgtcacagtggggtcccagggggtgtgctccaggcgaccccttgtgagcagtcgggccggttcggtgctcagcagtgccataaactttggccccccgtgtggcggagtcagtagtgcgccgcagtgcgtgtgcccctcgccttaatcgtaacctttgttccgcgagtgttggcgaatcgtgtagccctctataccaggcacgttgaggttggattttaacccgaaccccagctacgccaaatctttagccatacctccctctcagttaccccacactagggagaaataatagccggttttaccggtacaaccctgtacattgcccgttgtgttaaatgttaacgtaaggtagatagttatgtctccatacgtacttaccgccattctctatctacgtccacgttaaactcccagccaccccngacccttactacttattctccgccacctgagaaccagcttaaccatgactacaccacccttgaattcccatcccccctccttctcccttaggaggcctgccccccgcctataccgcgctttttggccccaaatgggccacattatcgcaagaaattccccacaaaacccatatgccgtcagtcatctcccacccactcattaggccacccactcaccccctcctgtaacccttctaactttctaacctaacgcgctacatgttactgccaccgctcacattcaccacctacttccgccactattctaacacacgtgaaaaataaaatgaccacgtgttgaaacatacccaaacccacccccacttcctgccccaccaccttcatcgcccttaccacgctactcctacctatttccccttttactcactaataattttata

SEQ ID NO: 590839 - DNA, 358 bp, Homo sapiens
atgtgggtctgtttctccgcggattgtagccagctaatcccttcctaccagccaacagtgagtgggtcgagtagtgagcaccctggggctgggtggtgaggactgcgtactgtggggcggcccttcccaactcttggctgtgcccagcagcacctctggggcacaagggcaggccctctttagagagaaccagggaatccaaacctgagatgtcggggcttctttgtcacggttagacagaatatttgagacctaagatcgtgcataacaggaacatgacagcatcgattctctagccgagcaaaagcgtaaaaaaggaccctacagcaagtaccttatctaactcatccttatgtaa

SEQ ID NO: 590840 - DNA, 760 bp, Homo sapiens
agatcacgaggtcaggagttcgagaccatcctggccaacatggtgaaaccccgtctctactaaaaatataaaaattagctgggtgtggtggcaggagcctgtaatcccagctacacaggaggctgaggcacgagaatcactgtgaactcaggagatggaggtttcagtgagccaagatcacacacatgcactccagcctgcaacagagcgagactccatctcaaaaaaaaaaaaaaggtaggaaagaaagggattcctttaaatggggaaagaaaattcttaaaatttggggtggaggccggtttatagaattaaggcggttctcgaaagggtcctatggtaggcgggaataaaggtctaaatcctctcccttaagggggagaacacaagggtcccatttggagcgggatctaaatgggctgggttctggtcagtagaattacccattggtggttacccaattttgtggtgaagaatggcccatggctatcatattctaattataactccccattaggttttgagagggtacttgaagtggcattatggtgaaattacggatattggtattgtgaaccaattactttgagggaactttacaggtttcttttaaacgttctatggtgcgcgtgcaattacttttataaccgtgctggtgtggagagaaggtatggtgcagaaaaatttatgggtgcggacaatcggagggggagggggttattaggggccgtggtacctggaggaaggaccagaatgagcg

SEQ ID NO: 590841 - DNA, 863 bp, Homo sapiens
attctagaggccgaggcgggtggattgcttgagaccaggcgttcaagaccagcctggccaacatggtgaaaccccgtctctactaaaaatacaaaggttagctgggcgtggtgacgcgtgcctgtgatcccagctactcagaaggctgagacagcagaatcgcttgaacccaggaggtggaggttgcagtgagccgagatggcaccactgtactccagcctaaggctacatagtgagactctgtctcacaaaaaaaaaaaaaaaaaaaaggcaggtacttctgggcaactaaatttgtttttgggcccaaagagggggctagccaagggggtcggggttaatccatttcagtaattaataatccccagggtgggggcttcctaacataagggggttcctcccagggtgttgcacaggggcctaagcctttctaatggggtgtcccacccaacattttcggtgcgatcacatggtttccttctgggccttaaaaatccggcatcagaaacaccaaggtcgactacaatagcgcgtactaataaagaaaaaagttccggtaatagaagcttcttgccttgagaaataaaggtaacagggaggccctacgggggtcggaacccgcgggcaccggatatacgggatactaaccagtgttgaacgtggggccctgagaaaagtgtaaacccccctacggggggtatttgtccttcccttacctgcaaggaaggcgtggttcaattttccagccagtgttacgttgaatgggtgggttaacactcttccggtaaaacgggggcgccgtacccacaggggaatgtccgggaacgttgaatccgtccaagaccaaaaaattgcgcatatgg

SEQ ID NO: 590842 - DNA, 918 bp, Homo sapiens
ggctaatccagtcggtgccgattacccagaccgtcgccatggccgcctatgaattggtgctgatcctggcacggtggagagcgcatggaacctgggataatccgctattaacaggtgttacgacgccgaactgagtcctgcggccctcgatgaggcggaggcgcggtggtctggctgctacagtagcatgcgtggctaatgagtttgacatctgcttcactgtcagtgcgagaagagagcgatctcggacgcctctggactagtgctagaatgccagttgcatcagatgtggctgccagtggtgaggagcttgagcgcctcgaatgagcggcactatgggggtctaaggccggtctcaatataaagcagaaatctgctgcgaaggcttggtgaggcccagggtgaagattcttggacggcgcttcctattgatgttcccagcacctccgatggaggcccgaccatcctttctacagacaacatcagtaaggatcgcaggtatgcagacctcacagaacgatcagctagccctcctgtgagagtctgaaggatactagttgccagagctctgacccttctggaatgaagaaatagttccccagatcaaggagggtgaaacgtgtactgattgcagccatggcaacagcctccggggcattgtcaagcatctggagggtctctctgaagaggctatcatggagctgaacctgtcgaagtggtattcgcatagtctatgaattggactagaactttgaaggctattaaggccattgcgattctgggggactgaagagaacggtgcgcaaggcattggaagctgtgggtgcccagggcatgggcaccgaagtgtaaggccgggggaagataattgtcccccggagaaccctctccggccgacttgtcctctttgccctacag

SEQ ID NO: 590843 - DNA, 487 bp, Homo sapiens
gcaaggggtatctccttctctgtctttggggtgagtctgcctcacagggataagatgctccgtgcactcatagtggccagtcctcaccgccacatgcagcgcgggctggagcaacttatctcgggcgctaatttttgctcctttattcagcaacaattttaaaacatccaggtttcctccacggcttgcccagtgaatggctgtggattcaagcatatcacggaattcgatctgggctccagcttccattaacttctccacaattgccaaatgtccttccaagcatgctctatgaagagctgtccgtttatactcatcacaaacatctggattgttcttgtctgacaagaatttttctactactggcagtttattctccagagcagccttcagaaacgtaggcacatccacaggttccgtaatgatttcagggtctgggttcctttacaactggaactttagttttcctgtatttttcccttttctt

SEQ ID NO: 590844 - DNA, 255 bp, Homo sapiens
  misc_feature (33)..(33): n is a, c, g, or t
  misc_feature (37)..(37): n is a, c, g, or t
ggtcgaccagaacattcagatcaaggttcttangacncctgaagttgtcacgtgttaaccagaaaacagatctgccaggtgcggtggttcacacctgtaatcccaacacattgggaggtcgaggctggtcttgaactcctaacttcaagagatccacccacctcagcctctgaaagtgctgggattacaggcgtgaggcaatgtgcccagacttttttttttttttgacttgagggtctcactctgtcacccatt

SEQ ID NO: 590845 - DNA, 550 bp, Homo sapiens
agccatgccggttccaaggggttcccgctgcagtcgtgtgcaggtctatcggacgcaacgaagacagtgacagctgtggcgcactgctaaatcgcggcaagtggtctcatcaaggtggaacgggcgggcccgtggtagatgagtgagccgcgcagcgctacgaggtacaagcctgtctggaagccagattctgcgttcgtcggcaaggagcgatttgctaggtgtaggacaatccgtgtccggtgtaaagggtggctgggtcacgtgcgtccaggatttatgctatccgtcgagtccgatcgtccatagagccctggtggcactattacctagaaatatgtggatgaggcttccaagaaggagatcaaagacatcctcatcacagtatgaccggacccggctggtagctgaccctcgtcggctgcgagtccaatagagttgtggaggccctggtgcccgcgctcgctaaccgagaaatcctaccgatcagcccatcgtgactcaaaactcactttgtatatataaacagtttggagggacttttatctgc

SEQ ID NO: 590846 - DNA, 409 bp, Homo sapiens
atgttgagaaaacagtcaaatttaaccatttggagattattggaattcttggaatgagcaatatgcaaaaccttttcaaaaataacatattctggactactggatggatgttctgttttcagttcattattcatcaatagagatggagattattgatcttgagtatcctcgcttctatgtctgcgcatgtgaacatcggatgtatttgaatatactcaattaagatacagactgcgtgtcattctggctagattagaagctaagtcacttactgagtaacattgtgcaactttattcctgcgagtactatatcggtcaaaaaaagttttgctggtgataccattaaaactttattctgtgagagactttttactgtaaagagtctagaaactgtcattctcgtgccgga

SEQ ID NO: 590847 - DNA, 125 bp, Homo sapiens
  misc_feature (53)..(54): n is a, c, g, or t
aatgggttttaacatttcgatttaagaatagactatcttaaatatgatgctgnnacatctgagaggcaggagataggtctcaggcaccagagatccggggaaatatatatgggcattttgtggtt

SEQ ID NO: 590848 - DNA, 337 bp, Homo sapiens
  misc_feature (327)..(327): n is a, c, g, or t
acctctgcctcccaaagtgctgggattacagtcatgagccagcgcatctggccaccttattttctactactggctcaatgtaatggctccatctcaggaacagccaatgaaagagatgcacaggacaagaaacaggaccttgccctgtcactcaggatggagttcagtggtccaattatggctcattgtagcctcaaactcccaggctcaagcagtcctaccatgtcagccttcccagtagctgggattacagttgaagcacctgtcctgcgagcttaggggtgctacaagttgaccactgcactccagcctgggcgacagagcaanactcggtctc

SEQ ID NO: 590849 - DNA, 734 bp, Homo sapiens
  misc_feature (273)..(273): n is a, c, g, or t
gggagaaatgaaaatctattctgaattaattctactcagcttctgggcagcatattttaaagactggcagaagagagagcatcacttttttagtgaaaaacacgggtcactataaataatgtagtttaaaagcaataaaaattttgtttcacttattctggcatttagtaatgggtacttgagatttgccttctaacctgaacattctttagactaagaaatggccttggattatgtgcttctcgaaacatctgtgataaaggaccatttttntttccttttgaattccatcagggactgatactttggaaagtgttgaggggaggagggatcgtggcatgtgacctctaaaggaaggtgagattgtggccaataccttggaagacttggtaatctttcctttggatcccagaaccagttggcaaacaggttggcactgggcctcaagttgggcgtttgatgaaccttaagggctggattggtgtttccagattccatccagggaatacacatttcctttgaaggtggttttcttaagcccgcctttttggcccaatttggggttccaataaatcccgggccctggggaattttccttcaagtttcggggaaatgtgccatgaatgcccttaacaaatccccccctcgggggattgaccccagaccctgttttccctgagggtactggcaaacccccttggttttcagggcttcgtggttacactcccttcttt

SEQ ID NO: 590850 - DNA, 425 bp, Homo sapiens
tgtaggaagttagacacaagcggccttaagttccttgtctccagactctgttctcctgtctcacgtgttcccacctgtctggtatgcagtcagctcggactagagagcagaagagcagaatgtcccctgaggccaaattgactttcagaggttgggagggactaaagccagcagcacatggctgtcccctccctctttcagagaacagcagcatggtcctcagtaccccgaactctccctccctgcatcctgttgttgacaaaaagagtcaaaactctggctccgaatacatctcttcaaatattttacaaatgtgagtgaccatggactgtgacacagccctcagtaagtcctgagaacatgtgccatggtggtcggggtgcagctggttttatacattttagggagacatgagacttcgatca

SEQ ID NO: 590851 - DNA, 320 bp, Homo sapiens
ccaacaaactctcaagccatgcgggcccctttgccacacccatcgtggtgccaggactggatcccggtacacagaccatcttacaggagttcttggttcccaactatttgattggctgtgtgaacggtcgccagggcagcaagatcagcgagatcctgcatatatcatgggcacatatcaagatctggaaccatgctcaggtccctggtgatctggtatatcaccatcattgtctcttaggtaattatcgaccctgcctatttccctatcactagtatgattagaaacggtcaaaatttacctttgggggtacacacaat

SEQ ID NO: 590852 - DNA, 507 bp, Homo sapiens
  misc_feature (29)..(29): n is a, c, g, or t
  misc_feature (44)..(44): n is a, c, g, or t
  misc_feature (53)..(53): n is a, c, g, or t
  misc_feature (65)..(65): n is a, c, g, or t
  misc_feature (113)..(114): n is a, c, g, or t
  misc_feature (153)..(153): n is a, c, g, or t
  misc_feature (171)..(171): n is a, c, g, or t
  misc_feature (181)..(181): n is a, c, g, or t
  misc_feature (193)..(195): n is a, c, g, or t
  misc_feature (281)..(281): n is a, c, g, or t
  misc_feature (320)..(320): n is a, c, g, or t
  misc_feature (361)..(361): n is a, c, g, or t
  misc_feature (377)..(377): n is a, c, g, or t
  misc_feature (415)..(415): n is a, c, g, or t
  misc_feature (419)..(419): n is a, c, g, or t
  misc_feature (444)..(444): n is a, c, g, or t
  misc_feature (456)..(456): n is a, c, g, or t
  misc_feature (459)..(459): n is a, c, g, or t
  misc_feature (468)..(468): n is a, c, g, or t
  misc_feature (470)..(470): n is a, c, g, or t
  misc_feature (474)..(474): n is a, c, g, or t
  misc_feature (477)..(477): n is a, c, g, or t
  misc_feature (484)..(487): n is a, c, g, or t
  misc_feature (504)..(504): n is a, c, g, or t
gagaacccaccatggtgctgtctcctgcngacaagaccaacgtnaaggccgcntggggtaaggtnggggcgcacgctggcgagtatggtgcggaggccctggagaggtgaggnnccctcccctgctccgacccggggtcctcgcccgcccggncccacaggccaccctcanccgtcctggncccgggcccaannnccacccctcactctgcttctccccgcaggatgttcctgtccttccccaccaccaagacctacttcccgcacttcgaactgagccangggtctgcccaggttaagggccacgggaagaaggtgggngacgcgctgaacaaagccgtggcgcacgtggaagacatgcncaacgcgctgtgcgcnctgagggaactggaaggggagaaggttggggtggaagnggtnaagttcaagctcctaagccactgcntgctggtgaccntgnccgcccaantnctcntcnagttaannnntgcggtgaaagaataantgg

SEQ ID NO: 590853 - DNA, 330 bp, Homo sapiens
taatattttaggcaggtcatatttaacctcctcaggtgtggtgttatggagtctaaaacaagaagctgatagctgccctagcttagcgcacaaggtatgctcagaggaatcaaatgagtgtactgacttgtggatgacagcttggaaacatctggagatgctggatatgcaatcatgaaggtcttgagggattctgcttgggagatggttgtctatgtggtcttgtgtgggctatgaggataagagagctgtattattagcagtcagggaagggtttgtatccttaattcattattatccttcctcgaggaggaagtcgttgtatgtgat

SEQ ID NO: 590854 - DNA, 299 bp, Homo sapiens
  misc_feature (286)..(286): n is a, c, g, or t
taggaatcccaaaggtgggatcctccctcatggctttggcacagtgtaatccaggggtgtaaatgggggaactgtgaatacttgaactttgttccccccccctccatgctcctcacctgtttaggtttcctcagggtggggggtgacagtgccttttttattgggcccagcctagggttttgggggtcaggggggaaaagttttttattcacccaaatgcagggaggggaggcaaatggagcccataggcccccccctatcctttgagggtttggaaataaactgngcaatccccccca

SEQ ID NO: 590855 - DNA, 222 bp, Homo sapiens
tcaaaagaatttggaataaactttgaagttttggttttacttatttttttccccaaattgttgctatttttttggatttgaaacaaaatctttttaaaacattgtttttgttgtcaaagccccaaccggacattttggggtgtgaaatgtaatttcttggaatctgtaatttgtacttaattttcaggcttgtatttaatttaataaataggtgttttttta

SEQ ID NO: 590856 - DNA, 114 bp, Homo sapiens
agaaacatctcaaggcaatgatctaagcttctaccttaagataacagaaaagaatgagcaaactaaatccaaaataagcagaaagaaagaaagtaataaggagcagtaacagct

SEQ ID NO: 590857 - DNA, 318 bp, Homo sapiens
  misc_feature (230)..(230): n is a, c, g, or t
  misc_feature (301)..(301): n is a, c, g, or t
agactcctggcaggcatggaggcagaacttccagtgttttccacagtggccccactggaggggcaggggagaggataggaggttaggtgggggaagcaaggaggaggagagggaggaggccacgggaggtggtcttgggtggggcctccctttgcccgcaggtggtgatgggcagctgaccacctgcaccaagtgtcgaggtggctctagtgactatggggacgcaggcntcccgggccaccgcaatggctttctcacagttggtcctttggatccaactggatttggggtgtgaggtggntgaggagaggccccaag

SEQ ID NO: 590858 - DNA, 139 bp, Homo sapiens
atatccaatcatgtgcttctggaacttagtgactggattatatactggatatatgctgcatccataccatgtgtattcttggcaaatcaggtaactggatagttatacatctactttcatttccgatatatatagcact

SEQ ID NO: 590859 - DNA, 412 bp, Homo sapiens
tggctttcaacaacacatccattgagggttggctgtgggctatgctccacttcttcatggtgagacccacgctgtagagcacctggcctctgagacgttactgttttcatggcagaaggaaacatgagaatggtgaagccataaaatggcgcttaaagcttttcctcctaggtggcacaggtgacttgagctctcatttcattggccaaagcagataatacagctagatgtcaacagctcaagaatatatcatcctacaggcagcaacagcaaacaaaacactcagtgatgaataggttgtagcatttatcagaatgcaggtgactaccaaaaaagatgtggaaaatatttctaacccttccattttcccagacatgtgattactattaaattgtgagtaaatcttcaaaaa

SEQ ID NO: 590860 - DNA, 500 bp, Homo sapiens
cgtatctgcagtgtctacattcacggattcagtcagttgtggatcaaaaatacagtcgtctcaaggtatctgtgggagattgattccagaacccccaacggataccaaaatctgtgtatgctcaagaaccttatataaaatggtataatagttagttgtatgtaacctatgcacatcctcctgtatactttagatgatctctgggttatttataatacctaatacagtgtaaatggtttgtaagtggttatactgtatttagggaataatgacaaaaaaaactgtgtacatgttcaatacagatgcaactattcatttctttttcccagctattttcaatctgtgaatggttgaatccacagatgtagaacccactgatatgaaggactgattgtgttggaaaaacaaataacaatacaacaataaaaaatgatacaaataaaaaaccaacatagtctgtcaaggactgtactgtaaaatataattttaacatccagtgt

SEQ ID NO: 590861 - DNA, 378 bp, Homo sapiens
ttcatgtatgagatgaggacatgctgaagctaaaatattaactgggaaacgtaagctataaatgcttattcagtatgatcacttcttttcttgagacggagtctcagtatgtcacacaggcttgagtgcaatggtgcaacctcggctcactgcaacctctgcctcctgggttcaagagattctcctgcctcagcctcccaagtagcggggattacaagcgctcgccaccacgcccggctaatttttgtatttttagtagagacagggtttcaccatgttgcccaggctgttctctaactcctgggttcaagtgatctgcctgcctcggtttcccaaagtgttgggattacaggtgtgagccatcgcacctggctagac

SEQ ID NO: 590862 - DNA, 395 bp, Homo sapiens
ttttattctctcaggagataccaacatgtgatattcgtctctctagcgcctggcttatctcacataacataatgagcccccagttccatccatgtaactagcaaatgacaggggtaaaataacgtaaagggcctaatactgttacactgtgtatatataccacatttacttaatccattcatctgttgtggacacttaggttgacttccatattttggctatggctatagtgaatagtgctgagataaacatgagagtgtagatatctattcaaatatattgatttcctgtcttatagatatatatccagtactggaattgcaggatcataagaacgttctattttctatttcttaaggaacctccatactcttcttcatagtgactgtactaat

SEQ ID NO: 590863 - DNA, 1219 bp, Homo sapiens
  misc_feature (354)..(354): n is a, c, g, or t
  misc_feature (435)..(435): n is a, c, g, or t
  misc_feature (475)..(475): n is a, c, g, or t
  misc_feature (484)..(484): n is a, c, g, or t
  misc_feature (563)..(563): n is a, c, g, or t
  misc_feature (600)..(600): n is a, c, g, or t
  misc_feature (654)..(654): n is a, c, g, or t
  misc_feature (736)..(736): n is a, c, g, or t
cacaccagataagactattggaatcactgagtatcctaatatattgcgagcagcagtgactctcgtcctcctatcggctcagtctctaacgccttccatgaatttctgacgctcgagcatgggcgcagaccagggcgaaccctctctagggtagatcgagatccatctattcttgacacagcggtctctcgcgtcactacgcctcactgcattgtgtagtaattacactcttcattcgactagataattactccattcagtaattcgggaggagctttctgtgcgacagcgtggatcgtaagatatcctcgcctacacctaagtgcgagtgcctccccccgatatattcgagcngcttctctcgctcggctatgtatagaccaaacgagtagagcgcatttcgtggacgtcttctactcgtcgctctctctatcntctgcataacctcccgttgcatcgagcaagatctgtcgcntattagagntgtggagtgcgctcgagggatagcccatgggagacagagggttaagagaccatgggtcctacgcgctatacccttctangcatgtggaacagtatcttccctaatccctgggtgangcgcttcccgtgcacgacacttaagactcatgctgttctgccctattatcaacnctgaagactagagtggtcctgccctactaagtgcgttaaaggcgcgcgcgcatacgagatgtgtaccattcgagcgaaacanagttattcgagattagtagacaatccccgcatgcacgatagatcctcgatagtacctaacaacgcctccttctgtatcaggtctagattcccggtccttaagtcgacaatgtaggatccttacgtttcttccctgattctcatctacctaggtctcataggcttgacgtggcggattcgtcctaatagcgtaacgttaatcaggatggcgtgaaacccgtgcaagctatcctaggcctttcttgtcggaggccccggcccgggaggggacgggagacccccccaatttcgtattaaccggagggaaccattaatttcctggattgatttcccggtcccaccccttggaaggtttcattatttcctttagtccttaagccaagggctctcgggaagtgaaatcactcccccattagtttggtaagtttactttactcccgggaccaaataagaaaccatgttttggaataccctaagggtaatg

SEQ ID NO: 590864 - DNA, 1000 bp, Homo sapiens
catggaaggaatcatggatggatccgatgaagttatacgtgtacctcaaagcatggctatttagaaagtctaccgcatgatttgtggcagcaaagtgagcactagtagggagcaaagatgacacaacttgcctccttctacttcctccaaagcttggtcttacaggcgagagcggtgcagcaggtggacttgtatacgacttctatagcttggatatgcggccgttccacatcttaccagagaagtgtcagctgtgcaatgtgtctggaggggtgggagagaggaattctgtgagcctgttacatttcggtgaccgacgacgatgggcaggagcgaacttgattttccactagttaaattgtgcatatgggtgaagcaagtcagccatagtacacatcagcaatcatcgctatgcagctatgggtaagggacatgtgggactttactgtgcatctttcgaggcagaagccttgagactcaagccatcccaagcctttcaccaatgaggtacaagccctgggggctagctaatcttgaactgttttcttgatgacaggagcgtatgtgaaaagcatcaaacagtgagcatgacagggatgggtcgtctcatacagatcggcacgggggttagaaagccagagccaggtgaacatctgggggtgcctggtgtacccaggtcctataggaatggaacggtgtgaactgctcggaagtccatggggagatccttgttaagccaaaccgaggaaaggccctgtaagatttcacagagttcaacaacaagtgtgcagacctgcgtgtcataaaatgtgtctcacacaaggtactgggtcttgagagataacaagagggggggcaagtcgacagaaaaacacacactcgggagtgtgaacgaaaacaagagattcatcacggtatcagacaagacgatcagaaaagaatgcctccctcctcttctcccgcgcttccgctacatattttctcaagaagagaagagcac

SEQ ID NO: 590865 - DNA, 784 bp, Homo sapiens
  misc_feature (151)..(151): n is a, c, g, or t
tttttttttttggatttaatttaattttattccatttaaattataacttaaatagcgacactgtggataggggcaaccatacggtacagctcagtcccagaagctttcttccttacggagggacagcccctcaaaccaagcgtggaacccncaagccacgtttataattttctcaaaacaatctcagttgtgaaagccagggcccacaaaagtacgtgtgttctctaaaagttacgaaatctcgacgttattatctcatcttctgtggttatagtgaaccacgagatacacgagggaggccaaaggtggtttccacactccaaatagaactctttccacttctccaaactctcgctgtgtggacagtgtctccaatttcttatggggcttttacaagggagaagaacttagaacgaggcaaaggcccgaaggggcaaatgtggcttaatagcggccacactatagacaagtgcagggtgtgggggagtaagtgctgtaaacgttcaacccctctcaaacgaaggggggagaatgttgtggccccccaagcgaggggggacagcgtgtgttatattctccgggccaagaaggcccgtggggtttttccattaaaacgcgtgtgtatagccgtggaaagccatgtggtgtgaagcaccattttctgtgggacgcctcagagccgtgtgttcggggcatatcaggatcattctctccacacacacaggttacaagcagcgctttctgtggttagttcgcccttataggtggtcttggcgggaatatt

SEQ ID NO: 590866 - DNA, 191 bp, Homo sapiens
gtgttgtctggaccacggctagcgggccgacttgattggcagcgtccactcggaagccctggaaactagatgaccactgcaaagactaagatggtggcgatgagattcatgaggttgggaagattctgcgcggtagaacgtcctcccgtaagggctcggaccttgtcttgtgcgtgtggccagcatgatgg

SEQ ID NO: 590867 - DNA, 629 bp, Homo sapiens
  misc_feature (62)..(62): n is a, c, g, or t
  misc_feature (122)..(122): n is a, c, g, or t
  misc_feature (210)..(210): n is a, c, g, or t
  misc_feature (391)..(391): n is a, c, g, or t
  misc_feature (410)..(410): n is a, c, g, or t
  misc_feature (460)..(460): n is a, c, g, or t
  misc_feature (498)..(498): n is a, c, g, or t
  misc_feature (505)..(505): n is a, c, g, or t
  misc_feature (520)..(520): n is a, c, g, or t
  misc_feature (539)..(539): n is a, c, g, or t
  misc_feature (569)..(569): n is a, c, g, or t
  misc_feature (602)..(602): n is a, c, g, or t
  misc_feature (626)..(626): n is a, c, g, or t
  misc_feature (629)..(629): n is a, c, g, or t
gaaaaaaaaaaaaaaaatagcgctcggagcgctcttgcggccacaggcgcggcgtcctcggnggcgggcggcagctagcgggagccgggacgccggtgcagccgcagcgcgcggaggaaccngggtgtgccgggagctgggcggccacgtccggacgggaccagacccctcgtagcgcattgcggcgacctcgccttccccggccgcgancgcgccgctgcttgaaaagccgcggaacccaaggacttttctccggtccgagctcggggcgccccgcagggcgcacggtacccgtgctgcagtcgggcacgccgcggcgccggggcctccgcagggcgatggagcccggtctgcaaggaaagtgaggcgccgccgctgcgttctggaggangggggcacaagatctgganaccccgggtggcggacggaccctccccccgccccgcctccggggcaccanctccggctccattgttcccgcccgggctggaagcgccnaacaccnaacgccgccggggantcaaacgccggccgcgganctcttgcgaccccgccaggaacccaaacanaacccggggggcggcgggccggaacccgggaanccgggcacaccccgctcgcacaanccn

SEQ ID NO: 590868 - DNA, 368 bp, Homo sapiens
acatcgcggctcgcgtgcccatcatatatcgacgagattctatgacaggtatactggtcatcccactaaggttacgcgtgccggcaggtcatgtacatgatcagtaccactcagagccacagatgacacgaggtcaaaactgatctgtccatcgggatttgggatactcaataggtgtgcaagtcctgggcgggctggagccggtcacagtcagaaccgttagtgtgcagaggtccacggctccattcctctcaatatccagtaaaagattccggggtacactcatccctccatatacacccagtactcgggggcaggacggtcttatctttctaacagaatatagctctttccatacccagtgagtc

SEQ ID NO: 590869 - DNA, 102 bp, Homo sapiens
tacagccatggatcgaattcttttcccgataggtttcaattgattgaatgttcatatgacatgagtgaggcgcaatcgcatccaagcctgcatgcttgtaga

SEQ ID NO: 590870 - DNA, 220 bp, Homo sapiens
  misc_feature (70)..(70): n is a, c, g, or t
  misc_feature (136)..(136): n is a, c, g, or t
tgtaatagagtaatccactaggaccatcaccagaatggaaatggggatgccaaaatccccaatgatgcgncgagccttgccacccaagaagcggctgttcctgaactttcgtaggaagaaggcaatgaggaaggtnccaagcatgagaatgagggacagcagagccgtgttgggctggttcctcgggcccggcggcccctcagtggggggcagggcgctc

SEQ ID NO: 590871 - DNA, 160 bp, Homo sapiens
taggctaacccattccgcgatgagtgagctttctggagttacggcatcacgacagttctcgtttatcagcagataactgaatctaccctggatgtgagtgaatgcgggtgctctctgagcatgccattatcgtatacatctctgtgcgctgcaagatgag

SEQ ID NO: 590872 - DNA, 134 bp, Homo sapiens
tcgagtgagaggagcagcggtagtaaacttaggagagtctgcaatagtagtgctcataatgtgtacttaaaaaaaaaattcccaatctgatcacttcacccttctgctgaaatcctttcctgttctccactaat

SEQ ID NO: 590873 - DNA, 445 bp, Homo sapiens
tctagaggtactcctcagctgaaaaagaggagattctacactgcgaacccaggcgtggagcagcgtgctggtacaccgaggcactgtggcctgctgcactggaggaggggccatccagttgcatgaaacaaatgagaatgggatgcagaggacgtcaggtagaaagacccgagctgatggggccatgttcggcttgaaagagggagggagacgcttgtgggcactccctgttttcactatttcttggtccccttgtaaatattcgagtggtataagctttaaacaagcatcgtctggctaaaagtcgcttgcgcaattgtcgttccgacacaacgggcctggaactcggaacaggtaaaggctatcgggtgagacatggctaattgttggctttcaaagtctttgtcgctgtcctttgtaaacgtcctctccttctcgtcctcat

SEQ ID NO: 590874 - DNA, 364 bp, Homo sapiens
gcggtgcttttccccctatgcctgagtcttcttcaccctgcttttgctcttataaatcttttctgtttccctggcctttgtccagagacaggccttgtttggctttggggagagaagcctgagggtcatttatcacttgaacagtgggaatgggggattgagcggtagtttttttgctgtcaccatggcaaaggtctgtgcacagcttacctacattggaagatagctggccccatgttcctattaattgccccaccgttgactaactgtccacgctcacgacttgctccacttcattgatgaacggacaagaatctcgtgcagcaggacaggacccttctcggcgactaaacacagcgacatg

SEQ ID NO: 590875 - DNA, 379 bp, Homo sapiens
taaaacttactttaatgatctctgtgcttttccttataagaataaaacatggcagctaatcttcatgaaaaccagaaggatcggacaaaaatcacatttatttcaccagctccggaaacagacagagaagtgaattcaagctcaagatacgatttcaatgatcacctgacacacaaagacaaggggtggacagtggaagtggggctcctcaatttaaaaagaccgcaagtaactggaaaatctttaggctataatattctatgtacatcacgtaggaaatgagccaatttacaagatgccaataagagttacttacaatcaaacaatccttcacagaaagaatagtcctaacctggtcaaacccagaccagagcaggtt

SEQ ID NO: 590876 - DNA, 219 bp, Homo sapiens
  misc_feature (21)..(21): n is a, c, g, or t
  misc_feature (23)..(23): n is a, c, g, or t
  misc_feature (25)..(25): n is a, c, g, or t
  misc_feature (27)..(27): n is a, c, g, or t
ctctctctctctctctctctntntntntctctctctctctcgtcaaggcaaagagaatgtcaaggcaaagatccaagataaggaaggcattcctcctgatcggcaaagatcaacctctgctgatcaggaggaaaacagctggaagatggtcgtaccctgtctgactacaacatccagaaagagtccaccttgcacctggtactccgtctcagaggtggg

SEQ ID NO: 590877 - DNA, 90 bp, Homo sapiens
tagaggatccacagagtctcctcgtcttgctcaaaacttcagtggctcccagtgcttcaagataaagttgttctccttgacctagtacag

SEQ ID NO: 590878 - DNA, 1194 bp, Homo sapiens
ctacacccacttattccgcattactatgtttattactcgacaaccatgcagtcgctacgttcattacaaaccaagtagacgcgctggacctgtacagccgtaatccagtcataacgaattactgcaggccacgctagcgtcaatgtctactctaattgggagagctgccacccttatgcaatgatcaatccattgcaacctatcccatctacgacttatcatcgttcacaacttctagattactatctggatctatccttatggaaatccgcatgatcggaaccgtataatcctaatgccttatcgttattcacgatcttcctagttaaggtccttctaccttgctgcgtatcaatcaacaataagtgcaccctaaccatattctagcactgccatatcagtatatgtgaaaacccgagtcgcatgacctccttaacacggggcccgtcatccagcccatccatacatgaccgtctctgtgcacttatgcctcaatagtgtactcatcaacaattcgcatcgtccgatagagcggcatcctcgagtacgtaaggcctactaatccaacgagcactaactcatatacgcaattgatggacgcgtactgtcaatcacgagtaaagcagcattaccaaagggcacacatcacagcatctgtccaaaaaaggccttcgatacgggataatcctatatattacctcagaagtttctgtgcgttcgcaggatctggctgagccttttaccactccagcctagcccctatcctcattaggagggcacggtgcccaacacgagtaaccgctcaattccctagaagtccgatccttaaacaacagtcggcttcctcgcctcgagggagagatcagtcccgtgagtcgccatacttctatggcacaacgacgcgaccaatatcacgcctcgcattacattcgtggtctccagtccctcccaaaaagctctaacaactccaggttccattgccatccgcaggaccacggtacactattttcacacagcttcccgatcacgccatggcgccaccacccccatgctcacccgcacaatctcccccacacactggcgtccccccgccccatcaccacaccaacccgtcccctcaagtggtacacgccacacagagctcgacccgcaccacgagcccacccctccactattaccacgacgacaacagac

SEQ ID NO: 590879 - DNA, 1254 bp, Homo sapiens
cagcccgcgcgggtactgtgtgagtctgcgtctggtgggacggggacgggcgcggtggaaggttgataggcgctgtgggtttgagcttggtgcgttgtgcgcgttgagggggttatgttgttcggtgtcctgtgtgtttgtatatgggatagtgtgtgcttggctgtgctgaggtgtgtgctcgggtgtgttattggcgtggtcagatgcgtcttggagttttcgtgaggcgcctttgtgtgtccccgggcgcggggatgacgttgtgttggtcgtggtgtgcttgtgggagccacacgtgggaactgcggttggaaaatattatagaagggctaaatgtgggggcccatcctcccttgacgggatttgtatgatgtctagtgagggacgcgacgtatgtgggggcttgcgtttcctgtcgtgcatctgagagtgtacggtgttatggcgtgcactatgccgtttctcaaaaaagtttccttgttgaggcatagcatcaggagtctgaggtcgctctttggtcattacccttgggaatattaagtgtgttcatcaggctggtgttgttagttagtaaacagctgtgttaataattagagtactggttcttaagtgatatcagttattgttagggtatgatgttaagactattgatttcacctatacagtgaggatataggtttataagagatacttcatccagcatacccttactctgccagagtagtgaagctaattaaacacgtttggtttctgaataaattgaactaaatccaaactatttcctaaaatcacaggacattaaggaccaatagcatctgtgccagagatgtactgttattagctgggaagaccaattctaacagcaaataacagtctgagactcctcatacctcagtggttagaagcatgtctctcttgagctacagtagaggggaagggattttgtgtagtcaagtcaccatgctgaatgtacactgattcctttatgatgactgcttaactccccactgcctgtcccagagaggctttccaatgtagtctcagtaattcctgttactttacagacaggaaagttgcgagaaactttaatgatatctaaactctgaaaacctatgagcaaatgggtgctgaatacaaaaattataaagccacatattcattgtcataaatcaaagcagacttattaactgattattataaaattacaaacatgatatattcagcaaccttcaaagtataacatcttataaa

SEQ ID NO: 590880 - DNA, 1338 bp, Homo sapiens
cagcccgcgcgggtactgtgtgagtctgcgtctggtgggacggggacgggcgcggtggaaggttgataggcgctgtgggtttgagcttggtgcgttgtgcgcgttgagggggttatgttgttcggtgtcctgtgtgtttgtatatgggatagtgtgtgcttggctgtgctgaggtgtgtgctcgggtgtgttattggcgtggtcagatgcgtcttggagttttcgtgaggcgcctttgtgtgtccccgggcgcggggatgacgttgtgttggtcgtggtgtgcttgtgggagccacacgtgggaactgcggttggaaaatattatagaagggctaaatgtgggggcccatcctcccttgacgggatttgtatgatgtctagtgagggacgcgacgtatgtgggggcttgcgtttcctgtcgtgcatctgagagtgtacggtgttatggcgtgcactatgccgtttctcaaaaaagtttccttgttgaggcatagcatcaggagtctgaggtcgctctttggtcattacccttgggaatattaagtgtgttcatcaggctggtgttgttagttagtaaacagctgtgttaataattagagtactggttcttaagtgatatcagttattgttagggtatgatgttaagactattgatttcacctatacagtgaggatataggtttataagagatacttcatccagcatacccttactctgccagagtagtgaagctaattaaacacgtttggtttctgaataaattgaactaaatccaaactatttcctaaaatcacaggacattaaggaccaatagcatctgtgccagagatgtactgttattagctgggaagaccaattctaacagcaaataacagtctgagactcctcatacctcagtggttagaagcatgtctctcttgagctacagtagaggggaagggattgttgtgtagtcaagagagacatgcttctaaccactgaggtatgaggcatgtctctcttgagctacagtagaggggaagggattgttgtgtagtcaagtcaccatgctgaatgtacactgattcctttatgatgactgcttaactccccactgcctgtcccagagaggctttccaatgtagtctcagtaattcctgttactttacagacaggaaagttgcgagaaactttaatgatatctaaactctgaaaacctatgagcaaatgggtgctgaatacaaaaattataaagccacatattcattgtcataaatcaaagcagacttattaactgattattataaaattacaaacatgatatattcagcaaccttcaaagtataacatcttataaa

SEQ ID NO: 590881 - DNA, 115 bp, Homo sapiens
aatttttaaaaaacctggtggacgacggtgatcttggtccttttaaaaaccatggattagtccttttcagtactaatgtctactggacttccctgacaaacagatttagaatcta

SEQ ID NO: 590882 - DNA, 242 bp, Homo sapiens
  misc_feature (28)..(29): n is a, c, g, or t
  misc_feature (54)..(54): n is a, c, g, or t
  misc_feature (192)..(192): n is a, c, g, or t
  misc_feature (205)..(205): n is a, c, g, or t
aaactattcacattagcactaaacaagnnagcagtctactactgtcatcatttncctgagtgcccatttgctgtacagcataaactattacagcataaactattacagcataaactattacagcataaactattacagcataactatcagaaaaccaaaaaagaagatattcctcgtcagcttgtctacatnggtctaacttcanagatggttagtatcaatgtgcacataaaagaataaca

SEQ ID NO: 590883 - DNA, 139 bp, Homo sapiens
gcaggtgtctcctctatcattaggggccatcaatttcatcataagcaattatcaatataataccccgctggcatatacccaataccaaacgcccctcttcgtctgatccgtcctacgatcttgaattgacacatcttgt

SEQ ID NO: 590884 - DNA, 125 bp, Homo sapiens
tgacctacaggagcttataggttaattgcatctagtatggagagatatctgtatcatgggttacatttctccttaaagtgacaaacatcacacacacacacacacacacacacacacagacacac

SEQ ID NO: 590885 - DNA, 206 bp, Homo sapiens
cctaattacgagatggatgtttctcatagatatgtaaacatatataaaatagggtatgttactaaacagtcctcagtctctgcttaaaaacgacacacaaggagttcccgtcatggtgcagtggttaacgaatccgactaggaaccatgaggttgcaggttcaatccctggccttgctccagtgggttaaggatccagcgttgccg

SEQ ID NO: 590886 - DNA, 157 bp, Homo sapiens
gcactttgcctattgtgaggcgagtcgctcgccggtcggcttgattagatggcggtgcaaggagcctttcctcctgggcagcttggacacaccttgccagctagggcgccagatgcattacggtgctgtccagctggctcactcgggttgctgggct

SEQ ID NO: 590887 - DNA, 841 bp, Homo sapiens
tccaatgttcagttccctttaatgacccccatctccctgaaagggcaggtgcaggcagctaggtgatggcaaaaaatgttcacttgaagatcttgccctgattgaaggctttgcccacttgctggaaggcccccttcccaggaaaagtactctcgaaccagcgtctgggtctcctcgctgccaggactccagtttccgccagtgtgtatgactcgtagtccaccgtgccaattctgtggacctcagcggaaaggcaagcctcctgtggccctcggaagacccagacttccagaaatgtggagctgcatatggtgggtcccaaaaaggatgacactggcgaccggcatttctttccctcacgctttgttccagttcgcgtggaacactttccaggtgaatgaagaattgcagctcagtgagaggtcgtgagtgaagttctctctcagggaaagcgatactctgagttcacccacgagggcaccagccgtccttttcaaagtgctcccagaaaattatggcaggtgcccacagaagaaggtgtgtcctcatgggcagtcacttgcgcttaaattcatccaacacaagaggtactctggggcaggtgaagcgaaggggtccttggccttgggctcagcagccagcgcctgctcacattcatccatctcctcctcaggagcaggggcagccgccttttctcctccttccgttcagcctggggcttctgcttctcttcccgtgaaccctttctcttcccgtggtgtgtcctttcaggtggggctctctgcaaactttttagcatcacacttgggccatctttctcaccacagttttcattccccaa

SEQ ID NO: 590888 - DNA, 978 bp, Homo sapiens
ccgctataatactaaccgtctccaagggtcgtgctttctgtgggccgcaactgagtttgggcgggtctcaccccaacatctttgggcccttgacagatgatcaaagcctttcctctagtcttcagaggcgctattgtgcccgccgttccaagcctggctgggcaccagcgtgtgtgccgggaccttctagcataaatcttgagtgaacaccaccacgagaaagggcccagcacgggggtcagcaccccgggagaattgcgcaccacatggtgcttgaaaggaggaggatggttggcaggcccgttgcccccagatccatcccagcacaggaagcaaatgcttcggaaggaacgaggactttgggagaggctcggcaagaaacgggccccaggtccggcaccagcgagtgtacaaggttctgccttccgagacattttgaggtagagccactttgaggagcctcctctcctgactctagatgcccagacaccgagccccgagtctctgcggtagcccacttaccctaagccgggatggcgcatgtcggggcgccacacactgcccacacaccccagcactcccccaagtgcgcatggcccacaaacacaccagggcccatggcaccagcccaagtccccgccagggacatccccctggcgccggcccccaacccccagggcgcgggcaatgcacccatagggcaccccccagtgcaaccggcccctcaccaccagagggaggcaacagcgccaccagagtatgactcaacgcatgctgtacctcgatctggatctgccggggccccaacgcacactccaaccatagcacagcagcttcacagccagatccccacaacctcatcagactctcttcacccatttttgatactatcttcccccaccccccgctacccctagggggatgcagagttataagcccccaaacaggtcatgctcccattaaaatgattctacctac

SEQ ID NO: 590889 - DNA, 373 bp, Homo sapiens
tattaagtgaagatatttcattattgaccatcaccctcaaagtactccaaatatccacttacagattctacaaaaagagtgtttcaaagctgcttaatcaaaagaaatgttcaactatgtgcagatgaatgcacacatcagaaagaattttctaagaaagattctgtctagtttttatgggaagttacttccttttccaccataggcttcaaagccctccgaatgtccattgcagattctacaaaacagtgtttcaaaactgttcaatcaaaagaaatgttcaactctgtgagatgaatgcacacatcacaaagaagtttcacagaatgcttctgtctagtttttatgtgaagttatttccttttccaccgta

SEQ ID NO: 590890 - DNA, 338 bp, Homo sapiens
gagcatccaaaatatgtaaaagcaagggtgggcgtagtgctcttgcctgtgatcccagcattctgggaggccgaggcgggcagatcacttgagatcaggagttcgagaccaccctggccaacgtggtgaaacccgtctctactaaaaatacaaaactagctgggcatggtggcttttttgcacgcctgtagtcccagctactcgggaggctgaggcacgatcatacctcactgcagcctcttgggcttatgtgatcttacccctcggcctcttgagtagctggaactacaggctaaatttcctactttggtaaacatcagtagtggccaggtacttct

SEQ ID NO: 590891 - DNA, 325 bp, Homo sapiens
gcaatcactggggccctagctctactctcaagtacagagttatggttgtgtgtatcgaatgacaccgttagtgacccgataccatgcactccacctccttctccataagatatgaaacctaacaagtccctccaagctctgaaatgctgtaaacttacacacactccctgtattctccccggcgtatttcttccgttccattgcagtggacttacaggttttgcattccttatactgacctagggactaatcctgattttctcatactcaatctatagccatagtgtggcttaccacagtcctatttcagtgaagcaggaactgg

SEQ ID NO: 590892 - DNA, 343 bp, Homo sapiens
atgttcgatgatctggctccgctactgtaggtcagggctgccatccttcctcttccatcactcgcagttacctgaagctcggcgtcgtgattgtttagggggcttccgatgcgatcgggcagtgtcagtcttcagctgctaatccgagaagatctgggaaggagtcactcagagagccttgggccagagttctaggggctctggtagctggctgcctggtgagttgaacagtctgattttcagtggggtcctacacagataggacacggcttaggaggaatcctgggctgcgggcattccttgtccctgtggccatatttccggcacttgtagcaagcttctt

SEQ ID NO: 590893 - DNA, 152 bp, Homo sapiens
atcgggtctgggcacgggtggagatgggagtgctagtgtgcggtggtggccttaggagttcatgggaggggtagattggccggggcgcgggggcgtgatcgccggcaaaggaaccgatgagtccggggctgacggatacacaagccgcttca

SEQ ID NO: 590894 - DNA, 298 bp, Homo sapiens
  misc_feature (84)..(84): n is a, c, g, or t
  misc_feature (95)..(95): n is a, c, g, or t
  misc_feature (100)..(100): n is a, c, g, or t
  misc_feature (102)..(102): n is a, c, g, or t
  misc_feature (114)..(114): n is a, c, g, or t
  misc_feature (149)..(149): n is a, c, g, or t
  misc_feature (152)..(152): n is a, c, g, or t
  misc_feature (220)..(220): n is a, c, g, or t
agtctgtcatattataggtcaagaaacaaaagctgctgtctagtcatgttgtcaatacgtttgggtcagacgggaaaagggagnaagaaggaagnagagngnaaatactaactntctggaaaacacatttggcttaactgccaaataangcnttgcggagaatgaaaagcctataatcaggatttaggtgtgcaataaaacacagctgacaccagaccantccttaaatccatccggacccccctttttagaaaagggattaaggaacagggagggggaagtgtgatccttgctttcc

SEQ ID NO: 590895 - DNA, 419 bp, Homo sapiens
ccccccaaggttaatatgtgggccctccctgaaaccataattccctaatgtcaaagaggtttttaaaaaagcctacaaatttaaccacaattaccagaattgggtagagggtatgaaacacagaatgcaacctatcacatctgaacaaagttataatccccagcactttgggaggcccaaggagggtggatcacctgaggtcagaagttcaagaccagcctagtcaacatggtgaaaccctgtctctgctaaatatacaaaaattagccgggcgtggtggtgggcgcctgtaatcccagctactcgggagaggctgaggcaggagaatcacttgaacctaagaggcagaggttgcagtgagccgagatagtgccattgtgctcccgtctgggcaacaagagcgaaactttgcctcaaaa

SEQ ID NO: 590896 - DNA, 344 bp, Homo sapiens
attaaatttttaaccaatttttttccctttaaaggaagaggccccccgcccccgtttggaatttaaaaaggggatggttttaaccttaaaaaaattttggttttgaaattttttttccccccccttccccaataagtctgtttaaaaaggtggggcccctttgggcccctccccaaaaaccccggccatattccatgttttttaaatggggttgggaaatggggaaaatttttttttaatgattttcccaaggcccccaaaaccttttaatgatttttaaaaaggattttttttcccccccataaaatgaatcgaaaaaaataaagttttttccctaattttcc

SEQ ID NO: 590897 - DNA, 343 bp, Homo sapiens
  misc_feature (132)..(132): n is a, c, g, or t
  misc_feature (203)..(203): n is a, c, g, or t
  misc_feature (219)..(219): n is a, c, g, or t
  misc_feature (289)..(289): n is a, c, g, or t
cactaataaaacctagttgagttcccaaaagatttggaccaaatttccaattcagatattattagagatcatcaaaactcaaatctctttactggtttacaccaaatcacccaagcttccagcctaaaaccnacatgctcacatggttccacagtgctgtttatgtacaataaccagttctcaaaatggtaatcctgttagangccagaaccctcagcntctagcatgtgtgcttttcacagagataagtctcaaagtttggggttggtgaggagcccagtatacaggngttccacattaagtcataattggctttgtgttggacagtgtatgtcagctggtg

SEQ ID NO: 590898 - DNA, 820 bp, Homo sapiens
cccggttctggggtgggtgtgggtataatactaagttgagatgatatcatttacgggggaaggcgcttggtgaagtaggccttatttctctgggtcctttcgtacagggaggaatttgaagtagatagaaaccgaccgtggattactccggtctgaactcagatcacgtaggactttaatcgtgtgaacaaagcaaacctttaataggggggtgcaccatggggagtgtccgtgatccaacatcggaggtcgtaaaccctatgtgttgatatggactctagaaataggatgtgcgcgtgtatatccctagggttaactgtgtcccgtgggctcaagttatgggactcaatggagtatagtagtctcgcttggacggggtgaagtcttagcatgtacggcctcggaggtggggtccctgctccgaggtcgccccaaccgaaatttttaatggcaggttgggctagtttaggacctgggggttggtcaggtacggttggcattcaataaattaaagctccatagggtcttctcgtctggcggggttatgcccgcctcttcacgggcaggtcaatttcacgggttaacaagtaagagacagctgaaccctcggtggagccattcataccaggtccctattaagaggaaccaagtgatcatgctaccttggcacgggttaggggtaccgcggccgttacacagtgtgtcactgggcagggggggcctctactacgggtgacggaacaggtgaggtatgtgcaaccaggggggtcaattgccgcatccttactttttaccttacctttagacatcgtttgtgttg

SEQ ID NO: 590899 - DNA, 358 bp, Homo sapiens
tcgcggccgcgtcgacgtgactttcgcactggaggagatcgaatacagccgtggctgcaagggattgagcaggctgagcaactggctggcgccgaggctgatggggaattcgtgcagcaggtccagtagttgccggccccagagccaatccttgagccgggcctggttggcttcctcctgcaattcgtccagccagggactggggcagagcccgcagacccggcgcaaaatctccggggtgatccgggtgatatccaggtgatcgagcagggcttcgcgcaatctcatcggcgccttgagcgtgaccccgctgtcgccggtcgacgcggccgcgaatttagtagtagtaggcggccgc

SEQ ID NO: 590900 - DNA, 772 bp, Homo sapiens
  misc_feature (81)..(82): n is a, c, g, or t
  misc_feature (121)..(121): n is a, c, g, or t
  misc_feature (124)..(124): n is a, c, g, or t
  misc_feature (376)..(376): n is a, c, g, or t
ggtggcgcgcgagaaggtgggtgggcctccatttatacagaactgcagcgctttcgtgttggctttcctcccattatgtgnncggcagtcgtgcgaatgggctccggagaagcggaaggcnccngtccggcgaccaacatttccgtggggcgcggggcgttggcccacgaggccaaggcgcagacttctacaagtgatttgtgcagtgataacggcacaagcggcggggccccgcgcttggtgtgctcacaaaggttttcccacagggaaaattttgtgctgcgtgtgttttccctgtgagggggattacaataagaagaggaggttgtttgggacggaagagtaccacgtgaggcggttatataaggaccaaggnggttaacccacaggacattcgcggcattggaaggaggagaattaaacctccctttaaaaccaaatttatattagaccacattaggcatctctccgtgtcagcgtctcaaacctagttataaatagggctaaatattgtgtggggcaagggatcctttgggcttccttgggcaatgcaaggctccttagcattcttgcatgtgtgggccaagaaaataggttatcgcttgtatgaagggtttcttctgggagcaccatgtttgagaaccaggtgtttgtcaccaggttgcttttggagatactttaaaatgatggtacctgtgttgttctaagctgcaatctggttcaccttccatccatgcaaaaatggtcaaattcttgaatgaataagtcaagt

SEQ ID NO: 590901 - DNA, 538 bp, Homo sapiens
ttttttttttggagattgttctcatttccaaaatcgtcagacaccgatttctctgcgcttttcttgcctggtgtcaggacagggaaaagctatgcaggagacatggcctctagctctgttcaaactgtcaattctgctggggacccttagataaatctgttaacctctctgccctcagtttccccatctttaactcgagagtgtagatctaaatgctagaagagtactaagggactcttccagccactttttggcagggatcagacttcggagagtgaactcagggagcaaagaggtgaaactggagcagtgtgagggttaaagggaaggcggctgcggtgccgagcaggggagcacgtcgggggtacagcaccagggctggaggaatcggcttgccacaggtgggcgacctgggaccctctatgtcaggtggtacatgctgtacccacatgggccgtgtagagtcccacgggcccacaagtgcgggcgcgctggaagggccagaggcaccgtagagcgaggcacccgccgcggtcgc

SEQ ID NO: 590902 - DNA, 661 bp, Homo sapiens
ttctgttagtttcgcggacccacaaatttggtgggggtccccttgggggtatattgtcctcccccccacatttgcgttgttgtgggcgcacttccccgccgcgttgttttgaggagctgtcgttcaaccccgctcgttgttggtagtccgcttggtggcacgattatgtttctgtcggtccatctgagggttcattgttatcgtcccaccgcgcgcggtctggttctgttaaaaaaaatagcgtctgtcgactacaataatgcgcttttccccttctcctccgtgcaccacacacggttgtccacaaccatttgttctgtcccctcaaggataacatgtgctgtgggatctgtcccagcagctgctgtatcagagcggttacaaggtaacaaccagggcgggtctgattctctcacctcgattagtacgtcttttcttggaggaaaccacttttcacgcacggttaatgatgggagcaccgccaacagagacggcgttagcgaaacgctaggtacttatgggtcaggtagttatatgacttggctatgcgttgttgtgctgtttaacacaccttgaaaaaggttaaattttttttaaccaaaattttttttccttaaacccaatcgccccccaaacaaaacaaaaaaaacaaacataaaaa

SEQ ID NO: 590903 - DNA, 880 bp, Homo sapiens
acgcggcgaaaccaaaacagtcgccggtggttcacaaaaccacctcagaaaatgcttccagaggcacgtctggcctccacaaggtgacggcttttcatgcctccgactcgaacttgagtcgtccacagcactaggccgccgccagccctggtgctgatgctgcctatgtgtgacctgctgtgactgcctgcagcaatgcatgctccctgctccctgccacaccctgcctgagccatgcctgctgctggaacccactcccccacctgtggtgccctgcctccctgcctgccagcctgcccactgatttggtctgacttgtgtgcttgccctgtcgctgatgatgaatgtgctgtgtgcctccgtgcatggccgtgctgctcccatttggtgcctgggtgacttgtgctggctgtgctgtgctgctgcgctgtggcccctggctgatgcatgtggtgaacgcctggttgtgcctgctggcttgcgggaacctgtggctggtgatgtgcttgcctggtttctgtaacctgtcggctcctcctcgacttgactcagctgtggcttgtgaggccttggtgatctggcatctgggcccgcacccgacgctgggggacctgctcgtgagatgtgacggcctggctgggtgttggcagtgctgggggcttaagaaaggacgcaaggttaccattgttgacaagatattattatgggcaagcttaagacgtaggaaagccattggatcaacccctggctctacattttctaaccctgttcatgtgtatggaccatgggaagactgacccaaatggagcacaagaatatcgcagccacaacaggcaactcccggggttgaacggaattaattgtatccatacccaggcaa

SEQ ID NO: 590904 - DNA, 1683 bp, Homo sapiens
ggcgcctgcggggaatcggaagccggtatggtgagtgtgagacaggttagactcgactctagggacagattcttcaagcaatcactatgtcaacagacacaggtgtatcccttccttcatatgaggaagatcaggggaatcaaaactcattcgaaaagctaacagcaggccaccattcagtcacccgtaggcaatcagcgggttctggcaagccaatttggctagcatcatggcattcatcatcaacactgccagccagccaaggggcacatccttcaccacatgtccaattccatcgtggattccacacattgctggtgcttgcacacagccaccaacaggtgctaagtggcagagtcacggcgcagccacactggcaccgtggtgggcgaactgcgggcttcataccccacattgtattcggaggcgaaactctcttggggggcccacacaagctttaaaggccattaacgaaaacgaacacgacagactttgtcttggtacttatggagcgaccttatttggcattgcgcaaagaggacgccttgttgtgcatatacaagacgtcaacacggaccttggttactttatacattatcacttatgaacaacaggttatcacccattacattacactctgtgttcggcgcaccacaattacacaacctacaacttgtcgtgggtaacatgcggttcaacaccgacatgtgggtataaagacatatgtggtcccactgtttatagggcaccattacatttgggggactttaccccttttatccttgtgggccacaggtgacacttctggcacttcgtcggcctacttgggaattcgacaaccgccagtcaatgcttagaacctacacgttgcggcaacctacacacgcttcatacacctataccacacctctcaaaacgtagcgtcacatttagcccaagatagggcaaccaaggtagacaccagtgtatgaacaccatatttttaaccacactccactgtgtgtattcctacccaccgattaaagcacgttcggacacactagcttgccaatagtggcactgtattgagcaacacagttgtggtacccaccacccgttactcactagtaccaaagattcaatagtccaaccgtcaatatggcacaccgattatacgtgtacgctacacacggagcaaacgcaatatcaccagcggggtcgcgccgaacgtcacatgagtgaacgaggcaatcaatcacccgcgtgggtaagtgccaggagccagcacacatgttgccgcgacacatatttgtggacacactgttaggcacatcacagcgaggacctaatgaaggcaccccaagtataaagacaacacagcttaacggcaataccacatggacaatgagagagacagggatcaggcacgaatggtaaaaaaccagtggtccaaaacaaagtgccggtgcagacctaccacagtgtacaaagcgcccccacaaagtgcaactaatctacgcgtggatcacaccacacaccaacaacggctacacaaacacagcgcacacacacatataccacccacagcggcacagcaaacccacgacacacagcaggacagcacaacacacatagagcagaacaaccaacagagacaactaacacaccaccacccagcagcggcacaccaaagcaacacatggg

SEQ ID NO: 590905 - DNA, 368 bp, Homo sapiens
gtacgcatatttttatacttttgagacacaatctctactccattgtccaggctggagtagcagtggcacaatcttggctcacagcaacctaccacctacccgggttcaagtagattctatgggcctcagccatcctagagtagctgagggttacagtgtgcccgccagccacacctggactaaattttaatatttttcagaagagatggggtttcactatggaagccaggctggtcttgaactctagacctcaagtgatccacccaccttggcctctcaaagtgcggggattacaggcatgagccactgtgcctggcccagagccccagcaattcataccgtcaccttgcgggtgaggattacagtgt

SEQ ID NO: 590906 - DNA, 136 bp, Homo sapiens
tctacctcctcaatattgaaagctagatctcataccaggccagatcctaccttctcacacattgaaagacccagatccttatacctgagcagaccggcctggcttgctcaggtctgataagggtaggttcactggg

SEQ ID NO: 590907 - DNA, 101 bp, Homo sapiens
tacaatttttggaaagagaaattctcaccttcatggggggaaaacaaaacaaatcaacaacaaaaaaccaacaaaaagggtacctacctttttcacaaccg

SEQ ID NO: 590908 - DNA, 427 bp, Homo sapiens
  misc_feature (145)..(145): n is a, c, g, or t
  misc_feature (158)..(158): n is a, c, g, or t
  misc_feature (201)..(201): n is a, c, g, or t
gctggcaggtaatgcttctaaggatctcaaagtaaagcgtatcactccgcgtcacttgcagcttgcaatccgtggtgatgaagagttggattctcttatcaaggctaccatagctgggggtggtgtgatccctcacatccacaanatctctgattggnaaagaaagggacagcaagaaaactgcttagagggatgctttangaccagaccctctttcctcaccctgtcattggtactggtaacgtgggacaagagagaaaataagtggggtatatgctggacatttttagacacacaagttaaaatggaaaaggcatagcacaattagctggtagcacatgtataaagagaaacatttggtatgttcttcagcactcgagagtttgtataaagagtacctttatcaatagtggtaaaagaaaaataa

SEQ ID NO: 590909 - DNA, 252 bp, Homo sapiens
tgatcagaggatcccgatatgctgctcaggtgaggataagggaatgactgatactcatgacatctagattgatgtgtgatctaacactgcttagatgtgcgttggctttctcttctttggattcacctattggcaataccttggtgggcaccaattataataacccccggtaatatccggttgggccccttctttttcaaaggtccaaggtggtacggaagttattttacccggttttgggaacggctatta

SEQ ID NO: 590910 - DNA, 498 bp, Homo sapiens
gatgaaatattgggtctcagacaatcaaagacagactgactctcactttgaagcaatgcatcaggctttataattaaactagtttagtcgcaaacttcttactatgaacctcaggacgttctgcaggtaacaactagaattatttgtgtggaatactaacagcccaggaaacaaacaaacaaaagaggtggacgtggagtcctgataagtaagcaacaatgaggaaagggccccaggttggggagagtaattgttctgagaaatggctaactgcaaacaacccactggtacaacattctgttcccaaatatcttgctccacatatagccctggcagcacgaccttatctgcacaccttatccacatgtagtcccctccagcacgaccctttaaaactgcctcttggcggatagccccttctctgctgtgctgcccattgcactctttcaatgtatcttcatgctttctctaataaatctgccttcctttactcaaaaa

SEQ ID NO: 590911 - DNA, 150 bp, Homo sapiens
agcgtctgagatgagagtattagtcagttttgttgtgagtgttaggaaaagggcatacaggactaggcagcagataaggaaaatgattatgagggcgtgctcatgaaaggtaatcacgctcttctatgataggggaagtagcgtctagtc

SEQ ID NO: 590912 - DNA, 439 bp, Homo sapiens
tgctggctcgtactctagaggtatccccccgcagctgggcgcttggcagtgtggtgccagacatgtgaagacggcgtccgactgcggggcagttgaagcactgccgtgccgcaccgtttggaacaagcccacagtgaaatcccttccctgcgacatatgctaagacgttgtccccgcagctggtgatatgctgaaggacaacgccactgaggaggacatccttgtccacttggagaagacctgtgactcggtttccgaaaccgaacatgtctgcgtcatgcaaggagatagtggactcctacctccctgtcatcctgggactatcattaaaggagaaatgagccgtcctggggtggtgtgcgctgctctcaacctctgctagtctctccagaagcacctggcagagctgaatcaccataagcagcttgagtccggtaag

SEQ ID NO: 590913 - DNA, 143 bp, Homo sapiens
ccggcgagctgcttaagaagactatggtgcagagaatgcagctgtcttctggcgatgaactgcgggggagtaacagggaaacaacctggccctccagcactctcctctgctattcagcatcccctcctccgcttaccttccta

SEQ ID NO: 590914 - DNA, 128 bp, Homo sapiens
agcagtagaaaaaatggaaagaatctaaatgctgtgagtaatgaaatggctaaatatagcatatttgaacatgaattatgagacaactatcgtcaaagatgaacttaattctctatgtttatagctgg

SEQ ID NO: 590915 - DNA, 1273 bp, Homo sapiens
taggggggggcccttttttccccgggggccccacacaggggggacgaggagacacacccgggggggccccccccccccccgcgaggagaacaacaaaacaccttaaacaacactctctcgcgaggggggggcgacacaaagagaggggagagagggggcgcgcaaagagaggtgctgtcttctttctacaaaataaaacacaacactatataaaaaagagtgattataagggagagaaatatatataaaaaaatatgggtgtgtctaatattatattatctcacacacaaaacacagaagggttctctcctccccccgggggggaccagtggggagaagaagaggagagggcgcccttcctctctctctaagaacaaaagagagaggggggcggatctctatgagagagagggcggagagaggaattatccgagtgaaccacagaggagactctctctatataataggggaagggcactctctaagaagaacaaacaaagaagggcggacaacaagaacaccaccggcgcgccccaaaagctggaaaacacgtgggggagaaaaacaccccacaccccacccagaaggagggggagcacaccttccgcgcggcgcaccaactcaaacaagctctcgcagaggaactacatgcgcaccaaaaaacagatacaacacaacaaccacacacagaaaaaacacacaaaacaaagaaaaacacaaaacaaacgcgcgcccgcaacaaacaaaccactgcttgagtatacacagcgccggcgaacacacacaaagctcgtgccggcaaaaaacaaggggggtgaaagacaccaacaaacagaaccaaaaacagcgcgcccccacaaaagacaaactggcacgggcaaaccaaaaccatagaggagacccacgacaaacaccaaaaacaacccccaacagaaacagagccacaaagtcagtcaagaagcagggcaacaaacagaagaccaccagaaaaaagcggacaaacaccagaaaagaacattattcccccccgaaggaagacaaacgaccaacaaacaacacaaaggagcaggcgaagccacagaagaagccccatccagaagacaccagacaaaccacccagacaaaagttggcgcccacacaaccagctgagcgaaaagcgaataggagccaaccaccaaaaaagagacagacagagactggagcaaacacacacccccacaaaaagagcagaacacgcacacgagcacacacacaagaacgcgcaacaaagaa

SEQ ID NO: 590916 - DNA, 1442 bp, Homo sapiens
tttttctagtaagaaaataactcattctttcctccaatatgggatggagtaagagaacatttgttttaaatgctagccaagggtttttcattgaaattaattcaataaacacttaaatgtgtatcatgctggaactggggacacacagataaatatgacaaaatcctgtcctatttaaaattaaacaattctgttgatacaactagttgttaagttgtatctctaactcatgccaatgtattttagatgactaaagacttagatgtgaaagttcaaggtgcacacacacccaattcaaccaacccctaaaaaattagaagtaaatgtttatgaaaatctgaacaagaaagaatttctgagactggaaaacagaagaaattacaaaggaaaaggcatgtaataatataaaattaaataactacagtaaatgacataaaaattttgttaaaagtaaaaaacaaaagtggattaataatcttaatagataaaacgtccatagaaagtgataaagtaacactgaaacttcattattaagtaaatgtaaatattcagctgcatatcaaaagacaacagccttatttttaaagataatactgtgcctgcacagatttgggataacaaacatttgtatgctcttctatggattagaaaactcatgattgaaaatacctatcaaaagacctataaatgatcattcctttgatatcaaaacacattacacttccagggatttattttaaataatcctacatatatgaaaaaaatcaatggacaaagacatcacaggatacaaaatcaatgtgcaaaaatcactagcaaaaagtcactaacattcctagacaccagcaacagtcaagcggagagtcaaatcaggaatgtactcccattcacaactgccacaaaaagaataaaatacttaggaatacagctaattagggaggtgaaagatctctataatgagaactacaaactactgcccaaagaaaccagagatgaaggctgggtatgatggctcatgcctgtaatcccagtactgtggaaggctgaggtgtgaggacttcttgagcccacaagttcaagaccagcctgggcaacacagtgagcccccatctcaaaagaaaaaaaattttaataataaaaagcaatcagagatgacacagacaaacggaaaaacactccatgctcatggataggaagaatcagtattgttaaaatggccatactgcccaaagcaatttatagattcaatgctattcctattaaactaccactgagactcttcacagaactagaaaaaaatatttcaaaattcatatgaaaccaaaaaagagcctgaatagccaaggcgatcctaaacaaaaagaacaaagctggaggcatcacgctacccagcttcaaactatactacagggctacagtaaccaaaacagcatggtactgat

SEQ ID NO: 590917 - DNA, 392 bp, Homo sapiens
gaaaacagcattcccttgtgctatattctcagttactatggcattcgctaatctttcctaacaggactattttcctgaactgtaaaaattctcaaacactgcatacacagagaggataggagacatggcatttgcggataggaaatgaggaaattttgcgataggacagctgtagatcctgttgcggacacccagccgggcagttggaggcggggtcagtccagaagccttcagataacaccagggtgtagtcctggcgagaaatcttcagttgcttcaggaccttttctagccccacgcgacggctaggtcctccgtgagagaaaactggttcgagaagcatggccaacattcccaatgatccgtgagtattgagaagttctccatgttct

SEQ ID NO: 590918 - DNA, 934 bp, Homo sapiens
gcggcggagtcggtttctccatcttcccccctccccttcccccctcggagtttccctccctccctccctccctccttcccagtctgggcaccggagcctgtgaccgcttcgttagtggagaggtagctggcagtccgcttcggcgggcctgtgccccgcgccgttctcggggcctccctgctgagctcgcggctcacgctgagagggacacgcagtgacgagcggccgaagcagctttgcggttttgtagtgcatccctgagcatgagcacagaatgaagcggcgtttggatgaccaggagtcaccggtgtatgcagcccagcagcgtcggatccctggcagcacagaggcttttcctcaccagcaccgggtgcttgcccctgcccctcctgtgtatgaagcagtgtctgagaccatgcagtcagctacgggaattcagtactctgtaacacccagctaccaggtttcagccatgccacagagctccggcagtcatgggcccgctatagcagcagttcatagcagccatcatcacccaacagcggtgcagccccacggaggccaggtggtccagagtcatgctcatccagccccaccagttgcaccagtgcagggacagcagcaatttcagaggctgaaggtggtattcagctctttttcttgggtcaaaaaatttatctttagcaggaaatactggttgcagcttgttggttgtggtggtacaacttctaacctgagatactagctgtcgaatcacaagttttaccgtttttgttttgtgaaatttgcttatgtttcctatcttggcatcagtgcctgatccagagaagaatatactcaaatgtttgtggactgtatgaatgcatgtcggtcaaatgttatcaggattgtggggccattttaatacaaaataaaccttaaaattcaaaaaaaa

SEQ ID NO: 590919 - DNA, 876 bp, Homo sapiens
  misc_feature (35)..(35): n is a, c, g, or t
  misc_feature (38)..(38): n is a, c, g, or t
  misc_feature (47)..(47): n is a, c, g, or t
  misc_feature (49)..(49): n is a, c, g, or t
  misc_feature (51)..(51): n is a, c, g, or t
  misc_feature (54)..(55): n is a, c, g, or t
  misc_feature (58)..(59): n is a, c, g, or t
  misc_feature (61)..(61): n is a, c, g, or t
  misc_feature (64)..(64): n is a, c, g, or t
  misc_feature (66)..(66): n is a, c, g, or t
  misc_feature (68)..(69): n is a, c, g, or t
  misc_feature (74)..(75): n is a, c, g, or t
  misc_feature (82)..(83): n is a, c, g, or t
  misc_feature (90)..(91): n is a, c, g, or t
  misc_feature (95)..(95): n is a, c, g, or t
  misc_feature (100)..(100): n is a, c, g, or t
  misc_feature (120)..(120): n is a, c, g, or t
  misc_feature (137)..(137): n is a, c, g, or t
  misc_feature (226)..(226): n is a, c, g, or t
  misc_feature (366)..(366): n is a, c, g, or t
  misc_feature (431)..(431): n is a, c, g, or t
  misc_feature (486)..(486): n is a, c, g, or t
  misc_feature (508)..(508): n is a, c, g, or t
  misc_feature (538)..(539): n is a, c, g, or t
  misc_feature (556)..(556): n is a, c, g, or t
  misc_feature (562)..(562): n is a, c, g, or t
  misc_feature (587)..(587): n is a, c, g, or t
  misc_feature (591)..(591): n is a, c, g, or t
  misc_feature (632)..(632): n is a, c, g, or t
  misc_feature (685)..(685): n is a, c, g, or t
  misc_feature (707)..(707): n is a, c, g, or t
  misc_feature (713)..(713): n is a, c, g, or t
  misc_feature (715)..(715): n is a, c, g, or t
  misc_feature (732)..(732): n is a, c, g, or t
  misc_feature (748)..(748): n is a, c, g, or t
  misc_feature (776)..(776): n is a, c, g, or t
  misc_feature (804)..(804): n is a, c, g, or t
  misc_feature (812)..(812): n is a, c, g, or t
  misc_feature (815)..(815): n is a, c, g, or t
  misc_feature (862)..(862): n is a, c, g, or t
taagctgagaagggagagcgagcttaggaccgccngcncggggcaancncnaannaanngnganancnncaccnncccgcgnnaaaaccnnacgnagaangaagagcgcggcaaagcccngggagaccaagccaaangagggggcagcggcgccaaaaagcgcaaggaacccccgggccaggaggcccaggagggccaacgggccgccaagggcggcaagagggcncaggggggagcggaagcgggcagcggacaaccccgccccggcgcagcacccggccccccccgccccaaaaagcaaaaagccgcccaggcggaggaacagaagggacaggcggcccccgaccaggagccaaacgcgggcgngggcggccagccaacaagaccagaggcgacccacccagccaagggacagcgcccaccacccagcnccaacgcgccagcagcaccaaccagacccagcagccccaacccagcccccgcccngggggagagggcaccagccgcncccgagagggcagcagagggcggcccgcanngaggagcagcgcaagangcccangaaaggcgaggcggcagaaaacgcnccanctccaaacagcgcagcaaagccgcttccagccaaatcgagngcagcaccagaaacccccaagcccagcaagaaaaggaccaacaaagcgcagangcacaaaaagctagcaaacgcntcaaantnacagcaaaagaaacccnggaaaaagctcaaccnggagcaaccccagcccaagctaaaaccnaaacgggcgcccgagcgcaagaagcagnccaacgcnagnagcgccctcgggaaccccgcggcccaaaaacacccagcgcccaagangaaaccacaaaatc

SEQ ID NO: 590920 - DNA, 262 bp, Homo sapiens
ccgcgtcgacgacggacatggaagagggctggggtgatggtgaatagagagcagatatgggcatagccttaagactacagatgctaacgggagagccctgtgcttaccagacataggactattctcctcctcctccaagaagtggccttcctcggtgtttcatgaaggattttgtgtatgtgcatgtgtgttcacatgtgtgcatgttgaaggccagctttcagaaatttttagattttgaaatatatatttatgtcgacgc

SEQ ID NO: 590921 - DNA, 1393 bp, Homo sapiens
  misc_feature (1345)..(1345): n is a, c, g, or t
gcggcggagtcggtttctccatcttcccccctccccttcccccctcggagtttccctccctccctccctccctccttcccagtctgggcaccggagcctgtgaccgcttcgttagtggagaggtagctggcagtccgcttcggcgggcctgtgccccgcgccgttctcggggcctccctgctgagctcgcggctcacgctgagagggacacgcagtgacgagcggccgaagcagctttgcggttttgtagtgcatccctgagcatgagcacagaatgaagcggcgtttggatgaccaggagtcaccggtgtatgcagcccagcagcgtcggatccctggcagcacagaggcttttcctcaccagcaccgggtgcttgcccctgcccctcctgtgtatgaagcagtgtctgagaccatgcagtcagctacgggaattcagtactctgtaacacccagctaccaggtttcagccatgccacagagctccggcagtcatgggcccgctatagcagcagttcatagcagccatcatcacccaacagcggtgcagccccacggaggccaggtggtccagagtcatgctcatccagccccaccagttgcaccagtgcagggacagcagcaatttcagaggctgaaggtggaggatgcgctatcttatcttgaccaggtgaagctgcagtttggtagtcagcctcaggtctacaatgatttccttgacatcatgaaggaatttaaatctcagagcatcgacaccccaggagtgattagtcgtgtgtcccagctattcaaaggccaccccgatctgataatgggattcaacaccttcttgccccctggctacaaaattgaggtgcaaaccaatgacatggtgaatgtgacaactcctggccaggttcatcagattcccacccatggcatccagccacagcctcaaccaccaccccaacatccttcccagccttcagcccagtcagccccagctcctgcccagccagctcctcagcccccacctgccaaagtcagcaagccctcccaactgcaagcacatactccggccagtcagcagactcccccacttccaccgtatgcatccccacgttctccgccggtccagcctcacacaccagtgacaatctcgttgggaacggccccatccttgcagaacaatcaacctgtggagtttaatcatgccatcaactatgttaataagatcaagaacagatttcagggccaaccagacatctacaaagcattcctggagattttgcacacatatcagaaagagcagagaaatgccaaggaagctggaggaaactacactccagcattgacagagcatgtnccccgtgaaatggcagcagagaccagcaagtggctcatgggtgagggg

SEQ ID NO: 590922 - DNA, 359 bp, Homo sapiens
cgtgaacaggactagccctaagtaagattgtgaggtagaacaggtagtatcggatgtctatgcttacacttcccgtagggtcccatgttatcaaaccctgttctggcctgaatcccttcaagtaacatcccaggaagttctggcttggaggaacccaggaacttggctactgtcttctcattctgacccaccaaaacctgtaccctgcaagttcttagaaaacatctgaaaaacaaagcatactctgatactaacctcatgaaggtacaagtgcattcttctcagggctatttgtgtttaagcactaaactaaagatgccactccttatcatatgccctactaccatccttatacaagc

SEQ ID NO: 590923 - DNA, 109 bp, Homo sapiens
catagtagcaaccgtgcactagtagccaaccagtgactagtagtcacccgtggactagtagccaaacgctggactattagcctaccgtggaatagtagcgcaacgtgga

SEQ ID NO: 590924 - DNA, 103 bp, Homo sapiens
tgcatattaaaattaccagcttcagttctggtaaaaattaccatgtccccttaatttctgcgatcagaattataaaaatatgagctcaacatacgttatggtg

SEQ ID NO: 590925 - DNA, 723 bp, Homo sapiens
tagaggacccccgaggggtcctgcagcttttctaatttaaccttgtcaggttaccaactactaaggttgtaggctcaagagggtgtgtcctgtcgtaggtaaataactgacctgtcgagcttaatattctatattgttgttctttctgcaaaaaagtggggaagtgagtaatgaaattatttctaacatttatctgcatcataccttccgagcatttattaagcatttcgctataagttctcgctggaagaggtagttttttcattgtactttaccttcatctctgttcattatcatcgcttttaaaacggttcgaccttctaatcctatctgaccattataattttttagaatggtttcataagaaagctctgaatcaacggactgcgataataagtggtggtatccagaatttgtcacttcaagtaaaaacacctcacgagttaaaacacctaagttctcaccgaatgtctcaatatccggacggataatatttattgcttctcttgaccgtaggactttccacatgcaggattttggaacctcttgcagtactactggggaatgagttgcaattattgctacaccattgcgtgcatcgagtaagtcgcttaatgttcgtaaaaaagcagagagcaaaggtggatgcagatgaacctctggttcatcgaataaaactatgaatttccgcaacaaatcactaatctgtgatataataaacat

SEQ ID NO: 590926 - DNA, 596 bp, Homo sapiens
  misc_feature (45)..(45): n is a, c, g, or t
  misc_feature (77)..(77): n is a, c, g, or t
gttggcttcattctgtacagtgatcctacatagtaacctgtgctntgtctcctatccagtcttccatgtctatcaanagttctgtgagtcgcttcctggtaagctggctctagtatcatgtccaagcctatattcatctggtagcacgcagtaattcttcacatctgtagttggttgcatcatgtccatatcacgtgtatatatagatcacatgtcctgccatagtagacactcgcgtccagacgagttgtaatcgtcggtcgcatcctacgtatgctgtattcatgtcacagtatactctatacggtgtgcatgaactgtcaggttgtatgagatacatgtcagatgtgtctcctcctgtcctgatgatctcctcacattctgtgccagacaccacaggaatactgcgagtgacagtgtattgtgcttctcaggttttccagtattgaacgaagcacacgaaggttagtttggatattactattcacagtctcatctatatataattggtgcttttccagttattaggagtactcattgtctacattttcattatctgttacatgcgtctgcctcgtctcgtgccgaattcctgc

SEQ ID NO: 590927 - DNA, 345 bp, Homo sapiens
gtgatgtcgatctagaggacccagcggggaacattcacttgacgggtggcagaggctgtagtgagccgagatcccgccactgcactccagcctgggtgacatagtgagactgtctcaaaaaaaaaaaaaaaaagccaaaaaacccccaaaacaaaccatagtgggggttttaaggattccaaacccaaaagagacgttggaggatgtgtataagacctttcttgtgtgtataacccccaaagtaaaaagcaaatttggacctcacaggggccttgagatcctggtgctaaggggtctaataatgggatggaaaggtgcattggggggggcatcctgtggggtggg

SEQ ID NO: 590928 - DNA, 160 bp, Homo sapiens
tcttccagtcttccagggtctcgatgtagttcagcccgtccacgccctccacatgcacgttgcgcacatcgctgaccgcgaagtagctgtgcagcgcctggctgatgctcacgctttcagtgtccaggttgtggctggtgaggctgatgtgcagttgctg

SEQ ID NO: 590929 - DNA, 387 bp, Homo sapiens
aggaggagtggggcggggtggcgggggaaaaacaaccgtgctgccaggtcacccagacctccagacagccggctagcccccctggccgttccttttacgcccaagttttgctccctgaaagcagattgggtgatggccctgcaaccccaggccaaggtttgcctcaaagaccgagtgacattaaccctttcccccctcctaggtttccatccagggctgtgttttccttgggggaggagatggggtcgttttgatcagggtaaggcagtcaggcgggggttcccccctgcctttttttcctttgagggtgagaaccctgaacccagcccctgcccctgggtccctgttctggaaatggtttaattaatccttttccctttttgaaaa

SEQ ID NO: 590930 - DNA, 486 bp, Homo sapiens
  misc_feature (400)..(400): n is a, c, g, or t
tgaggacccttatctttgggacggcgtaacaatttcattttgtaggcgaatcaagtagctgacgagagcggtagccagaggcccaggcccgtcgtcgtggcaagaggatctcaaactcagtgtccagatccaagtcagtgctgcagtagtctttgggtaggttgatctcaccgttcgtctcaagcgatctcctcagtttgttccatgtggacagaaagactgtgatcctgttgtgaagcagctgcctcaacccatctgagctgtgcttgttgaggaagcctctgatggagctgtattcaacttgctggacgttctggaactgcttcactagatccctttgcaaggccaaaatctcaggcaggaactttaccagcctcagctctgtttccttccgcagaanatgccagaggatgggcactctttctttgccatttttctgtcccacaatgtgctggaggtactcaactgtcgccgtcccaaagccag

SEQ ID NO: 590931 - DNA, 259 bp, Homo sapiens
  misc_feature (135)..(135): n is a, c, g, or t
  misc_feature (210)..(210): n is a, c, g, or t
gcatgccgctttttcacaaatttacagaaccgtaatactgcaaacagggggggcgcatggaagatacaagcttctccggtcagctcccggactcattgtattttgagataggctatcctggcctcagcgtagatngtgcccttacgtcgacttaaattcttcatttgcgtcctggcctcgttcgtccaagtacttccttgagacggctcngcctccttcgctctgcttgatacctcctgcgctctcatcctgctaatcc

SEQ ID NO: 590932 - DNA, 81 bp, Homo sapiens
tcagaacccagggactcagctgtgtacttctgtgccagcagctacgttacagggcaggcaaatcagccccagcattttggt

SEQ ID NO: 590933 - DNA, 371 bp, Homo sapiens
ccgaatcgccggaaaaagaatcggctggtcgaaaagtcggcgcgccgacctgcgacgccactaccaggtgctgtcacgcctgcgcatctggctgtcagaccgcgaggctgcggcgttcctgtttatcggcatgaccgcggccttactgttcgtggttgcgatcagccaattggccatgtccccagcggtgaaggccggccacatctacgccgtcatgacctatctgtggaccttcgtcaccagcctggacgaagcgccaggcatggtcgaccaactggcgcggctcaaggacattggcaagcgcgtagacccagggcttggggaggcctgagcctcaacgaaaccgatccacctcatgacgcaagcctgcg

SEQ ID NO: 590934 - DNA, 1732 bp, Homo sapiens
  misc_feature (268)..(268): n is a, c, g, or t
  misc_feature (391)..(391): n is a, c, g, or t
taatgttaggctgattaataagtgctggcttggggcagttacacagttggtttccaatgaggagtttatttgtgcacttttgacacattcacgtggtactgtggccaattatagaaagttgtgctcagtggcacaaagaaaacacccacagctgtggcctgtgccacgagccacaccacaagaacaccagaacaaagtggctagcattgaacagtgagaggacttaagaggtggtggggtgttatatctcgctttattataatataanagaacacaaaacacaaataattctctctctcgagccgagtgtcttatacaccaagagacaccatctctagagacaatcatcacacaatttcaaccagagtgtgttctgtgtgactctccgagnccgctgtgtgtccccattttttcctctccagagagagacacacagagagtgtatatggcacacacacagtgtgtaacagccacacacaacacgcacaattctctgtgtgtacaaacatttacctcatatgaaacacccttacaaacatttgtgattataacacatctctataacacttctctatatataacagattgtgagcgcttctttataaacaccaattctctacatatcatctctacagagagggccccgtgggcttttatagtgtggcaccatgtggctatattctctctatcacccgagagaaaatatatatcaccgccaaaatatatcccccctctcgtgtgtcgaggtatacagcgatgtgcctctcacagttttttgaccccaccccaacgactctcttatatgtctctctatagaacccttatttgtgtgtgcacccacggtgtgtgtgtctctttgtgtataaaaaaccgcccaaagatgcccccgcgtgggaagacactccaaagtgttgaaccggtgtcccataagatattaaccccggtgttgtttccagcccctgtggggtcataaccacctactaataatctcccccgatgttgtggtccccccagccctttatctctccacgaagagaagggggtgttgtgcggccgagtgggggcatgatataaaaccccccaacaagagggggtgctcctctgaaaaggggggccccgataaaaattcccccgagagattattcaccccacatttcttatataaggaaacaccccaagagttgttcccccgtgtaggaggcgcaccttctaaaaatcctcccaacaacaaggtggaggacatggccgtctttatagtgtcgcaaaaaagcccggaatgagtattatggtgtccctccaacacaattgtggggggggcgcccccgcatgtaaccactgggaagagagggggatttactgcccccatttatagacgacaaacagccaccgtgtatatattctccccagaaaaacccccttccatttaattggattgcttttgagggaggctctcctcacacatcttaaaaagcgatgcttcaccaacgaacacatcaatcctcgccggagtgggtggtggagcacaaccctccgcgtcagccgcacctgacgtcgaaaccccctttatgtgtacttctagcggaagaacaggagacagtcccctccgcgcatatacaaaacgtctctgttatctaacacaacgggagtagtttatctacccaccggatgatgtcccacactagaaaacgaacgactttcgttttccagcccaactatctcttccatgataaca

SEQ ID NO: 590935 - DNA, 1060 bp, Homo sapiens
acgaccacgtggtcgcgccctctcgctctcttaagcgtacgtaacagctgggctctaacgtatcataccgatgcgccctggtcggtgacctacagcatgttatacccatgacctattgtgcagccacgtgccccagtttagaatcaatggcatcacagcaggtgtgactcctccgctgtcttacataaatgatacaagatctaggccggtgtactattcgtgggactcttactgtgtacatgcgccgagagtgacttcgcggcatggccatgaacggccgggacgccatgcaactaggagacgccttggcaaggtgctgtaggggtatgagatttgccgtccgatgagtaagttgccgagtgggctctcagatacttgaagcaaggctcatggaggcgattcccatctaattgatatgtaatctcggtgccttctgccaatggtatcccgcgagatccccttttcgcgctattggccccccatagagtctagcgcctgtttggtaaaatactgacgacggttttctcacctgtttacccttcgaataagccggtgtacgaagacgcaactcccgagggcatcacgccgtgtaacacctggacgcaaactgggaccactggtctgagccacgacccaagtaaaccctttgagatacgtgccattgaagtttatggaagtactaccccttcaatggggggaccgcgcacttggtggcacccccctttgtgtcttcgtcggccttccacccgggcgttgctcccagtgtcccccaagggcttcaataattacgctgctcgcggggtgctaccccgagggagggccctacttgtggagcgcacatcggcgggcgtccccactcatcccgcctctggctggtgtggctgcagtccctgagttggcccgtgacctacctgtccggcctattgccctgtcccagccgtggcttccgcaatgggcccctgggcacgacactcgcctccggcgctcattctgagtggccctaacgcttgtttcgccttcttcttgcacccttgggcggtcccccgttttttcttcgcgc

SEQ ID NO: 590936 - DNA, 151 bp, Homo sapiens
acagtcattccagtgataacaatctgtcataaagaccctacagaagcagactcccctgtggagccttgaaagaagcaagcaccacagaattctccacagctgcaaggaaaatgaattcaggccaggcgtggtggctcacgcctgtaatccc

SEQ ID NO: 590937 - DNA, 183 bp, Homo sapiens
tactttcacagggaaggaagtttgaagtgtagatagaaaccgtacctggattactccggtctgaactccagagtcacgtagtgagtttatctcggttgatcaatggaacctttaatagcggctgcaccatcgggatgtcctgatccaacatcgaggtcgtaaaccctattgttgatatggact

SEQ ID NO: 590938 - DNA, 334 bp, Homo sapiens
  misc_feature (299)..(299): n is a, c, g, or t
  misc_feature (307)..(307): n is a, c, g, or t
ggaacaggttggtgacggtcagttatagaagtaaagctgtagatggagatgtggtgttgaagtctagagggatgaggtgtgggaaggtgagagacaagaagaagcggataaccctgaagattgatcatcgagactgggaagatcgaggtggagaagcctttgcatcggcaaggagtagggacagtgacatctttctttgagtgacggtctgtgcattgcctgtagtccggcacagggctctgagctgcactggcccgggtgctggcatcttggtggagcggacccactcccctcacatnccacaggnccatggactcacttttgtaacaaactc

SEQ ID NO: 590939 - DNA, 1164 bp, Homo sapiens
tggggatggcgtgctgtcttctgcgcgtcgcttgtcgcgggcggggggccctcggggcctttcctggtgagtggccctggcgttgtgtatatggtaccttgctgtcgctgtccggatgtgtcgaccgcggcgtggtgggccccctgtgtgacgtttgtgtgcaccgtgggcatgtctgtgcgggtctgctagggcggttctgtgcatgcgggcaacatgtgtgttcagttgcatggggcgattttatgccgcgtaggtggtttggttggtgatgtgttctaccggtggtccgccgtactggggtcttgcatgttaggactgcggggccttatttctcccggtgggcgctagtggcgtctgttgtgatgcctgtggtcgcgctgagagatgtgtgtgacttcgatgtggataggggtatagctcgcgcattgcttccctaactcgtgcagcagggtgtcagcggagttgacattgtatgtgtatgttatgattgctaggtcgggcgcgtaacgagatggggtacgtaacgcaataatgcgtcgaatgttgtagaagtagctggaaactaggtatggtaagttgcgaagagtatgttcacagattcaatgatatgtcctccctggaagagcgtggactctagattccgcctcccctgtgtagtgtagtactaggcttagtgactgcttcgatagtatcagagacagacagtgacagtattgacttcagaggctaggtcatgaataggtcactgcatcttcctttgccgggtctctttttcattcattttcggggcttggagcctggggaacgcctgcttccgtgttttcaggacactcaagcagcctatggagagatccagtgtgtccaggaactgttgtgtagcctcctgaccggcatgccacggagtgagtcacgtgtggaagtagatccttcaacctcggtcaagcctttggctgactacaacagtcatgagtagacccagtaggtaggacctacctgagcttagccactcctggatatcctgactcagaaactagtgtaagatgacaagtacttgcgtgtaagccactaagctttgcgggttatttgttacacaagctataaataactaatatatagggtaaaaggaaaaacagtaaatgaatgatacgtcctgtacgtatt

SEQ ID NO: 590940 - DNA, 369 bp, Homo sapiens
  misc_feature (112)..(112): n is a, c, g, or t
  misc_feature (141)..(141): n is a, c, g, or t
agttttttttggtggttttggctttcggaaaaattccccaaaaaactaggaggctgggggtaacggaaaaaactaaaaaaagagacattggttgattccctttaactggtgnagtaccatcccataaagggtcaccctggntgagcagaaaaagaaaaaaaccccaataatcaaatctgtataatgtctattattatgaagaattgccaatcttgttttaagcaaatgcattctatcgttattataaatgttagttctagctctatttacttctaatcttaaatcagaataaattaatattgtattgctgctgtgcgtggaaaaagacgatgtttatgttcttatagaataaaagctgtggaatgaaaa

SEQ ID NO: 590941 - DNA, 507 bp, Homo sapiens
gacgacagggcgactcctccctgatagccgacagtggtcagatctcgtaacttcaccgagtcagccggatgactggtcaaggtctctggacttcagtgactcgacgaagatcccggtcaagagcatccccagtgagcagaaggcgatccagatccagaacgccaccagtaacccgccgtcgttcaaggtctagaacgccaacaacacgccgccgctcccgttctagaactccaccagtgactcgcagaaggtccagatccaggactccaccagtaaccaggaggtgatctcgaagcagaacttcgcctatcactcgcagaagatcaagatccagaacatctccggtcacccgaaggagatctcgatctcgcacatctccagtaactcgaggaaggtcccgctctcgaacctcaccagtgacacgccgccgctctaggtcccggacacctccagctattcggcgccgctctagatctcgaacgccactgttaccacgcaaacgttctc

SEQ ID NO: 590942 - DNA, 354 bp, Homo sapiens
aaataaaggggggggaagtttttaagggcttgttttgccctcccgtcacccctgtttttggcccccggaatccccaacatgcactggtgttgtgtttttaacatgtcaatttgtccgttcacatgtttggtacatggtgtttttggccttggctgacatgaaacttttgtttggggttcgcttttcaactaatggttttgtgatcaaattgtgccgtactttgtgccttttgggttttaaaagtttttttttttgccttttttcaaattttcccctgtttgggtggaaattaagactttttgtagtttttatatgttgtaatattttttcaaataaatttttccttttacccca

SEQ ID NO: 590943 - DNA, 302 bp, Homo sapiens
ggggcccggctcgtagaggtgcctcccgatcgttgccgctttctactcgcaccgtgcgctgatctagctgaggacaccaacggccgcaactcccaggggataccaatccggatcggggacggcggcggcaccactggagggagggcgctgaagctctcgccggaagcagaagcagtaacgggagctgcgcagatgccaagtgacaagaccattgggggaggagatgattacttcaaaatcttcttcagtgagaagggggatggatagcatgtgccttgtggagtgtttgtagaattggaacc

SEQ ID NO: 590944 - DNA, 400 bp, Homo sapiens
gccctgtgcccatctcgcatgctgcggtgccgcagccccttgcgtctctcccagccccacaagccaggactcaaagctctcccagtgctgcaagacacccagcattgctctaaatctgcacctggtgggctggcaagggacgttctggggacagattgaccagcctttcctcctttccccaaagcctcaccagcatctggctggcccagctgctttcaccggaaggtacccactatccccttgcacttggatttcctctggaccttgctctgaaaatccagttcacccaggccccgcttttgcgtgatcaacccctctcatctatcaagtctggccttccaggcctacaaagcaccccttccagaaagcttcccccagtaaccaaaaacctggggatcct

SEQ ID NO: 590945 - DNA, 229 bp, Homo sapiens
aggctgggtcttttcttttttctctttttctttctctttccccttttctttggtcatattctttaacagctttgtgctgttagagccactatttccattggttggattccctttaggtgtggtactagaagctttattaacaggtttcacaccaaactgagattctctcccttgatttatcagtctcctccagtactggtttcatccgatggaaggttgctaggggggg

SEQ ID NO: 590946 - DNA, 412 bp, Homo sapiens
agctcctcctcagaaacatcttccaggcaaaaaaaagaaaaagaaaaaatcatttgctcacctatcgacaatagaaaatccagggatcttttgcattgtataaaatttggctcagagaagaaaaatgatgtattgaaaagaagatgaagcttcagttgccatttgagtggtggaaaataaatttgctttcggcccttaaaatggaaataagtcgatagaaaaatgcaggcctgcccccttttgagtcagcagtttttttggttgatgaaagggtgagaagacgtgctcactggaagtcacccgctggatcacttaggaagccgcagaagtgccgaaggacatgcatgtgtatctttcaaagttctcaactgatttattaaaaaaaatcataaagcagacttttgaaaaacct

SEQ ID NO: 590947 - DNA, 208 bp, Homo sapiens
  misc_feature (90)..(90): n is a, c, g, or t
  misc_feature (174)..(174): n is a, c, g, or t
gtcttcttgcctgccctgtgtcgtaaaaggggacgtccaacaaagagaccacctgtccttcgagcaggagttaacaccgtcaccaccttngggaggaacaagaaagctcagctggtggtgattgcacacgacgtggaagctatcagggccattacattgacagatacgatgagnccgccgtcactggggtggcatgtcctgggtccaa

SEQ ID NO: 590948 - DNA, 440 bp, Homo sapiens
tctacggttcgcatgttcctatcacatgtcccggctgatccccgggacctctgtttaggccactcacttagcaagagggactcagcagatgggatggggtgaaggaccctgagctcagaggtgatcctgggtgatctggggggcccagtgtcaccacagtgtccttatgagaggaggcctggctgagtgtggtggctgatgcctgtaatcccagcactttgggaggccaaggcgggcagatcacttgaggccagtagttctagaccagcctgaccactatgatgaaaccccatctctactagaagtgcaaaaattagccaggcgtggtggtgtgcacctgtaatcccagctacctgggaggctgaggcacgagaattgcttaaacccgggaggtagaggttgcagtaagccgagatcgcaccaccgcactccagcctggg

SEQ ID NO: 590949 - DNA, 480 bp, Homo sapiens
tctcaacacgtgaaaggaacctgagtatgtgggtgaggccttgctgactttgagcttcaccctacggtgatctgggataggccatgtacggagaagcatctgattcaggatttaagttatttcttttgggatgggtcatgttccccagagcagtcttctgatctcttttttgggaagatggaagtcctgggagctgagtgaggttgagggggtgggggtgggggtgggctctcagtatttagcattcatgaaagttatagtcatttcatgcccctgttacgggtaaactatctaggtcctcacctgtgcggggccagcccccatcacatcctctagtctactctcttcagataatagacttccaagggcgggtatggtaactcacacctggaatcccagcacatggggagtgcaaggggggcagatcacctgaggtcaggagttcgagaacagactgtccaacatggtgagaacccgttt

SEQ ID NO: 590950 - DNA, 303 bp, Homo sapiens
  misc_feature (95)..(95): n is a, c, g, or t
  misc_feature (134)..(134): n is a, c, g, or t
  misc_feature (206)..(206): n is a, c, g, or t
  misc_feature (290)..(290): n is a, c, g, or t
ggaggcagcagacacgcccttttagtagggacttaatgggccggtcggggagggggaggcgggatgggacccccaccctttttccattttttcanagggaaactcagatgtcccaactaattttaaccaacgcnttaaaaggtttatttggggacatggcccccagtggcttttgccccaaaaaggggaaaggaacccgcgggtanattatttttagcaggcaggaagtcctgtgcggggtccccatgagcccctccagctgtactagggcccttggaataataaatttnataaggtgccgga

SEQ ID NO: 590951 - DNA, 219 bp, Homo sapiens
tggtaccggactgagatgtctgagatagggcaggagctgagagtgcattgggactaaattttttttttttcaaggtggagtcttgctcttgtcgcccaggctggagtgcagcagtgggatctcagctcactgcaacctccgcctccgtgagttccacgcaattctcccacgctcatcctccgtgagtagccggggattacacggcgcgtaccacacacg

SEQ ID NO: 590952 - DNA, 119 bp, Homo sapiens
gaaatactggtcgtctgtgtgtacatggtcatagtaatcccccataaatgcaaacatcctgcagcagtggactcaggcattagcccatgaggcacatgccactgtattaagtgatgtta

SEQ ID NO: 590953 - DNA, 134 bp, Homo sapiens
agacgactctagcaggatcccctcattaaggcaatcccaccatgagtattttcactttgggctctttctgggctaacgggaacagcacagaagacatcaaatacactttacctttctagggctgccagtgttaa

SEQ ID NO: 590954 - DNA, 286 bp, Homo sapiens
cttggccctctttttaatggtcccaaaggaaagggggtttcacataataaagctttttggttacccccttaaggaaacctccccccgagataagggttttttaacctaataggtacattccctaggcaagttcaatgaaatgaaccctttaagtgggaatgtaaaccagtcctttgcaatagatggcaagaataagctggggccaaggtcacaaaatggcaacatggggatggttttgctccccaaatgttttattttgctggcctagccttcataataggacctg

SEQ ID NO: 590955 - DNA, 566 bp, Homo sapiens
ctatacgcataagggtgggtgcggtggctcacacctgttactctcagcactttgggatggccgaggcagtcgatcaccttaggtcatgtagttcgacgacgagcctggccaatcatgtgagaaaccacgtatctaccaaaaatacaaaaattagccaggcattgttgttggctgggtgtaatctcagctacttgggagcctgagccagaagaattgcttgaacctaggaggcagaggttgcagtgagctgagatcacaccactgtactccaacttaggcaacaagagcgaaacgctgtctcaaaaacaaaaaagataatttccataaacatttttataacttttttttgttaattaaagagtgggttaatgctccaagaaagccttgttaatctgacgtaggccaaaattgcaccactgtactccagcctgggtaacagagcgagactctgtctcaaataaaaacaaaaagaaaacaaaacactttttataattgacaaacttgccaaaatcaaattctttcttcagtcctcattaattttggtgtgtgtgtgtctgatggagtct

SEQ ID NO: 590956 - DNA, 636 bp, Homo sapiens
gatccgtagctggtcgcagtcccgaaggatgatatgaagatattcaaatgatgggaccagcatccaaaaggaggcgaatgggctcaggagatagttctaagaattgtgaaattcaagtcaagatcttggttttagttactaatcaagagaaaaattggttaaattacaatgggccacttgatgaaaaagggaaaataatatattgtttaagaaaaaggtcaaggaaattttgggggtgaacctccctttaaaaggaaaatttccaaattaagaaggggagaaaatttggttttaaaagggaaaaactctaaccttgaagaagaaggcttaaaattgttaatttattgggaaaaatcaaggttggaatcctaagggttttaaaaggaattggggccagtgattgaaagtgaatttgattttaatggataaaaaggaaattatccaaggcccaaacaattgcctgaagtaattctggttattccttacaaggaaaaaacgaaacgtcaacggaacttcacaggacccaattataacagaggtattcccccaaatggcaacaaacaggaataactcaggaaaagttgaaagccaggtaaaggtgcctgaggtatattacagaaaggctgcccaaaaaag

SEQ ID NO: 590957 - DNA, 176 bp, Homo sapiens
cttgcttgtacgggttatggggtatggcccgtccgctctcatagtccgcgatcaccgtggggcttctcattgattttgcgtggccaggtccttctgcgtaagcccctggctctgccgaccttgctggatcaccttgcccgcctccagggtcaccctgtcatggtgcagctcctcgg

SEQ ID NO: 590958 - DNA, 366 bp, Homo sapiens
ttcgagaggtctagaaaaaaaaaaggttgtggcgtaggggcagatatactctgacctaaaccttagcaagagcatagctagtattctagatatagattcatgacgtgcatctatctaaagtagcttgtctcatctgttttctcataagacttaaatttacttacataaatcggtgaatatatattggtaatatgaatctctacacccttcttgtagatactataaacttaatataaactatccacataaattgctcagtaccattgctatcattagttaattaccattgccctttaatctgttcagccaaaattgattagaaggggaaatggcttcttggtattgcttagattattttttcttatt

SEQ ID NO: 590959 - DNA, 210 bp, Homo sapiens
agcatgcaggcacgggcggggcattaagaatggcgtagtagaatacggaaaaattgagagcaagatctaagcgaataggatgcgtgggtggaagttctgtcatggcaatatcactagcagctttataagccacataggcggtactccgcagcctccttcctgtcgttatcctgtgggaaattctgacagatacctgtgttacgtctaggt

SEQ ID NO: 590960 - DNA, 243 bp, Homo sapiens
gcagcgcaaaggatggctcccaagaggatgcaaaggcgtcccgggggcttgggctgcaggctgaaggggcagggccggtctggttatgcctggcgggctgcccagagcaggtttcccctttcccacagacgtccccggggtgtaccgggagggtggcaagactacctccttcctccctgccctgcatggcagccctgtgaattcacccactcaccaaagctcatggagttccaaaaaaaaaaa

SEQ ID NO: 590961 - DNA, 309 bp, Homo sapiens
gacacacctttgcgcgctgtcaccacactgcatacacagagcacatgggtgcccagagaaccgtcgcccgagcccactccattcagatcatgaaggtgcgaggagatcgcggacaccatgtgccgccggccggctgtcaagcagttccacgacatccgcagatcaagttcccgcgtgccccaccgggtcctgcgccgtcagcacaagccatgcttcaccaccaagaggcccaacacccttcttcctaggctgcacggccctcgtccgggtgtgccccaaataaactcaggaatgcccctggtcatgcta

SEQ ID NO: 590962 - DNA, 266 bp, Homo sapiens
tattgaagaaatttctttaacaatggtgaaaacgaaatataccacaacctgtagatacagtgaacagcagtaccaagagagaagtttatagcgcctgcatcaaaaaagaagaaaaacttccaataacctaatggtgcatcctaaagaaccagaaaagcaagagtaaacaaacccaaaattagtagaagaaaagaaataataaaataataaataaaataaaaatcagagcagaaatcagtaaatcaaactgatctataggagtggtg

SEQ ID NO: 590963 - DNA, 390 bp, Homo sapiens
tgaaggtctgactctagatgattccccatacgtgaaaagcgactctgccagatgcatgagtctaaatctacggtgagagcaatgtctccgtgaatttacatggatcttgtgaagattaaaagggattttgtaacggtttcctgattaaagaaggtttgactaggagtatatgtttttcctggctctcatgttacctccactatagcttagtccctatgtgggagcatcacaggctggacggtgaagtcgtgaccttttactgcctttgtggctgttctttatctctggccctgctcccagttcctagaggcagtggtgtccttgacaacattagttacgagcctcagacttcataactgggctcagtggcactgctggtatcatgagtct

SEQ ID NO: 590964 - DNA, 170 bp, Homo sapiens
gaggtaattcgtgcccttttcgtcacaggcactaaggacgtgggcgaagttctccttcatcatcgtacagcaggcttggtttgtcattcttgtcatcacgtctggtgtatttgtgaaacatgtcgatcatgcctattatggacctctcagcttgagtgttgctcatcttt

SEQ ID NO: 590965 - DNA, 471 bp, Homo sapiens
ccttgggaggcaggacactggggcaagtgctttggggctccagccctatggcagcatctaggggtgggtgtctgtaactttcaaagcccaagtgtgcatgtgtacagtgcactcttttagccttgccatccatagatggcttaagggtaaaccagctcagtgaaccctctgcctttttgcaaaaggagggggctagtgtgacaactttctgtatcccaagccctcatccagcatcccagaagaatcaggtcacacatggacttgaaggatgaatgcaggggtttaatggagtggtggaagtggctctcagtgggatggttggggagctagacaggggatggagtagaaatatgatcttgccctggagtttgcctgtccagtggctgattctccgaacatcctaagccaaactcctcctgacgttccttctcttctctcctctgctgcaccattctgccatcggttggtctc

SEQ ID NO: 590966 - DNA, 1264 bp, Homo sapiens
  misc_feature (1213)..(1213): n is a, c, g, or t
atgcaacgttccacgggaataatgatcggagctgtactggcgtgtgtcggacacgattgtgtatggtgtgtgcatttcagcgtactaagactttcataatgtgctgaaaaatcgtgctacttgttggatgatatggataacgaatacctgctataaagtgatgaaataagtggtatccagccagtccatgcggacgcgctattcatctatcagaacagcctagtactcttggtgagctgacgtcacagagtgcctatcttggtgcaccgccgaaattgctttagcgatagttagctggtttgacttagctatggagatccgcccacggagggacaaggaggagcatgacgatcgctgccctcgacaaagcctcgggtgcttccagtgatgagtgcttgactctgttcccttccacgatttctagtacatacctgtcaagactcggtgtctcgatatacatgatccgtggacatacgctgagtccccatacagtgtcgcatggtgttatcgcgacatttccaatgtctggtaacaagtttgacttagtaaacgggctcattgtcgtggaaccttcttgggtccaacacgacttatgagcttagagaaatcctgacgacaccactacttcaggccccggcgccgctaagtaagtttagccgacacaaggttcgtgggaaatagccttgatgactaacctcggagttaattgccgcctcagaacttttcccaggaattactgccccgtaggttacaacccctcttagaattgggtggcattggccaaggcataaaaaacaagtccggagtgggacacttatccaagatatcccctcgaattttccgcacggtctataggccacgaagttggccgtacattaggaagcaccatttatactcgattgacgagcgggtaaaatttgggtttgggtgcgcttcaaaacgatcacacacacgagtattggtctttgcgagcacctaaagcaatgatttgggctaattgattcggacggtagggtttggatacaggtgggttgcgcagcacgcaggggggttatggataaagctggtggcgctccctttgagtcagtgtcatcaccatattatggagtgctcttcgccaattgaaaaaatcgcgtttcggggttgtaaaaaacagattgtgtagaccccgaaataccgatagggagcgtataagagatagcgaccacaaatnttttgatgggacagaagagatgtaatcacagcctacggccgagctaaaacg

SEQ ID NO: 590967 - DNA, 120 bp, Homo sapiens
gcactccagactatatagtacaggtagaaaagtctaattattcagctgaggaacattgtaggtatggggtctggggagaagcagtaagtttttggggcaaatcaggagtgcccttgtcgt

SEQ ID NO: 590968 - DNA, 456 bp, Homo sapiens
  misc_feature (16)..(16): n is a, c, g, or t
  misc_feature (62)..(62): n is a, c, g, or t
  misc_feature (98)..(98): n is a, c, g, or t
  misc_feature (107)..(107): n is a, c, g, or t
  misc_feature (114)..(114): n is a, c, g, or t
ttttttgaggtgtatngagggaggaggtatatggaatttttttaattttttgggttatattntttttttttgagttgttttttatggttgggtttatnttggttttnttttttntggttttagattttgggggaaaggaaggaagtgtatgtttgggaattggtattattggaattaatggttttaatttttttaattattagtattttttttttttttaaggtgaagtggagggtgttgtggtgagttggttattttagagttgtagtgttattggaggagttagattattatgatattgtagggaaggaggggagatttttttgtagtttttaattggggtgtgggaggggtggggaggttttttataaattgtattattttttgttgagggtggagtgttttatttttttaattaaggtgattgtgattttgattaataaaaaagaatttgta

SEQ ID NO: 590969 - DNA, 476 bp, Homo sapiens
tgcagtttgatctcagactgctgtgctagcaatcagcgagactccgtgggcgtaggaccctccgagccagagatgggatcttactacattgcccaggctgaagtgcagtggctattaacagctgtaatcataatgcattgcagctttgaattcctgggcttgagcgacctccccaccttagcctcctgagtagctgagactacaggcattctaatatatgcattcttcataacaactgtgtgaaacatattaatatcctcattgttaacgatgaagaaactaaatctcaggaagaaaaactaagtgaagacaaaagaaggatttgaactgaggtttgtcagactctcgggaccatgctgttgaaaccactaaaccacgctgcctctgggtcacttggtaaacagcatttaaccattaagaaagtcattaataaagttccttgtgctctccttgagattacaagccattgatttgct

SEQ ID NO: 590970 - DNA, 818 bp, Homo sapiens
  misc_feature (53)..(53): n is a, c, g, or t
  misc_feature (292)..(292): n is a, c, g, or t
  misc_feature (354)..(354): n is a, c, g, or t
atagccgtgcgaggccatggtgccaatatgctccactgttgctcgtttattgngcctgaaactgtctgggtctgagctggggagcggaagccacttgtccctctccctccccaggacttctgtgactcctgtggccacagagtgtccaaccagtgctaagggcctggtgtgataccccctgcctggcccccttgcccaaactggcagggtgggccagggctggtgcatgcagcccctctttcacctcaactatggatctcctgccccccaagcccaagtacaatccactacnggaatgagtctctgtcatcgctggaggaaggggcttctgggtccacccccccggaggagctngccttcccaaatcagctatcatccctgggagcccatcactgcctcctcatgacatgggagacagatatgtacacacacataccactgtagcatccatatctatcccacacgagatagaagcacacctagaaggcatggacaaaacctggctaggggtggcagcccagggatctaagggggagcacaggaagggcagctgatgatggggaggggatcgtaggggcagacatgccagaatcaggccccctacccctcctccaggacatgaacaagcagagtggaggcggcgggcgcaggactcgggtggagggggccagctgggggcgaggagtggaccgacaagggagctagtacagtaaaccacgcggggaaggtgatccaacgacaagtcatggacccgggatacacagggcagactgcgagtacagccggagagcaacagcacagggcccaccggcagagca

SEQ ID NO: 590971 - DNA, 192 bp, Homo sapiens
aagtgatcctcttccctaagcttcctgagtagcgggacccaccacccgtgcaccaccatgccctgctaattttttgtagatacgagattttgctgtgttacccaggctggtctcgaactcctgagctcaagcaatcctccctcctcagcctcccaaagtgctgggattacaggtgtgagccaccgcccttgg

SEQ ID NO: 590972 - DNA, 446 bp, Homo sapiens
tgcagtttgatctcagactgctgtgctagcaatcagcgagactccgtgggcgtaggaccctccgagccagagatgggatcttactacattgcccaggctgaagtgcagtggctattaacagctgtaatcataatgcattgcagctttgaattcctgggcttgagcgacctccccaccttagcctcctgagtagctgagactacaggcattctaatatatgcattcttcataacaactgtgtgaaacatattaatatcctcattgttaacgatgaagaaactaaatctcaggaagaaaaactaagtgaagacaaaagaaggatttgaactgaggtttgtcagactctcgggaccatgctgttgaaaccactaaaccacgctgcctctgggtcacttggtaaacagcatttaaccattaagaaagtcattaataaagttccttgtgct

SEQ ID NO: 590973 - DNA, 588 bp, Homo sapiens
tgcagtttgatctcagactgctgtgctagcaatcagcgagactccgtgggcgtaggaccctccgagccagagatgggatcttactacattgcccaggctgaagtgcagtggctattaacagctgtaatcataatgcattgcagctttgaattcctgggcttgagcgacctccccaccttagcctcctgagtagctgagactacaggcattgtcctaggtactgtggggaccaaaacattcagacctgcttctaaggagtgcagtccatggaagagtcagaataacaaatcaacatttgtactacaccagaccagctctcttctaaggttgctatgacttcccagcaggcattctaatatatgcattcttcataacaactgtgtgaaacatattaatatcctcattgttaacgatgaagaaactaaatctcaggaagaaaaactaagtgaagacaaaagaaggatttgaactgaggtttgtcagactctcgggaccatgctgttgaaaccactaaaccacgctgcctctgggtcacttggtaaacagcatttaaccattaagaaagtcattaataaagttccttgtgct

SEQ ID NO: 590974 - DNA, 314 bp, Homo sapiens
cagccagataactcctataacacaacatacagtgcagtgtaaatgaacctaaacagatttaccagtacctgtacattactaaacagatgtaaatgaaaagatacactatgcattgaacttaatgctacttattagtatatatatgttttaagtttctctagtagatgtgagtttaactatcgcaggaataggatcctcatctactcttgttgaccgtcttcgtggcaagtggctttaagttctagcatattcagtaagagaaattagagctggaatgaaggacatcacagcctgcatacttggtacaatgtctc

SEQ ID NO: 590975 - DNA, 659 bp, Homo sapiens
tgcagtttgatctcagactgctgtgctagcaatcagcgagactccgtgggcgtaggaccctccgagccagagatgggatcttactacattgcccaggctgaagtgcagtggctattaacagctgtaatcataatgcattgcagctttgaattcctgggcttgagcgacctccccaccttagcctcctgagtagctgagactacaggcattgccttgcttctccttcattttctgccatgactgtaagttccctgaggccttcccatccatgtggaactgcattctaatatatgcattcttcataacaactgtgtgaaacatattaatatcctcattgttaacgatgaagaaactaaatctcaggaagaaaaactaagtgaagacaaaagaaggatttgaactgaggtttgtcagactctcgggaccatgctgttgaaaccactaaaccacgctgcctctgggtcacttgattattctgggagattctgggagtcttttctcccacactccagtggcatctgactatgtgagctgataagatctatagatctttgctgaacctgattctggaaggtaccaccatttcggccatcttcctaatccatactgtgagatgggacccaattgattgtgtggtacatgaagcaccacccggaaaa

SEQ ID NO: 590976 - DNA, 174 bp, Homo sapiens
agagtatccccctgggtcctgtgcagggggggccgtcctgagggtacagaagtagagggatgttgtccagtaaggggccgccagctcagtcattgtcagctctgggatcttattggactccagctgcttctggtgatacagctctgctacgtgcttctggagagagtcgcatag

SEQ ID NO: 590977 - DNA, 281 bp, Homo sapiens
tgtatatacaatcgagctcggtaccgactgcaatctgtgcctcttgggttcaatgtgatctcgcgtcagcctcccgaagtagctcgacgattcaggtggatgccaacaagcccggataaattttttggaacttttagtagatatggggtttcagccatgttagctaggctggtctcgaactcctgagctcaggggatctgcctgccttgagctcccaaagtgctgggattacaggtgtcagccaacatcgcccggccattatctagtgttttaacccttgg

SEQ ID NO: 590978 - DNA, 618 bp, Homo sapiens
tgcagtttgatctcagactgctgtgctagcaatcagcgagactccgtgggcgtaggaccctccgagccagagatgggatcttactacattgcccaggctgaagtgcagtggctattaacagctgtaatcataatgcattgcagctttgaattcctgggcttgagcgacctccccaccttagcctcctgagtagctgagactacaggcattgtcctaggtactgtggggaccaaaacattcagacctgcttctaaggagtgcagtccatggaagagtcagaataacaaatcaacatttgtactacaccagaccagctctcttctaaggttgctatgacttcccagcaggcattctaatatatgcattcttcataacaactgtgtgaaacatattaatatcctcattgttaacgatgaagaaactaaatctcaggaagaaaaactaagtgaagacaaaagaaggatttgaactgaggtttgtcagactctcgggaccatgctgttgaaaccactaaaccacgctgcctctgggtcacttggtaaacagcatttaaccattaagaaagtcattaataaagttccttgtgctctccttgagattacaagccattgatttgct

SEQ ID NO: 590979 - DNA, 549 bp, Homo sapiens
tgcagtttgatctcagactgctgtgctagcaatcagcgagactccgtgggcgtaggaccctccgagccagagatgggatcttactacattgcccaggctgaagtgcagtggctattaacagctgtaatcataatgcattgcagctttgaattcctgggcttgagcgacctccccaccttagcctcctgagtagctgagactacaggcattgccttgcttctccttcattttctgccatgactgtaagttccctgaggccttcccatccatgtggaactgcattctaatatatgcattcttcataacaactgtgtgaaacatattaatatcctcattgttaacgatgaagaaactaaatctcaggaagaaaaactaagtgaagacaaaagaaggatttgaactgaggtttgtcagactctcgggaccatgctgttgaaaccactaaaccacgctgcctctgggtcacttggtaaacagcatttaaccattaagaaagtcattaataaagttccttgtgctctccttgagattacaagccattgatttgct

SEQ ID NO: 590980 - DNA, 879 bp, Homo sapiens
attcagcatgctgtatttaaagaacttgtgaagcttgtagaccctgtgagttaaggcatggagcacccagtaagaggaaaacaaacatgtgattatgttggtgggattgccagggagtggtaaaacaacaacatgttgcaaagctagcatattattacgcagaggaaaggttggcagacctgttctcagtatgtgcagacacattcagagcaggggctttggaccaactaaaacagaatgctaccaaagcaagaattccatgtttatggaagctatacagaaatggactcctgtcatcatgcttctgaaggagtagagaaatttaagaaatgaaaatttgtgaaattattagtgtcgatacacagtggccgccacaaacaagaagactcttgttctgaagaacatgcttcaagttgctaatgctatacaactctgataacattgtttatgtgatggatgcctccattgggcaggcttgtgaagcccaggctacggcttttaacagataacagtagatgtagcctcagtaaatagtgacaaaaacttgattggccaatgccagaacagtgagggtggtgcactcaagtgcagacgaaggccacaaaaaagtgccgattattctccactgcctacaggcgggacccgtactatgaatgaagtcgaagcctttcaaaacaacaggcctttaattaagcaaacgtctggacgggcgcgcactgagaggccggcgagaaaacgccacgaggcgaacctgggcgcgcaaggacccccataaccaagtggaacaggccgcagcacgcgcccaacgggtggccgcccaccacacacgaaaggggcccacccaacaaagggagacccggtggggagaccaatcgcaca

SEQ ID NO: 590981 - DNA, 163 bp, Homo sapiens
atgcgcacaagcctggaatttttgtatttgaatagagacggggtttctccacattggtcaggctggtctcgaactcccggcctcacggtgatccgcctgccttgacctcccaaaatgctgggattacaggcatgagcaagccaggagacctgagcaagccagg

SEQ ID NO: 590982 - DNA, 323 bp, Homo sapiens
gcagagtggacatcgaggatctcacgtggggtggtgactgccacgctgattctgagtggaagccaagccctttcagtcatagctgttctgaggctcagacccaaatgctaccaccaccaagccctgtgtcacgacggcagcggctgcagtcaccagaaacaatccttcctgcctcgacacccgtgccaaccccagccaccctgacggtgggctgtccacggaaatgccacggccaagagcccaggtccttcacgctggcctcttccctgccgggctgggctccccagtgccttcagagttcgttgtgccgagctctggagatc

SEQ ID NO: 590983 - DNA, 179 bp, Homo sapiens
  misc_feature (102)..(102): n is a, c, g, or t
  misc_feature (114)..(114): n is a, c, g, or t
agaaagtgccacagtgttgacaggccacaggacatgctgtgagtgaataaagagtacacactgcttccctgctttccccagtgactgaatgctcgaggccanctcctcctcagnctcctcctcgaactcgccctcctcctcggctgtggcatcctggtactgctggtactcggacacca

SEQ ID NO: 590984 - DNA, 447 bp, Homo sapiens
gaaaagcggactggatagacaaaactgcagaaggtgtatgttggggagaactgaaagggaaaacaaaatacttgacatagtcttaagtagaagaaggcagttagagaaaacaaagtatctactggccttgtcaacatacagacttcaaaataccccttatgagaatccaaagaatgatgtgtgtaagggaagattttatttgcctctccggaagaaatcagtatctatgcaaatcctgaaagacgaaatcaaagcccataatgattcagaacagtgctgactcctgtatctgatgtgactctgagcaggttggtctgctctttttagactggaagtgtagtgcttcataatactgctgtaagtcttctaagacaatattatctagcatgtttcagtatctctctatcatagtccctcatccgctatcatgggatcctctagatcacc

SEQ ID NO: 590985 - DNA, 191 bp, Homo sapiens
accaatgctcatctcacccatcgttcctgttccggggccgcatttattccctccgtttctttccacttggattgtctggtgagttttgctcttcccccttctgtcgctacgtttaataatataagcgtaaacatatttaataatataacaaatcataatatacacaaggcccaatcacttacagataagat

SEQ ID NO: 590986 - DNA, 207 bp, Homo sapiens
gaaaagcggactggatagacaaaactgcagaaggtgtatgttggggagaactgaaagggaaaacaaaatacttgacatagtcttaagtagaagaaggcagttagagaaaacaaagtatctactggccttgtcaacatacagatctgtgcaataatactctgttcctgaatgctatttagaaatactatcctcaaaacaccagtggtt

SEQ ID NO: 590987 - DNA, 189 bp, Homo sapiens
taaagagacagggttttgccatgtgggctaggctggtcttgaactcctgacctaacgtaatccacctgcctggacccctaaagacttcccaaagttctgcgattccaggcctttggggttggacagccctctggggttggccaggcctctggggttggccagccctttggggttggtctgggtcaaatg

SEQ ID NO: 590988 - DNA, 415 bp, Homo sapiens
  misc_feature (28)..(28): n is a, c, g, or t
  misc_feature (50)..(50): n is a, c, g, or t
  misc_feature (58)..(58): n is a, c, g, or t
  misc_feature (87)..(87): n is a, c, g, or t
  misc_feature (144)..(144): n is a, c, g, or t
  misc_feature (168)..(168): n is a, c, g, or t
  misc_feature (340)..(340): n is a, c, g, or t
ccaccataatccccccagcactttgggnaggccaaaagggtggggtgggnatcgcttnaacccccgggcaacaacaaaaaaatcccntaaaaataaaaaaaaataggcagccgtgtggtggcctcatgccctgtaatcctcaanactctgggaggctaaggtgggaanatggcttgagcaggagggttgcttgaggtcaggagttcaagaccagcctgggcaacatagtgagacctcatctctgccgaaaaacaaaaaacaaaaacaattagctggatgtggtggctcagcacctgtagtcccagctactcaggaggctgaagttggaaactggttgagnccaggaggttgagacgtgattgtgccactgcagtccagcctaggtgacagagcaagaccctgtctcattttaaaa

SEQ ID NO: 590989 - DNA, 203 bp, Homo sapiens
ggtcagatcaactctgcccatagctttctagcccaaaaatccttagtgtgatgattagagacatgacacaaggacgaggagggctcaaagggacaagtcggtaaacctgtttattgtcccaaacttgggtcattcatttaggcaccttattattacatttgggtgggcaattgcctgttttaaaggccaaattttttgtttta

SEQ ID NO: 590990 - DNA, 259 bp, Homo sapiens
  misc_feature (24)..(24): n is a, c, g, or t
tttaactggtttttcccaaaattnccagggggatgcaatggagaaagcccagtcttttcagccaattgggcagggacagctggatatccctatgccaaagaagtggactttggctcttccccccaactataacttcaaataggccatggggggaaacatagaagcttaaactataaaattttagaaggacggataaaataaaatttatggggctttgggaaattaatggttttttccggccaggccccaaaaaatggta

SEQ ID NO: 590991 - DNA, 337 bp, Homo sapiens
aaatgtctgggggtaaaagccctgtgcttttcagtggtggctgcgtgaaaaggaacgaccctcaactgtgtgttcctgggcttgtgtgggacttagaacctcagttttattacgttatagtcagacctttttttgacagtatgagacagactgcaggatgaaaatatttgtcaaaattttaactgaatgtttactggaaggacttgagattcccttttaaagttggattgttaataatttcatggcagtgaactgaaatttgatgtttatgatatggggtttttttttttaaaccagcttcccagggctaaaaataaaaaaacccaaaaatgctgga

SEQ ID NO: 590992 - DNA, 1591 bp, Homo sapiens
ggggggagcgcggcggccaagctcgctcggcacgcgccccgcccccttcagaggcctggcctccctgcacgcaccgtgcagactgctgtgccctgtgggtcccgagtgctcctgtcgccttgcccgacccggggcccagccgccttccactggccctgctgctcgtacttggatgcgaaggacgctggcctcctgacagtgagcgcggaatggtgaccgtcgccggagcgtgccatcgggcacggattaagccctccgatttcagtgctacatcagtggcgcagagacttacaacgtcgtcgtccttgcatatctagacctgggtttcaggcagtgtaacgagcttcgcccttttagagaacacgcattcatctgtagcgcattgcatcgcatcggacacgtacggcatcatgcgtctgcgtccttatgcactgccggtgacccaccgggaaaggtaatcaagaagttgataccatcagtccaattcatttcgctttgccacaccgtggtcacagcgtcgagacaaacgtagccaagccagtggatcaatatatataaccccagcgcacaagcacttatattagggagcatcatttgcacgatagcgcatcgcgggcgatatacccctgggcgatatagatcgggcttttgtcgcccacgggtaattccaccagagattatataaaataatggcagaggaacccccatatactctacacgacagcttttccataggatagcaactacggcgcacgtttacaacgcagacaacaagccgtttcatctaacgcaaccgcaagtttataacccacactattcgcagaccttaaaacatcggtatcgacttccctatattttatgggagcacggccttctcccttattatggggagcaccgcggccttatacctatggcggcgccacagacgaacaacatttatatagcgcatgggagtagattaacgcaacagttacaaacgacaacaattatccttctcgttaagggacaggttccaatattaccccccattaaaactatccacttacttggccaaaatatacccttatatccagagttgtaaaacgacgcccgcttcctataagtttcattttatccagagcgcccaataatacgccctttgtgggcacaccaagtggtcgtcaacaacaccaagcggccgctatttataggggtccacttggcacatttgtgccccatgtggccactatcatatcaatatggcttctctcacacacacacccaacacgtttaagcgatatccctatttgggtgccacacacatttattcatctacacacttatattttgtggatcccccacggtcgtagtgtgtcaccccccttaattgtcactaagcgccgcatagtagctaggccccaccgactgtaaatcattcaacggtgggggcatagacaacaacgcaggttctattacaagacacataatatagtaggcctgctaccagagacgaggggaaccggcgtcgagctatctcacggaagcattatccactctaaacaggtatgcgtgacacaggctacttctcatcagtgacgacgcacaccatcta

SEQ ID NO: 590993 - DNA, 368 bp, Homo sapiens
cgttcgccgctgtaggccgaagcacctgcggagtgtgagggacacgtatacactggccatgggacaaggcggacaagaacctgactccatcagtttaacgatctcagccacgacttgggaacgtgtggattcagacatgtatattgagtgaatcattaggacacaaaataggctgaagaagatgttccagaaatccaggcagactattggccactaccattacacacagtggtgctgcccttctccactccaaactgagcacgaaaaaggcaaggggactgggccacagtgcattagggaggacagggtctctcggcttctctaccccaatatcaccagagggaaaggttaggttagaaaaacgatgc

SEQ ID NO: 590994 - DNA, 502 bp, Homo sapiens
tacttttccacagggtacttttccacagggtggtaggcacctgtaatcccagccactcaggaggcggaggttgtagtgagccgagattgcaccactgcactccagcctgggagacggagcaagactccatctcaaaaaaaaaaagaaaaagaaatacagatacttttggaaacaaattggggagaggggtgtgatccttgggcaggtagctaaagtcagcattagtccaccagaacgggagccttaaagtcctcttacttctcacttcaatcacttctggccttagacctcattattaccgggaacagttccttttctagggtctgggaaagaggatcttctttgaattccaggattttttatttcctagtgtctgtaaaataaacttttggtctaattaattcaaagtttcaattagggaaactgagaaacttttgcagaagtaaacagacggttgtacccaatggcttggtatccagactcagattcggtaataatcagg

SEQ ID NO: 590995 - DNA, 128 bp, Homo sapiens
ttgattctctgctcagcaggagatttccggccccaccaccacgccggtaattttgtattttcattagagacgggtttcgccatgtgcctgggttggttttgaactcctggcctcatgtgatctgctcg

SEQ ID NO: 590996 - DNA, 720 bp, Homo sapiens
gacatggtttttgcccaccaagatgtaccggatggcgatgacaccctcccattgcgtgctactcaaaacctgtcattcttggagagttgcgcagctcccttagctcaagtgctgctcagggcccttgaccagggcttaacctgggtatgagggagagttgctacaggcagcctcacccacagacgatcctctctgatgccctctttcatgctgtctaacctgggaactaatcccccagactttagattgccctgcatggttgtcaggcctgatgatgacctccgcgactgacttacctgagtccccagcttccagtgaagggcctgacctgcacacaggcgctcaaatatgagaatgagcgcagtgcctatagatgtgatcataatcacagctgagcgcgatgctcacgcctggacgtccagcactttaccaggccacggagaccagatgtcctgaggttagaagtgcaagaccagtctgtccaatatgaggagactatgactctactacaatgacagaagatagccaggtagaacgcctgtagtcccagctactggtagagcctgacacagctgtaggctgctacaggagatcctgccagcatacccacgattgcgccaatgcccttcaactgttgcctcacaaccctcacaccacctaggccgaccgcttggcccccgcctcgctcaattcgactctggtttagcacgttcttcggcc

SEQ ID NO: 590997 - DNA, 782 bp, Homo sapiens
  misc_feature (94)..(94): n is a, c, g, or t
gggccggggtgagaggcaggagaatcacttgaacctgggaggtggaggtgcggtgagctgagatcacaccactgtattccagcctgggtgactngagactctaactaaaaaaaaaaaaaaaaaaaaaattggtttggcgggggcctcaattaacaattggcttttggatgttggagtggcggtggttggaaattaatttttctttcggggtcttcaaaatttcaagaaaagtggatgatggctttgaagtaattccaaaattagggttttcgggcaggggggtccttataaataagtagggtatatggatggtcaaacagtaatacttccataatacgaatgtgacatggctctggggatagttgggacaaggggtaacttatacagggggaaatcctcgtggtgcattatttttccattctaaacctcagagatctggtttcctctagaaaaaaaggtccatctgtggggttaataaacaaagttttgcgtctgtccacaaaaaacgcagcaggagcagccaccaagaaaccacaacattttgggcgggcagcggcttgcgcactaagaagaaacgtttcctaaacaccatttggtgggggcgcgcgggggaccccagtcatggacatacacagtgggccatcacccgtgtgtccacgaggaaacctcggcccagcgcacggggtggggtctccccccatataaaaaacgccgggagacacggcggtcagagcccaccagagggggtcgggcgccacgggtcatacgggcgcgggggcaga

SEQ ID NO: 590998 - DNA, 589 bp, Homo sapiens
  misc_feature (532)..(532): n is a, c, g, or t
atcagaagttaattttggtatacagaacgcaagatgaataagaccatattgtggagttttctactattttttttctggaagtcaaacttcaagagcgactgaccaaaaaattgctgactttgcaatggatctttataaagctatttctttatcccacaagaacaacattatattttcccctcttggaaccactatgcttcttggaatggtccaactaggtgcaaaaggaaaagcacaacagcagatcctgaagactttaaggatgcggggaaccccagcaggagaggaattttctgtgttgaagtcacttttttcagccatctcaaagaagaagcaggaatttacatttaatcttgccagtgccctctaccttcaagaaggattcattgtgaaggaaacatatctccatagcaacaaggagttttttcagagtgctacaaaactggtggattttctggatgcaaagacttctgcacaggcaataagcacctgggtagaaagcaaaacagatggaaaaattaaaaatatgttntcagaggaagaatttggccccttgactcgtctggtcctggtgaatgccatttatttt

SEQ ID NO: 590999 - DNA, 147 bp, Homo sapiens
  misc_feature (25)..(25): n is a, c, g, or t
tgataagagaccatcctccatggantggttctggccagttttagaggctgtgcctttacagaggctgagcctttccagaggctgagtacctttatgtccctgcttcactttttgatgtgtagggcctaattataatacatttaaatg

SEQ ID NO: 591000 - DNA, 153 bp, Homo sapiens
agagacggaacagatgctttcattatggcctccagaggaaaccaaccctgtctccaccttgatattgcacttccaggctccagaactgtgaggcaataaatttctcttggttaaaaaaaaaaaagcaaaatttactcaatttccagaagaggg

SEQ ID NO: 591001 - DNA, 342 bp, Homo sapiens
ttggggctcagtcaggcgaagtcggtcattacatcccatttattggtggtaagggtcaaaagcttcaacggaagctgaaagaccatcttcagtgacacctccggcaatcacaatttggcctttagggacggctactccaaacagggaaggaggaatttgcatgggagccagatctttccaatctccttgggggggggtggaagataaccacccggtgggtacatggtgggtcatcggtctttcctcctagagaatatatcatccttttatgtgaaatcacatgagggccatagacttggagagggagttaaattacttcgttccatttggcagccacaggat

SEQ ID NO: 591002 - DNA, 1692 bp, Homo sapiens
ctctgctgtccgttgtgctgtttgatgggctgatgtgtgtctttggggtgcgatgttttgggttgcgtctcagtcagtcgatgcacagtacgcgacatatcaataacgcagaatagacattatcgaatgcgatcggattgagtccttcgcggctgatcaagtatcgctgagtcgagatgtcggcgtcgggctcaggtctgatgcagctgtgtggcgtcgatgcgcgagggagggtcgcgccgtgaacggtcagctacgcaatctgtggtgtgcttctgtcgtactctggatgctctgggttgaggcgagcacctgctctgctgctgtcgcctgcgtggcgtgctgggcatcgagtggtggtgggttgtacttttatagtgtttgaatttgttttgtgtgtttgtgtgtgtgtttgatgtatttgttagttgtgttggtttggtctatgttggttgtgttgttttttagtttttctattttattatgtatttagactgatgtgtgtgtggatcctttggattatgggtgacgtggtgtgtatggatttggtgtgttgtcgtatgttatgtatatattagtattttacagatatgtgtatttgttggtacatattgttttgtgttattcttctaatgaggtacttttgattgtggttgtgtatgagagttacgtcttgggtgtggttctcacgtgtttgttgtgtgtgttgtgtgtttttatggtttgtggttggtgttgggcttctttttgggtttgtgttcgttcattgtgttcttgcgttatgtcgtagtgtgtgatgtagtagtgattgtgtggattgattcaataatgtgtgcgttgtgttcgtagttacgttaagatttgtggcggaagtggcagttagatgtagcgatgtgtatcgtatggatgtgaaggtagtgtaaatgcattgtggtaagtgacagaaagaaggagttcaggttagaaggagcaagtatgtgagtagtcagtagttagaatgtagtaggtagtacgcacggtggaccctcctgctcgagccctgcctatgtagtcattgcttggtatggctctttaaatgcaaagcacaccagcgaattttgtccccagtgttcactgagaactctcgttatccttaagcggaagagtgtagtccaatagtcttggcgcaagtacacggactgctctcagcactcgcctgagatgcaacaccaggacgcctggtcaggaccaaagaaatgctgcacgcgaagccaatgtcgacaggttcactgagacggcccactgtcgagtgcttcctcgacgtgctccgacggccatatcgctgacacggaatcatgatttgtcactgagagacatttcgtaacatggtacccttaaccaattgaagcggtataccagtagtctacacagtgattaccgttcatcatagccccacggagagttgtgcctgccaccttacgcagtagccagtcgcagagagctggcaggcgctcggccataaaggtggtggagggtgatcgatcctgcgagactcacaagaggggaaactgacagagatacctacagacggagtgctgtgctacctggtgccgacaagaaagccgaggactggggctgggtcagcaaccgaattccagatttagaagccggaatttggtcagtgtaaccgtggtcaggccacctcgagtgaac

SEQ ID NO: 591003 - DNA, 176 bp, Homo sapiens
  misc_feature (30)..(30): n is a, c, g, or t
  misc_feature (80)..(80): n is a, c, g, or t
aggggaataattagaaataaataacagaanaatatcagaaaatccttgaataagccaggcacagttcgcacaccccctgngtcttagctacttggagggctaaggcaggagaattgcttgaggccaggagtttgaggccagcctgggcaaaataacaagactctgtctcctaaatt

SEQ ID NO: 591004 - DNA, 315 bp, Homo sapiens
  misc_feature (5)..(5): n is a, c, g, or t
aaggnaattcatgatttcatcaccacacatggagagatttgggaacctcagtgtaagagaaacattacaagtccttttcttacctctacaagtcacagtgttattaaaccagcagcaatcattcatcatcccacaatatgtctttcgttcggctcatcagttggcatcatgtccttttgttttcgctcacacttcatccttgtgcaagtccatacaacttcactcaatccttcagtccttccactcagcacagcaggcaattcaagcacaggtcaccaagcaacttgcaatcatttcacaagcaagtgtccatca

SEQ ID NO: 591005 - DNA, 564 bp, Homo sapiens
tgaggatgaacgtaatatgtacatagctgggtgtagaaggaatttgttctgcactttatgtagccaggaaatttcttctgtttccagggtcatccagctatgctctaaaagcatcatccagaaattgcaatgctctgaattgtggagaggcctgattttgaggttgtggattccattccactggctagctaagagacaggatagctgacctgagagggaatgaggctaaaaatcctatctaatggcttctcatcaaatagagtttaagaatgaggtcacctgacccaacagagagctctaatcacaagggcttgagtattttatcatggttttactctggtcctcattttgtcagaagaggatgatgaaacccaaagacatgaattgtagtaaatagagctaggaatagaacctggggatcaaagctgtgtctggcatcccagactggtcattcatattagtaaggatccttgtcctcagatcacgagtcccgtgataacctggttggatgccaaagcattaccatgctagtaatgcaactgaacaatttgggttctttttaag

SEQ ID NO: 591006 - DNA, 145 bp, Homo sapiens
gtaattctacccgccgtcagcctccctaagtgctgggatcacagatgtgattcactgcgcccttactaacacctactccattaaacctggcctctaataatacccgccagggatttctctatcagtacagacatgtagacatgca

SEQ ID NO: 591007 - DNA, 428 bp, Homo sapiens
  misc_feature (53)..(53): n is a, c, g, or t
  misc_feature (76)..(76): n is a, c, g, or t
  misc_feature (79)..(79): n is a, c, g, or t
  misc_feature (103)..(103): n is a, c, g, or t
ccagccctaggttttgtttgtcttttgttttgagacagagtttcactcttgtngcccaggctggagtgcaatggcngantctcggctcactgcaacctctgcntcctgggttcaagcaattctcctgcctcagcatcccgattagctgagattataggcacccaccaccacgctaggctgattttgtattttaagtaatgtgtcagtgtccaatgtctgtccacctctccgcctccaccagtctgatgtggaccttcagtatttcatgttaggctttataggcagtatcttataacattactgatttcttgccattgtaataaattgttaccatattttattatctttatttatttatttatttatttatttttgagatggaattgcgctctgtctcccagctgggagtacagtggtattttggagta

SEQ ID NO: 591008 - DNA, 225 bp, Homo sapiens
tttgcgtactccatgctagaggccgtggtgtgctgcaatctgtagtttgatactcccctgctggcaaggtgctatccagcgccgaccacagtatagcagatgttatccgacagtgcagatgagcaggggccatgtgtagtcttgattgctctcactgacatttctattgatgcagtgtagactttgaatcatactttgacctttcttgagccttatgcgagcgat

SEQ ID NO: 591009 - DNA, 423 bp, Homo sapiens
tgtattgtcagtgggtcagtggacctgcaaaaccatggggaggctagcaaacgaagtataccagttctgggatacgcagccgtccccaagctaggcgaagtggaaacacccatgccccgtggagcctgacaaggacaatatccgccaggagccctacaccctgacccagggcttcacctggaatgctttggacctgggcgatcgtggtgtgctaaaagaactgtacaccctcctgaagtgagaactatgtggaagatgatgacaacatgtcccgatttgattatcccccggagattactaatgtgggctctcacggccacccgattgtatcccccagtggcactgtggggtacaaagtggcctcaagtcgggaaatgggttgggtccataagcgccatccaagcaaacatccattatctatga

SEQ ID NO: 591010 - DNA, 220 bp, Homo sapiens
tgggcgccactccctacgccggtgaaacgagctcatggactgacccggggctgggctcgcagcaggagagaggagggcgaggagggtggcaggcagctcgcttaggcgcattcagactccaagcatcaggaaatcattttgtacaaccacccgaagcagagatattttttaagaagcgtaaattattttcagttgttttctgatcctgcctttttctttt

SEQ ID NO: 591011 - DNA, 321 bp, Homo sapiens
ttttggcccccgggttttgggggggaaaaaaaaaaaaaagggttaggggaaaagggggttttgataaaaaaacccccgccattttgtttttttttggggaaaccccacccagaaaaaaaaggggtttttcccccctaaatccccccccctttttaattttaaaattggggtccctttttttttgggggggccgggtttcccggaaaaattgggggggaaaaaaattaaccccccggttttgtttttagggccggtttttgggaaattccggggggccatttttttttttacccccccccaaaaaaacccgatattttttta

SEQ ID NO: 591012 - DNA, 192 bp, Homo sapiens
ttcccgaacaccttctgcggctgtcttctgcagccctggtgaccgagcctccacagcttttacaggctctgagctgcaaccgatcgcggtggcctccttgctgtcctgcttcttgccttcagaaacttctgacttccgagtcctcttcatgatctcctccagacgctttctgcgctcttgccgctcttgctc

SEQ ID NO: 591013 - DNA, 204 bp, Homo sapiens
cacacctgcactgcatccgaacctgcagacgtggctcggagcacactctgatagtcctcagactgtgtgtgtgtgtgtgtgtgtgtgtagtgtagtgtgtgtgtagtttgtgtgtgtttactcgagaacatttgtctagaagtgggggagcagatatctgcacagataaaacaggatatgtagaaggcacgcgctcacaccgtg

SEQ ID NO: 591014 - DNA, 656 bp, Homo sapiens
gccatgtctatgtgccctcactacagtctccagcaagagccgtaaggtgcttaatacgcagagtaattaagacagggatcagcatatggctatggagaatgaaaggtatgttgactctggctggagccgacctttccagatatatgcttgcagtacattaacgggtcatatagctcttggtgtcagcgggtgggtaagtaaatggcttgagccatttacaactaaagatcggctacctgtctacctgcgagccgactcattcatttaataggcccgagcgtctagcccatgtatcattttgtgagaaaaaagatgggacgcttgcgttgcagaaccttggcttccgtgtgcatgctgcgcataactgatgcagatgtgagaacacatcgcatgggctcgattgaatgtgtgctacccttctcaaccgcagggatttttgtcgaccataaggcagtatacgctttcttgctcccccagatctctaggtatgctgtgccctgcggcacagaagacattgaaaggctacatttgatatctttgagagcaccagggggcctaccctcattttcttccccttgagactcttgtctggttcacatgagccttccagttatctaggagtccgagtttattctgatttgaggttaggagtgctt

SEQ ID NO: 591015 - DNA, 499 bp, Homo sapiens
tgtgagatttgagcttgagagaaggtgagtacacagagcaattgtgcagattgttgtagatgacgaagattgacatgcgacagaggtgtgcaagttcgcataagcagttaatagcatttctaaattttaaaagcaatttggtaaattatcggcgtgagattattatttcgtagttgccaatagcaaacttgcattttcgcattgaatggagaattcgagtgccttgtcaagcgattttaaagtatgacaattatttataaagtgtatggtatggaggaatcgtttagagattctctttcctaattttctttcttattgaagatagattctgtatcaagcaagttaatgggtagtaatgactgtgttgacttcaattttggagcgcagtagcgtatgttaaagatgaactatttggtctcattgaagccaagacagaactagctgctgtgtgtgttcttcagggataaataaaatacttacagaaaagacaacaacaaag

SEQ ID NO: 591016 - DNA, 155 bp, Homo sapiens
ccaagtttcctttgtaaagaattcccttttttcaaattttaaaatttcgacttcagcctttgccctcaggagggtttgctccagcatgagtttttggccttacatagttttaatttatccagtgggtcaagaggtagaataaatgctccccctta

SEQ ID NO: 591017 - DNA, 105 bp, Homo sapiens
tgggctgcagtgggacgtgtggggtttctctcgagtaatgaagggtaactcagggagcctgtcgtgatgccccagggaagctgagtctccattcgagttgcgagg

SEQ ID NO: 591018 - DNA, 250 bp, Homo sapiens
  misc_feature (64)..(64): n is a, c, g, or t
  misc_feature (111)..(111): n is a, c, g, or t
  misc_feature (122)..(122): n is a, c, g, or t
  misc_feature (130)..(130): n is a, c, g, or t
  misc_feature (137)..(137): n is a, c, g, or t
  misc_feature (174)..(174): n is a, c, g, or t
  misc_feature (213)..(213): n is a, c, g, or t
ttctggctgacagtaaatttggcatatttttagtcattatttcttcaagtagtttttgtttttncatcctctctctgtccactcattctgaaccccagttacatgcatgtnagactccgcgntattcccntcatggntctatgactgtattcatgttcaaaataattttttccngtgtctttttgaatcattatctcttgacccgcatttagnttcaccatcatctgtaatctgttaatcccatctaaag

SEQ ID NO: 591019 - DNA, 340 bp, Homo sapiens
  misc_feature (84)..(84): n is a, c, g, or t
  misc_feature (220)..(220): n is a, c, g, or t
gtgtgttgaaggtcagtgcttcactgggagggctcacaggactcagaatatagtgtacttacagctatgatttattacagtgangggaaataaagcaaaatcagcaaagggaaaaagcatattgggggaaatcaggtacaaacttctgagttctctcccagtggagttacgtaggatatgcttaattcctccagcaaccagctatgacaacatgtttgangtgttgtctaccaaggaagctcaactagacactcagtgatcagaatttttattgggaggatggccacatagggcaccctctgtataggtactcttcggactgggcatgtacccagaattt

SEQ ID NO: 591020 - DNA, 363 bp, Homo sapiens
gggccttggcgttggcgccaacacgcgcccactggctcacagccgaaccgtcggtgtcgcttgggaagaagctgctgttgtcagggtgcttgccacggccaccgtccaggtggataccccacagggcctgggcatcgacaccaaaaccaacggtgccttcggtgaagccggagatgtagtcgagcttgaagccctgacccgattcgcggttgtctgcaccgccgtcacggttgtcgttgttgaagtacatggtgcgcgagctgagcgacagtttgctgtcttcaacgaaaccggcagcgcctgcttgttgcgcgagaacccccagtgccacggccagagccagggctgacttgtacatgtatt

SEQ ID NO: 591021 - DNA, 343 bp, Homo sapiens
cccccctcctatatgcacttcagcactggcccagactcacgtttccacctttccaaatcattctcagaaatgttttatccatgtacccacccactcagccgactaaacatctacccacttgccaagcattccctgaacacctaccacatgccaggccccatgccaggcactagggacaagagagacaccttgtccctgtccccaaggaaccggtggtatggaggagggaagaaaacacgctggtgctgccatagtgtgaggatggccccacacaatgctctggtgacagtgtgagccagcagagccaggagcaggaggaaataccctcaacacagggtgttgg

SEQ ID NO: 591022 - DNA, 1088 bp, Homo sapiens
cgctcgtggacagctgacctctgtctttcaacctctgctgtggtcaatcccatgacgcacctgcctgtgcatgccccagtagcaagcaccagtgcagcacatggcaagtcccaaataagtatcactctaaagtatccatcctacactcatatgtgattgatcaatcctgcacacaatgttatcatctgtagggcagccagcacacatgtgtggcatcccaagctcacattgcctccagcatcccgccaatgtacaccatatcacctggtgcacaggcttgatggcatgcaagcactggcgccacacgcaaccaccacatgcattgacagaccaagtgaccaatcaccgcagtggcaaccctgacacacacacaacctccagcctcatgtgctgaaacaacttgcgtgcgatcaatcatcctgtgggtgcacatgtgtggcattcttgttgtacaacccacatgcagtgacactacacattgacaattcaatgggaaccactgttatgccttgtacccaacataccatgatgcccagccttgctttccccgatgactgtctagccactttgcccccattgatgacgcacaaattgtaacatgcccatgaccaccattgcgtctcttggccccgacgaaagcactcccataacaccaatcgcataacgtgtatcaagcacataaccatctaccagatgtacaccaactacaatccatgagatgaatgtgcaacatgatcacgcactgaagaacaccatgttgagcctacgcaagccacacctgtatacccatactcacactctaccccttccaccatatggcatggtcatccacaaggtatccacatggacgcacacaaccctcactcttctatcaacagaaactgattcacatactacggagaccacgcgcaccgatgctcacagcaaccatgactacccccccctaacggccacatctatgaagcacgacacaccgagagcgatcgctacctgtaactatgacaactacaccaacgcgcgtgttacctaaatagcgcagcagccaccacacacacacacacgaccaccctcgaaggacacatcacacc

SEQ ID NO: 591023 - DNA, 285 bp, Homo sapiens
  misc_feature (18)..(18): n is a, c, g, or t
  misc_feature (129)..(129): n is a, c, g, or t
  misc_feature (203)..(203): n is a, c, g, or t
ccaccctgctgattctgntgagtggtggggactccaattggtactctggcacagagaaaccggaatgactaacagcacgggtgcgaaggcctgtaacctatccaggggaggcggggttgtcactgagangggtgggctgagggccctttggaaaccgtctgacgtgagagagttaccgccgttgccaacaccttccctaacgnccttctgatttgtccctaatgaaactcccgtctgtggggtccacatctttgttgatactctagaaaccaatgaaaaaaaaaa

SEQ ID NO: 591024 - DNA, 326 bp, Homo sapiens
  misc_feature (5)..(5): n is a, c, g, or t
  misc_feature (24)..(24): n is a, c, g, or t
  misc_feature (48)..(48): n is a, c, g, or t
  misc_feature (80)..(80): n is a, c, g, or t
  misc_feature (89)..(89): n is a, c, g, or t
  misc_feature (106)..(106): n is a, c, g, or t
  misc_feature (141)..(141): n is a, c, g, or t
  misc_feature (151)..(151): n is a, c, g, or t
  misc_feature (161)..(161): n is a, c, g, or t
  misc_feature (167)..(167): n is a, c, g, or t
taccncaattagcccaggcgtgantggcaggtgcctgtagtcccagcnacttgggaggctgaggcaggagaatcgcctgnaccctgggnggtggaggttgcagtgnaccgaggtcacaccattgcactccagtctgggcgncacagcaagnctccatctcnaaaaanaaaaaaaaaaaaaaaggagggcattggaattaattaaaaatagatcataatgaagtaactctccagagtaaacctacattacaacaaatcaagagaggggagttgtgtaacaatcctagcaagaggcactgacatgatattaaatcaacttggttttaa

SEQ ID NO: 591025 - DNA, 551 bp, Homo sapiens
gcacgctgctgtgtgcctgaggtggctcccgtgacagtacgcggacgggtggatggcggcgcgcgtgtggcagctgtatatctggagacacccgcagcctgcacctgccgagtacaaggcattggcttgcttgggcttgctgcgccagcactggttgccagctgggtgctcgactgtagccttgtggcactgtggtgagcccagtgccggggcctgggggctgttgcatgagatcgggggtcttggctcatgcctggtacttgcgctggcctgcagaaaccacatgtggcctgtgtgcactgtcatgggctggccttttgccaagtccttggaacgggagtgggacaccaagtggccatggatgcagtgtacctggccctggcatgaacatggcacttgcgatgtgcccctgtgagtgctagggggtccatggtagctggttcgcatgggaagaggcccctggatgaagtggagactggggttgtgcagtgatggtgtgtgggcatgaaaaatgtgagctgtcccttgatggcttttggagccaggagcca

SEQ ID NO: 591026 - DNA, 186 bp, Homo sapiens
aaaaaagactggggaggaaaaaaatcaacttagaagatcatatgaaagggcactcacatggaacccagttagtgtcctagtttattacttgtcttcagatccagaaaaaagagtaagaaactagggtaacagaacacctaggcacatctgtaaggcattagtttcctatcacacagcccattctag

SEQ ID NO: 591027 - DNA, 160 bp, Homo sapiens
cggtgtggtggcgcccgggttggacacgtacgttgctgggcgatgtcctcagaacgaacgtatttttgtgtgtgtgtcaggttgcagtggcctttgtgcagcgttgtggtttttgcagagtcttctgtgacagttttgctattatgtatacaagcatgag

SEQ ID NO: 591028 - DNA, 781 bp, Homo sapiens
tgttgcaccgggttcttgtgtgctggcctgtgtatcttctccctcgtgtctgccactggcccatgatgtccccatgtgctgactgttgcatgtggtgccatgtgcccatgtggtgctgtggcatgtcctgagtgggggcttgctgtgctgctccctgtgtggtgcatcctgctgtgctggctgtggctggtgttcgcctgcctgtggcctgcatgtgttcaccttcaccctgcccccttcggtacctggggggagactcctgtgggaacttgatcacatgccgcacatgagctttgtgagtttgcccatcctcctggctatcctttgttcactctggtgtgctaaacttggcaattacacttgtttccttttggttcaatttgcctacctgcgtcaatcttctctgtggcttatttgtgagcatgtagctgcatcattactttttttcacctgttttcatgtgctttcttggctcatctgctggacggaatccttgctgcgggggtgttttcattttctcagtctaacattgtgcagtgtgtccattgcagcagaggtaatagcttaaacaatctctttgtggggctgcttatgtgctcttactgtacattttgaggaagcaagcaaatgctaaggagagatcaaaggtagctaaaattggtgtatcatctgatggcataaatatgtaaccagacaaaaaataatcaggagtgataaaccttgatcctttaatttaaaagaggaattcccgggccatggataactgaaaagagatagcatc

SEQ ID NO: 591029 - DNA, 154 bp, Homo sapiens
ttgcattaagacttgaaagacttccagacgtgtgatcttcaggcccaggatgctcaaacccatctcactattcttagtttgtaaatcctccttttcataccatcatcttgttttctttttgtaggtataactacaaacactcttgacaataaaa

SEQ ID NO: 591030 - DNA, 360 bp, Homo sapiens
tacatgccctgcctgcttctgtctgggtttattacccccaagtcaacccccagcaagtcctccgctcgagccttcagtcccctgctgccctgcctgcaagagctgaggggcccttcttggtgtcaggatttcttagtccatgccagctggcccctcctgcgcagccaggatggcgtccaggtccctgatggtccacagtgtgtcccctggggctcggtggagcaatccgggcgggcgtcggcgtggaggaagcagtgccttcaatcatcgtgggaacaggccaggtggcaactgatccgggacttgcccacgctgccagtgctggagcttccatcgcctaggtccgcggggccttgtacg

SEQ ID NO: 591031 - DNA, 786 bp, Homo sapiens
  misc_feature (786)..(786): n is a, c, g, or t
tgggttacggcagcactttaatttttccttacacaaggacgtgtggctggggcctaaggttctcacataacagtaaaaacaccaaaattggtggtcatctcttcaaagaattcgagaatggcgtacaaaaaaaaccttacataatattaagaagtggaatacttttacgggcgtaaagtgcaaaccgcttctccaacttcaagcaagtaacagcccaacgggtgttcgggccaaagacatcagctacgaaaggaaacggggctcctacggctgggacttctccaacccgtgacagacccgcaagacaaaacaactgggttctggccagcctctagagaaatcccagaacactcagccctgacacgtaaataccctgcgacagatcagaggctggctgggccacacagactcaccaagccacagatcttgtcttccacaagcacgttcttacctttagccacgaaagtgaccaagccacacgtactaagggtggacctcaaagatttgtccggggctattaaacaaatcccaggggggaccagcttacacttcaatacaggggtcaaacatcagcaaccaagttctacaacccagctgctgatatcagatacaagtcttcaaggacaaatttcttcttcgaaggcttatcccagtttccgtgaggctagcatgagggtttgtgccattggccagcgggaaattctattctcaataaccatgcgaaatgctaacgcatctgagaatcggtaaaaacatcgcgggcagagagggggcaaactggaaccn

SEQ ID NO: 591032 - DNA, 294 bp, Homo sapiens
cctcatcaaatcagttttgccctgtgaaaagatccagccttccctgtcgtcaaggtggggttttactcgggatttttgctgttgttgtggccttgggtaaaggcctccccttagaacacaggacaggcctgctgacaagggtgagttttccttggcaaagaccaaaatatttttttccgggcccctggggaattttaggggtgatgggaaaaaaggaacctggagtggaaggagcagagttgcaaattaaccacttgcaaattaggtgcaaataaaatgcagatgattgcgcga

SEQ ID NO: 591033 - DNA, 225 bp, Homo sapiens
tgctcaggatgcgctcttatgaggccctatttcctgagaaggagattgaggctaacccagaagttgacagcttagcgtgggaagcccaatgatgatgatatacgggagcccgatggaatctcatagctcgagcagcacgtttcggcaccaacctgcaccccaagagcatctataaaagttgtcacatacttggcgccgggcatctcgtttcactccactaccatg

SEQ ID NO: 591034 - DNA, 223 bp, Homo sapiens
tcagctggtaccgtcagacgctgaactatgtgggaagagagctaggtagaacggtcagtcaacagactggaacgcatataaaggctgctgttttccattttccttcttttttttttgttttttggtttttttttttttttggaaatggtgtcctcactcgtgtcacccaggcgtggagtgcaggggcacattagttccagcgtttgaggggaactcctctaga

SEQ ID NO: 591035 - DNA, 245 bp, Homo sapiens
aaggaaaccatagaatttgaaaaggaaataaaccagtgctctcaggggatctgagaaaacagcaccatatatattagtttaaaaaattaaatattatttacaaaagtatattttacaagcaactgtttcttgtgatatatatccacttgaagaatctctttatggggggtcatctctgtcgcacagacggatccaccagtaaaaatgcactctagcctatcctcgtgacggctagaagaacacgt

SEQ ID NO: 591036 - DNA, 1013 bp, Homo sapiens
cgaggaggggttatcacaactgccacttcccctgcctgtggccctctcagcagaacggtcctgcacaacaagtctgaaggaatggctcccgtgtcttcatctacggtcagttctgtaacgaaaacttctgggcagcagcaagtgtgtgtgagccaggccaccgtgggaacctgcaaggttggcacaccccaccgtcgattcagggcgactcacgtcacctcgtgcctacaccaaaccccatctctgggagagccacagtatcctggactgttcaaatgattcacgtccagatctagtccatgtcctgcagacgaggccgtccatgacgagttccccaggcagctcaaagcactcagcgtagagacatctggaggggtgcgagacagatccgtgatgccctgtgaataaagtggtgcagtcattatatctaccagcagagccacctgccattctgccgtgtaggctggcccaactccagttgtccccagctctgtctccagcagactgttgcaaaagtgaagactgaaccagaaactcctggaccgagtgtgcctctctcaggagggtcagacagcagtgactacagaagaaagttctgagctgggaaactatgtcagtttaagatagaccatttagaaactatccatggcaattcctaactgcagtattaacagaagattgccattaatcactgcgaaaagtgaagataggcagatgttgactgcagaagtctgggagcagtactatggctggaacattggagacatcgagagcggtgagtggcaccgagcatgataaggcgaaagtcttcaacgaatcctggacaacgatccgaaattcacacctgatccctcaagcaaggaatcgccatgctgccgtgtaaggtaaccccaacggagctgagactgagagagacgggccacgagagcattccgcaatcaacagaccagttcccattgccctgggaactcgcgactggcggcgaacaagacgaagggggcgacacccgggaa

SEQ ID NO: 591037 - DNA, 83 bp, Homo sapiens
gcacgaggaaaagacaacaacagtgaaagtaagtgtccccagatgcttgtggcaaatgaaaagatggatactttaaagattaa

SEQ ID NO: 591038 - DNA, 628 bp, Homo sapiens
  misc_feature (197)..(197): n is a, c, g, or t
  misc_feature (401)..(401): n is a, c, g, or t
  misc_feature (487)..(487): n is a, c, g, or t
tcacatcatcagactaggtgagtagtgtcctccaggctctggtagcacgtgacagaaacccactcaaattaagtaaaaaagagaaatcgattattataaggaatggggagaatgtcacatcgttccaattacaaactgttggcagactcaccattgagtcatcttgggtcaaacatccaaccacagaccacctgagncaaggggattgggtcacgcagaacagacatgattggggaacccacttatgtgggtgggggcggtttcctggagaggaagagggctgaaaacacatgccaaaaaggagtctactccacttgagccctggagttggagaccagcctgggcaacatggtgaaaccctgtctctacaaaaagtacaaaaataggctgggcgcagtggntcatacctgtaatcccagctactcgggaggctgagacatgagaatcacttgaacccaggaggtagaggttgcagtgagcagagctngctccactgcactccagcctgggcaacagagcaagactctgcctcaaaaatcaaaccaacaaaaaatagctgtgtgtggtggtgtgctcctgtaggtccagctactcgggaggctgaggtggaaggatagctcaagcccag

SEQ ID NO: 591039 - DNA, 202 bp, Homo sapiens
atgaagtcgggtgatagctgccatagtagatatggttcctggcaacgcccatgtgtgttggagagcttctcagactatccaccttatggcgtcgctatagctggttcgtgatatagaaacagacagtgtgcggtggagtagtcatcaacagcagtggacaagcaaggctagctgaagctaggcaagggtcaccaaagtctgc

SEQ ID NO: 591040 - DNA, 492 bp, Homo sapiens
  misc_feature (26)..(26): n is a, c, g, or t
caagaacccccttcccgtcaccccanccaatgttgttttccggctcgaaggctctgggttacaaaggcccaagatcctcaacgttggggacattggaggcaataaaacagtgaccctgccccagttgtttgtgcctgtgcgaccaggccccccccagctcattgccagcttggacagcccccagctttcccaggtgcacggtgtcatccaggtggatgtggccccagcccctggggatgggggctttttttcaaacgctggaggtgacagtcccttaggaaagaccatccctatggcatctcgaggtggagcttaaccctgtgccaggaacaatggggctggagtcaaatgagcaaggacattgccccaaaataggggccccctacaaaacagctccccaggagctcaggtggggagtccagggctcccggaaaaggagtcagttttcccttgccctgggggaacaaatgctaataaactgttttttaatga

SEQ ID NO: 591041 - DNA, 851 bp, Homo sapiens
  misc_feature (125)..(125): n is a, c, g, or t
  misc_feature (162)..(162): n is a, c, g, or t
  misc_feature (219)..(219): n is a, c, g, or t
  misc_feature (263)..(263): n is a, c, g, or t
  misc_feature (851)..(851): n is a, c, g, or t
gcggaggctctgctcggatcgaggtctgcagcgcagcttcgggagcatgagtgctgcagtgactgcagggaagctggcacgggcaccggccgaccctgggaaagccggggtccccggagttgcangctccctggagctccggcggctggctccaccggcganaagagatcccggaggtcctagtggacccacgcagcctggctggcgcatatgtgcgtnggccgcttttatgggcaatgggctggctttgccaatgtgcttcngagatctcggacgcggacaccaaaggaggtgttcgcgggcaagattgtgcctaagtctctgctgctcaagccgcaccagagggagaagatgtccatggaaaatatccattcaccgcagcctcgcccaccagcacgtcgtagtgatccaaggcttttgcgaggacaacgacttcgtgtccggggtgtgggaagctctgccgccggaagggtctctcctggagctgcacaagaggaggaagccctgactgagcctgaggccgatactacctacggcaaattggtgctgtggcttgccagtacctgcgccgaaaccgagttataccctcgagacctcaagctgggcaagcttttccctgaatggaagatctgcaggtggaaaatacggggattgtggaatggcaaccaaagtcggatatgacggggagaggaagagacctgtgtgggactcgtagttaaatagctccgaggtgtgacaagaaaggcacacgttcgaggtgatgggtgccaatggtggatcatgtttccttgttagtgtggcaaacacttttgagattttgccaaaagagactacctcggttagaaatgacn

SEQ ID NO: 591042 - DNA, 138 bp, Homo sapiens
cctctagaggatacacacccgtccccagccccttcacacatggaccactcctcaaatgggggttgaggggcaatgacactgggtatgagtgaagcagaagagatttagaggcagtcatggaatttgtggcgaaaataa

SEQ ID NO: 591043 - DNA, 442 bp, Homo sapiens
tcatttgacaccagaccaacttagactgtgcccccaaaaaacttgtcatccctactatcttttgtctagtcatactcctattcaccattctcaactactcatacatgccctgctcttgtttatactgctggtttacactgtttctccaagccatcacagatatctcctgctgctatccccaaactgccactctaaactcttgaagtaaataaataatctttgctggcaggactatgctgaatctccttaggcactctctaatcagatgtcctaggtcctcccaattcttagaccttttatacctgtttttctccttctcttattccatttagtttttcaattcatacaaaaccgtatccaggccatcaccaatcattctgtacgacaaatgtttcttctaacaaacccaaaatagcaccccctctaccccctctagagccaa

SEQ ID NO: 591044 - DNA, 687 bp, Homo sapiens
  misc_feature (111)..(111): n is a, c, g, or t
  misc_feature (121)..(121): n is a, c, g, or t
  misc_feature (127)..(127): n is a, c, g, or t
  misc_feature (553)..(553): n is a, c, g, or t
  misc_feature (574)..(574): n is a, c, g, or t
  misc_feature (604)..(604): n is a, c, g, or t
  misc_feature (613)..(613): n is a, c, g, or t
  misc_feature (622)..(622): n is a, c, g, or t
  misc_feature (629)..(629): n is a, c, g, or t
  misc_feature (631)..(631): n is a, c, g, or t
gcccaacgggggcgatgagcgatccttgggcgggtttgcccgccggagtaatccggaagaggcctcttattagggctctggtggcggcggtcgcggacactttgggtctgnacgcaacgcngcgggncatgaacgccctccagccttcgagtcgttcttgctcttcgagggcgagaagatcaccattaacaaggacaccaaggtacccatgcctgcttatcaccatcaacaaagaagaccactgcactccagcctaggtaacagagcaggactccatctcagtcaatcaatcaatcaatcaatctcagcggttgaactacccttgacatggttcagctctgtatccacacccaaatgtcatgtcaaattgtaattcccagtgttgtgggagggacctggtgggaggtgattggctcatgggggccgacttcccccttgctgttcttgtgatattgagtgagcgcttgtgggatctggttgtttaaaagcgtgcagccctcccacttcactctctctgtctctcctgctccaacatggccagacgtgcctcttncccttcgcctctgcgtgattntcagtttcctgaggcctcccagccacgttnctgtcagcntgcagactntggatananccttttctctactcccatatatacgtttggaagcttttgggcatctaaaagaggga

SEQ ID NO: 591045 - DNA, 1032 bp, Homo sapiens
ggggactctgctgccggcttctcggagcggcgctgggcgaccagagcagggtcgagatgtcctacatcccgggccagccggtcaccgccgtggtgcaaagagttgaaattcacaccggctacgaagcttggcccagatgaagccaggtgggctccgcgttcactcccactctcccgagggggtgctggcctcccccagggtttggccttcttacggatttagaccgaggtacgaggctcaccttatcagcgcagctctcaggatcgtcatttgcctcttttgcctgtgggttcacacttgcgtattcttttaatcacaagtttgatacaaaagtgtccatcgtactcttgggagatgcccattctactttggaattcagcttttactaattcgcatctgggaagctcagcaagtgcacaagccttaacttggggttaccggtggaaaacccatggccggccctttccccgattgttggtgcgctcaataaacaattgctggaaaccaaaaaataaaaacacacacacataaacatcacaacacactttcgggagcgacacgatgacactctaaaaagccttttacacccccatcgcatgagagcgcgcggagccaccaatagtacagcgcaccccggccacaagcgtgtccaccaaagagaactccagggacacagaacacagggggcggagtctcaccaaataaaaaaggcgcgggggagccacgagacgggtgttgtgaacacaccacaaaaggggccacgaggccacaacgggcggctcacacaacgaggcccaaagcaaacgcaagaataaccgcgccgccacgctggtggagaacgacagcaaccacaaagctgaaaggggagcaaaggagagacgtaaaagtagaaaagtaccacagatacattctagagaggagtggtagtggctagaataagaaagaataacaacgcaaggtagtatgtacagaacacaataacgaggtaaagggacagacgaatagtagcagtaagatagaaagaggaaaaaa

SEQ ID NO: 591046 - DNA, 405 bp, Homo sapiens
  misc_feature (111)..(111): n is a, c, g, or t
  misc_feature (121)..(121): n is a, c, g, or t
  misc_feature (127)..(127): n is a, c, g, or t
  misc_feature (271)..(271): n is a, c, g, or t
  misc_feature (292)..(292): n is a, c, g, or t
  misc_feature (322)..(322): n is a, c, g, or t
  misc_feature (331)..(331): n is a, c, g, or t
  misc_feature (340)..(340): n is a, c, g, or t
  misc_feature (347)..(347): n is a, c, g, or t
  misc_feature (349)..(349): n is a, c, g, or t
gcccaacgggggcgatgagcgatccttgggcgggtttgcccgccggagtaatccggaagaggcctcttattagggctctggtggcggcggtcgcggacactttgggtctgnacgcaacgcngcgggncatgaacgccctccagccttcgagtcgttcttgctcttcgagggcgagaagatcaccattaacaaggacaccaaggtacccatgcctgcttatcaccatcacaagagacacacactgggaacatcattaaatacgtgcctcttncccttcgcctctgcgtgattntcagtttcctgaggcctcccagccacgttnctgtcagcntgcagactntggatananccttttctctactcccatatatacgtttggaagcttttgggcatctaaaagaggga

SEQ ID NO: 591047 - DNA, 457 bp, Homo sapiens
  misc_feature (164)..(164): n is a, c, g, or t
ggggactctgctgccggcttctcggagcggcgctgggcgaccagagcagggtcgagatgtcctacatcccgggccagccggtcaccgccgtggtgcaaagagttgaaattcacaagctgcgtcaaggtgagaattaatcctgggtttcagcattggaggtggantcgaccaggacccttcccagaatcccttctctgaagacaagacggacaagggtatctatgtcacacgggtgtctgaaggaggccctgctgaaatcgctggcctgcagatttggagaccaagatcatgccaggtgaaccggcttgggaccatgaaccattggtcacacaggaaccagggccccggaaagcggttcaccaagcgctcggaggaggtggtgcgtctgctggtgacgcggcaagtcgctgcagaaggccgtgcagcaggtccatgctggtcctaagcagtcagcaga

SEQ ID NO: 591048 - DNA, 592 bp, Homo sapiens
  misc_feature (126)..(126): n is a, c, g, or t
agccccacctgtgccctgtgtcggattttctgtgccccaagttactctgccagactgactggaggggaggatttggagcctgccagctcacactactcctgtggctctggagtgggcatcttcctnagagtacgggaatgtcaggtgctatttttagctggcaaaaccaaaggctgtttttattctcctccttaccttgatgactatggggagaccgaccagggactcagacggggaaatcctttacatttatgcaaagagcgattcaaaaagattcaaaagctttggccccaacccagtgtcccaaaggaaattggacatgcccaggaagccaatcaaaccctggttggcattggctggcaacatttataatttttgcccccccaaaaaaccccaacttggggtttttttaccccagttggctttttaaaaaaaaaaaaagttttgctgaatttggaaaaaaattttttatttaaactttccttccccgttttaaagtttttggttttgagggctgatgaaaatcattttccatcagcaaatttttttgccctgtttgctgggccccccaaaaaaaatgttttgggtttta

SEQ ID NO: 591049 - DNA, 1120 bp, Homo sapiens
gttgagaaccgtttgggctgttggggctgtgggattgcgagagtgtgggggagagggaggcgggaagtaggtggggcggttagcaggtggaggcaaagcgggtacgcaagttacagttgtggtaggtgtggggctaggtacggtaggagtggggtagaggggtgtgggaatttgcgtgcggggttccagtttatggagcatgggcccctggttgcgcggcacttgtcgtgacatcgcgtgggtgacgcgcgggcgcgggctagttgagtggcgtagcgtcggggcatagtggcgtctgtgcgaatgtcttgtcgatggccacctttctgtctctgccccgtggcctcctattgtgcaggagagggcgctttcgtcctggggcgcaggcccagctcttcgttagggccgccaagctttgggaacattaggtgctatcatgggatctatggtttgggcagtgctgcagagtgagcccgtcctgttataggtgcttcgcgtgtggcctaggcgtgagcagccaggcgcgcgtgatgacgttggggtatgggcacgcggatggcatggctgtactataagagtgataggggtgacctacgtgctaggcaatcgttcgctcagtggatcccctacggtcctgcgcctgctgctggtgactgtgtcgcaggtgtagtcatcggggatgtcgccatttcaagggggtcatggtcactctgtgactagtctacgctagtcgcgctgcttcacgctgctccactcctgtacctacaatggtacgttcgcctacgatcgcagacctgctgtgtgaacttgtagacagtctgtacaatttcggcttatgtcttgtgcctgacgttggccatatattggtgacactcgaggcacgaacagataatcggagaaccctgggtaacggacctggttcttttgcttacttcggggaactgtaagccctcgcgttctgggaatcgctcatctgctgctctgtgtcctaggaagctaagcctgtctccaccgcccgaggcctgacgccggtggctcccagccgcagttgcgttagcattggaccttgcgtccgagggtaggaggtgctcggtccgagcccgctcctttcattacacca

SEQ ID NO: 591050 - DNA, 93 bp, Homo sapiens
tggttcatgttctttattgaacaccttacatgggtttggacagggcctatgggtggcatagtcaaaggcgaactttgcaatccgctgaaactt

SEQ ID NO: 591051 - DNA, 934 bp, Homo sapiens
  misc_feature (130)..(130): n is a, c, g, or t
tcattaactgcttctcacatttgttgatttatgggcctcctatcatatcgtgtatgtaccccggtgaaatcggtcacgttgtttgtatgtgcttattgtatcccacaactgtgtacaccaaaggcccggnggacaacccgtaactatgttcaaaaaatcctccacattgacaaaccaaatttggcttgtataacagcttacccccttcagtgtgccgactgggatggcccccgaaggatagtccaaagtcgtcaaaccaaatctggtatgagaatcatccccgatacccaggtgattacaccaaccggctcatctccaggaagttttatataagggcctagtctttccgtcatgatcattgcccacgacaagccggcaacaagatgggataaaaaagcagtcaagctcgtgccccaccacagcagatgcactcgtgactctttcaagccaacccccaacgagggctcaataagtgtcagggggcccgcccatgggcacaatacaaatcgatgagcatccacatgacaagaacagttctgaaacaaaagcgtcattcattttatgaggcgcacccccaccactgtgcgtgtatcacacaaccgggaatcgccccacacatcagggatgcgcctgcaggcataagtcttttggtgtccaccaaacatggtagtgtgttaaaattttgagcgccccacaatagaggcagggactatgacaagggttcagcaaaaaatacggtggtcgtagtgccaaacaataccagccccattgttatgcacgcagagaatcaggcatggcgaccaaacgaagcgaagtcaaaatcctagttggtggtcatacccgaggtacgagggagaacaagctgtcgggagaggcccttgcggaggcctctgaaaccccaatctaccaaaaaggcaaaaaagacccacaaaac

SEQ ID NO: 591052 - DNA, 245 bp, Homo sapiens
cgtggtatgcccaccttagaaggtgactcaaccatggtcacctcgcctctggcaatttcaagtcagcccagactccctcacagatggtgcccttgcattctgccaacccgccaggaacctctcaagtcgccccaggtcctcggctcctccctcagtgtccgttcacccactgactcgcccagcagtctcaagtctccttccatggcggtgccttctccagagctggagtagcctcacctaaagac

SEQ ID NO: 591053 - DNA, 368 bp, Homo sapiens
  misc_feature (256)..(256): n is a, c, g, or t
  misc_feature (294)..(294): n is a, c, g, or t
  misc_feature (359)..(359): n is a, c, g, or t
catttgtataaaagaatttgtgataaatatatccaggtgctcaccaaagaaacatgtattaacaacttaaattagatttttctaactgatagttttcactcatttataatcagtagaaaagccggttaaaatgttggggcagctcaatgatttaagtttgtaacatgtaataactgaatttaggaccctaggtttggttaagctttaagattttttaaaaaaacttactccccctgcctccccagccttatgtttnttttaatgacttttggatcctgagctccctttgcagtntgaaaaaggtattgcagtcagaactgtgtactgatgataaaagcctctggtagcaataaaaagtngtccttaaa

SEQ ID NO: 591054 - DNA, 359 bp, Homo sapiens
tctggtgccgtaaaaatgtgtggatgctgggggagggggggcacttggggggtaaaatgtgtattgttgtgggtttggggggtagggggcttgttacgttatattaaatcgatggaggggatattcctggtgttattatttgggggggatttgttgagtcatagttaaattgtttatgtgtgtgattgtgtgttaaattgttttgtaattcttttagtaggggttatttttttcttataataaggtgctttattgttttgtttttcttatccctatggtattttcttatttactttgtggcttttgtttttatattttgtaattttttcgctgtgttttttagttattatactgtgacc

SEQ ID NO: 591055 - DNA, 139 bp, Homo sapiens
  misc_feature (130)..(130): n is a, c, g, or t
tctctctctctctctctctctctctctctctctctctctctctctctctctctctctctctctctctctcaaggtattgcagtcagaactgtgtactgatgataaaagcctctggtagcaataaaaagtngtccttaaa

SEQ ID NO: 591056 - DNA, 913 bp, Homo sapiens
ggcttcgcggtagacggacagaggagtcgtagcggtcgaggctttggcggctccgggtgccgaaaagtatgtatgcataagagtggatcaattaacatgataaatgagaatggccacatatctttcaagaggagaagtactagaagtttataaaaatctggtgtatcttggatgagatattccaaaaggagcagactatttgtacacacaggcgtttgaagaacattttccttataaacaaagatgtgaagaatccagagaagatcaaagaatttattgcacggggcgaatctgtaatgaaagagctagaagcttgtacttccttaggaaatacagagctatgaaacaaggctattattcagataccatcaaaactaattgatcattactactttattgtacgctatcagtgccagctgtaatgtataccgtgatgttgtcaaataattctaacttacaacatgggaagatcctacattgtctgtgtaaaaaatccctgagtgccctactgaatctaaatgaggttccaaattcgtgttcatacggagaactgtatcagcactttatgctcaagcttgatacaagcatagcaattagctatactaccgatcatagggttatgagccccccctctgaatgacaatattatacattgaatctctaagtaataggacttacgccattatttgagttatacccattgactgacaagagaatgcatttaccgaacattataagcaatatttctacccctctgctctcgaactctggaggaccttttttccccgtgttattacaggctctccgtccaacacaggcggtgtagcttgtcacacaacttggcgcgcgcaacggggggggagacaaaactaatatggcggcacacggctgaataaaaccactcgggggcaca

SEQ ID NO: 591057 - DNA, 375 bp, Homo sapiens
ctgctccgcccctctctgtgggacttgacaaggggccccgaggccaagggagaccactcctccctccaggcctatgacttttactttgtgggtctctaaaaaccatgtacacactttcactctattgtaaccacacagggcacgcgcatacagcatgtcagagagctgccccgggcagctctccctcccgggcacgctacctctggcctggtgtagcaccgagaggacggatgtcatcatgctattagcggaagagccttgagcttaaaagctcttcattttctttgccggaaagcatatggtttgtgtttttgcagttttatttttttaaggatggacactaaatctctggtgccatgttccctagcccgtggc

SEQ ID NO: 591058 - DNA, 224 bp, Homo sapiens
ttgatagatcgttcgtgcaagaataggaggtggagtgctgctagggctgccataattaagggccaagatgaatgtgaaaggtcaagaatcgtgtgagggtgggactgtctactgagtatcctcctcagattcattgaactacgtctgtcccaatgctttgggatggcggttagtaagtttgtaattactatggcccctcacaatgatatttgtccttactcgag

SEQ ID NO: 591059 - DNA, 283 bp, Homo sapiens
gacagtgtctctcacccagtctggaatgcaacagcgtggtctcggctcactgcaacttccacctcccgggttcaaaggattcttgtgcctcagcctcctgagtagctgggactacaggcatgtgacactatgcctagctaatttttttgttatttttaagtagagacggggttttgccatgttggcccaggcaggcggatcacttgaggccagaatttgagaccagcctggccaacatggcgaaaccctgtatcactcttttagacccttctgtcgtcttctc

SEQ ID NO: 591060 - DNA, 461 bp, Homo sapiens
  misc_feature (449)..(449): n is a, c, g, or t
gcatttccatgctgcctctgggccttcagcttctctgtcttcctccctcagcaccaaagccccgtctcttccattaggagcttgtcttcctgctgggggtgttacctgactctttggcccaccctcgggcctctgtggaggcctccttgaggcctgactggggggggtcttgtgtgggctgcaggtgtgcactgggcctgcttgtggccaggccaggcctctgggggcagcatcaggcacgtctgtgtggctgtgggggtgcagggagctccagcccagaaggaaggaggggcggggctggggaaggggctcggcagctttgcctgtggtcgtccgcacctgccaccggcctactttgcctgtggtcgtccgcacctgccaccggcctactttgtcctagacctcccttttgcaaaagtgctcagaaatataaatatttaatttaaaantgaaaaaaaaaa

SEQ ID NO: 591061 - DNA, 114 bp, Homo sapiens
cgtatccctttggaaactcggcggggtacactttgccgacgttccttttacttatttttaacccttctccttactgacgcactgcctgtgctagggttgaccacgtgacgggta

SEQ ID NO: 591062 - DNA, 104 bp, Homo sapiens
gagctgcagttcaggaaacagtgacagtatttatgccaatgataaaactcagactttcaagcaaaagttaggatttgtgaagcttttatccacataactgatct

SEQ ID NO: 591063 - DNA, 283 bp, Homo sapiens
ggggggcctttttaccccctgggttttcccctggggcccccttatgccccctgcctaagattgaggggaaaatttaaacagccccgccccccggaaaatagggttttggtggggtggtggttaaaaggaaacccccttttttggggaaggggtttttttaaaacttttcccatttgggttccctaattcgggttttttttcccccaaatggggaagggggttttgggccgggtaatgaaattgaattgccccaaaccccatagaaattttttggggtggccca

SEQ ID NO: 591064 - DNA, 508 bp, Homo sapiens
  misc_feature (124)..(124): n is a, c, g, or t
taaaaaagacccattttggccgtgatctaaaagggcattagctgatggttagtatacacaaatggggttgtagaatattttgtcttggtgcctggaatttgcttttacgaactcacttgagagncagcggccagggaagagctctctctcacctgaatgcttagcagagcaagccatcaaaaccttccaggaagtgcaagccaaagggtctgaattggaggcacctccccaaagatcaaaagttatgctccaccaacacagagacactgagaaatggttgaatgtgttctaaattaaactgccctggtggtgagcagagatctgccaaaatctttcaattaatcacttttaccttcagggcagagttaggcctgagagtatttcaatagatttttattggaacagagttatttcagatattaaactatgttgcacaaagtaaaaataatgttatttttaagttgctactcttgttaaataaaagttggcaagcgttaaaaaaaaaaaa

SEQ ID NO: 591065 - DNA, 517 bp, Homo sapiens
  misc_feature (40)..(40): n is a, c, g, or t
  misc_feature (122)..(122): n is a, c, g, or t
  misc_feature (136)..(136): n is a, c, g, or t
  misc_feature (143)..(143): n is a, c, g, or t
  misc_feature (145)..(146): n is a, c, g, or t
  misc_feature (186)..(186): n is a, c, g, or t
  misc_feature (220)..(220): n is a, c, g, or t
  misc_feature (227)..(227): n is a, c, g, or t
  misc_feature (275)..(275): n is a, c, g, or t
  misc_feature (296)..(296): n is a, c, g, or t
  misc_feature (430)..(430): n is a, c, g, or t
  misc_feature (493)..(493): n is a, c, g, or t
  misc_feature (502)..(502): n is a, c, g, or t
agtacattacacagctggatgagatgcagcggcactggcnggctgtcgaggacgagaagaagacgctgaactcgctgctgcgcatggccatccagcagaagctggcgctgacccagcggctngagctgctcgagcntggaccntnntgcagacccggcgtggccgtgccaaagccgcccccgaagnccaagccagccacaccgagcctgtatagtagctnccaggangactttggccacccggccctggtcacactgcagccccttccccttccntctcgtgggcccacaatgganggaaggaaggggaaacctaaaaaggcccactttagaaactttttggaatatgccacttgcaaattcttttcaaaataagcattcccccagggtttttaaatggggaagggaaaaaaaaggcttttaaatggttngaagcatggcttgcgaagcttgcttggcgttgggaaaagggcctcttggtaatggggcccggnagaaccccnttctttcccctgggc

SEQ ID NO: 591066 - DNA, 408 bp, Homo sapiens
  misc_feature (47)..(47): n is a, c, g, or t
actctagaggatctcggactgaagctggctcagaatccccatgtttngcgtttttcctcttactacttattatcactgagttggggagcctattctagaccccgaatgacctgtgagactctgaagtactccaaattagtgtggtgagagactggtgccttttatgggaaaaggcctgttttttccccgggaaagaatgcctattcagaggctaaagagaccgtggggactggcgtgtttggggtccccattaatcttggactccagcagtgggaagtaattaaggaacccgggtgatttggcttcccagggctctgatattccccctttccttgcccacacccttctttaccaggcttccagtgcttaccagggttcagttgcctgaacagggcttcagtggcgggt

SEQ ID NO: 591067 - DNA, 518 bp, Homo sapiens
ctctccagacaccccttgcccgggagcagctggacccagcctgccttctccagccccggggcggctgcttagccccaggtgccgttaacaatggccggcctgtgtcagggtccccattcaccatgtgcacaggaagcccagctcgggccatgcatctgattttgcaccagctcctgcccagcccacctgagaatgcagatgtttggatccagtggggaatgtgttcctgctccatgctcccaatttcagaacaaactttgagctgagctacagctttctcattgatccccttctagtcttctgaacaaattagtctgtgattttttatttttttccatttattgctgacccttttggatttatgaggccgtgtgagaggaattatgtatctcacacacacgcatctggcatgacgataaatctccaccactgaagccccgcagatttgcagcgaatctgatggctcccaggctcgctgccacgtggttggtgctgacgtgcggcgcaatgcggtggcg

SEQ ID NO: 591068 - DNA, 266 bp, Homo sapiens
tcccaaaacgcttgcaggaggcctataacaaacattaccagcccagctgggcaccatttagcagatgcaaccagatattcacagaaggggagcttatggatctccatgcctccacctcctgacatgccgtctgctagcaatatacgacgaccgagcaaacgctgcagatgccaaacattccacgctctctatccgattaaacatattccaaaaggctgattcgactgcacaggacggtctccgattctgcagcctactacagtagc

SEQ ID NO: 591069 - DNA, 468 bp, Homo sapiens
  misc_feature (35)..(35): n is a, c, g, or t
  misc_feature (73)..(73): n is a, c, g, or t
tgataaagacatttgaaaatctgtctttctggctntccgaattcggcacgagaaaaggctttttaaaaaaaangttcctttgaagttggggcatggatgcttacaagcctgtaatctcagaaagttgggaagctaaggcaagagaaccagaagatcaaggccagactggattattataatatgaccccatcttagagacatcgagaaaaagacagacagacagacagacagacagacacaacctcaatttctcagacccagtgggacatgggttgtgcccctatgaccactcacaagtaagttagctgggcgcttagctcagtggctgtagtagccctgactacagtagtcttggccttactcagggagccaccctgtcagtctgtaagcctctccgttggcctgttcttgcctagcccatcttcactgggcttctgtgtgggcactattacttggagcagtacattt

SEQ ID NO: 591070 - DNA, 107 bp, Homo sapiens
aactcgtagtaacgttagactaggagcaaaggtgaccaccatgagcgggtaagagaacaccagtactacacactcggacaacaggaacagtaaccaataccaccaat

SEQ ID NO: 591071 - DNA, 248 bp, Homo sapiens
agtgcgttgaaccccaggccagtcagccagcgggaagagctagaaggaccagaggccagtgagggaggaaagacccacagtcctgcaggtctggaggagccagcccttaggggttctctgcgccctgcaggagaacaggaaggagagaggcaggagacgtgagcctgcaacagagctgactcaggcaggggcaggatcctcccggtcaaggggaggagaggaagggctcctcagaagggggaagtagc

SEQ ID NO: 591072 - DNA, 385 bp, Homo sapiens
catatatctggataaaccatacaaatatgactgtaccttcaaaatctgacactaccactgataatcaatatcagtgcaattgcacgatgtaacagtatacgatctcaaactgctatgtatacatgtgtcttaattttatatgtctaacgtcatataggaatacctgaccccctatacataagaggggccgtaggcacatggcatatcataaactatggcctaggcgcagtcataaaatgcatactctgaaacaaacagggagactcgttgtactagtaataacaaaagtataatttatatccagtaggtataggtatcggctgaactgtgtgtcctcaaaattcatacgtttaagacctaaccctcaccaccatagaatgtgact

SEQ ID NO: 591073 - DNA, 137 bp, Homo sapiens
agcagtggaagaaatagcaccgtgtgagaaaggatcccttggcgtccttgaatggctaccaagcttgacaggtaatgaaaaaagtacatggtagagacaataaacgaacagaatagagagactgacaatgccagaag

SEQ ID NO: 591074 - DNA, 211 bp, Homo sapiens
gtgctggaacctgaccaggattgtcagtcaactcattgtaggactctggccttccttcaaattagctacaagttcaacaaagtggtcatatgcagtagctaaattctccaaaacttcttctcttaagttagcttcattattagatagtttcattttcgaaaatacctgatgtgagacctgaatatatttaagaagtcctgcgaacctatga

SEQ ID NO: 591075 - DNA, 122 bp, Homo sapiens
catttagactagggcagaacgctctctctcaattagatttctaatgaaatttcttaatcggtgcattgaggtttccacatctttttccaagcagtgccccacttcatggatttatagctata

SEQ ID NO: 591076 - DNA, 214 bp, Homo sapiens
  misc_feature (80)..(81): n is a, c, g, or t
  misc_feature (85)..(85): n is a, c, g, or t
  misc_feature (91)..(91): n is a, c, g, or t
  misc_feature (98)..(98): n is a, c, g, or t
  misc_feature (206)..(206): n is a, c, g, or t
  misc_feature (209)..(209): n is a, c, g, or t
aaagaaagagaaagaaggaaggacagattaaatctccaaagtaggagaatctattatatagcaaacaaacttgtgtaatnnatcnctcggnccgaatnaagagaaagaaggaaggacagattaaatctccaaagtaagagaatctattatatagcaaacaaacttgtataattaatctctaggagcacgggttctaataagcccangtncacta

SEQ ID NO: 591077 - DNA, 112 bp, Homo sapiens
cgttgggctcctccaccaccttcatcttcgctgcacctgccggcgcgggcccgccggccgagagcccgaggagcaacaggagccgcgccagccccgccgccatcgcgccgca

SEQ ID NO: 591078 - DNA, 909 bp, Homo sapiens
ggagaacccatgtctcggcatccgcggtcggatcgattaacccagggtcaatatgaagccgggtattgagtgtatatagatcaccccctcccgcgggtaaagctaggggctcacctgagtgtaaaaaactccatgtcgacatcaacgatagagcgtacgaaaagtggactttatcatatctgatatcacacaaatagctacacgcaccctagactggtgatgaagatacccgcgaccgtagtgtctggaggcgcctgagtggcctcaacaggtgtaaactcaacaaaacggctcgccagaacagtacgagccacagtttagatactcagaggaccctggggtgcttcatatccctctagaggagcctgttggctgtaaatcgcataagagcgcccgatcaacctcagcaggctcttgctcagcctatatagccgcatcttcagcaaagcctgatgaaggctacaaagtaagcgcaagtacccacgtaaagacgttaggtcaaggtgtagcccatgaggtggcacagaaatgggctacattgtctaccccagaaaactacgatagcccttatgagaacttaagggtcgaaggtggattcgcagtaaactaagagtagagcgcttaggtgacatcgggccctgccagcgggtgccctgcgcacggtgcatccgtcgtcaagtattccttcatgggagcttttaggtaacaggcctacgcattgataatgaggagacacacgcggtacaggggagagtcctgggagggaccgtcgacgaatgccaccagggaaaactccggtgaatatgtgccgctcgcgaaaacacaagatgcgggacacgcctgaggggcccaccccccggggaacatgttccccaccaagcggaacaagccaaatgcacacccggtggt

SEQ ID NO: 591079 - DNA, 811 bp, Homo sapiens
agcggggtttaggctaggagtgctggggaggcttgtcttgagttcggctttggtttgttgtttggtggggtgtggggagtggaaggtgtttgtctagctaagcccagcccacaggcagcagtcatgtctcacatgcctctctcgtcacagcatacctggctgtttaccctgagcccagcccctgcgggcccttgggtggggatgggtatagtttgcagaaacaagctggaagccggtctctcttaccagcctccgtgcaacagcggctgggagctgggagcagccggaagctgcaggagactggagcagcagcggctgtgtggacaggcacatgcaggctctgcggcgggaggacggcagcgagcggaaggcgggagcgcgagcaggacatatatgcgtccacaggctacgaggcaggagcagaggacagctcagagatccattcaggaagcagcgtgctccaaggaaacaggccctgctgcctggagatacaagacggaagcagactggacaggatgcagccggcacgccaggaagcggctctccagaagcgccagcgtggcagagcaggacgcaatgacctaaccgtcaaagatccactggcagcaggaaggcaaacgagacaggcaaggcagaatcccaacagaaccagggaagcgaagagcaaccaggctccctgacccggggacgacccagggaaagccgccctgcgaaaccagaaccgggctccgagggcccctgccaagaccgactggagcaagaccagaccatggcacccgaaacagggaagaacgcaaaaacacaagagacg

SEQ ID NO: 591080 - DNA, 257 bp, Homo sapiens
accgccatttacaactatgttgtgttcctctatgcttttcagccgagtcctatctgtaatggccctgtgtattgccttgttaaaatagtgaacatgcgcccgtgcggtttctcagtgttccttggagagaaggtattgggggagagtcaagcatttgaaccaaattctcacgactacccagaccccattcttgggaacctgctattactacctgctaacgataatactctcagtaatggtgatagttgtaaatggcg

SEQ ID NO: 591081 - DNA, 747 bp, Homo sapiens
  misc_feature (519)..(519): n is a, c, g, or t
  misc_feature (661)..(661): n is a, c, g, or t
cgccaccagggcggcgcggcccttctccgttagcgttgctgcttttgttcctgctcggccgcagattggtgcttgccatcttcttccatctgcccattaactctcgcaagtgcctcctgcgaggagattcacaaggacctgctctagactggcgcgtacgagatctccgaccagtctgggggcgctgtcggtctgcgcagccacctcaagatcacagattctgctggccatattctctactccaaagaggatgcagccaaggggaaatttgcctttaccactgaagattatgacatgtgtgaagtgtgttttgagagcaagggaacacggcggatacctgaccaactcgtgatcctagacatgaagcatgtagtggaggcgtaaaatttcgaaaagattgcgttgagaagctctaaccattataggtagagctgcgacgcctataagaccttctcaaatctatagctgacgatcttgcctacatgaagaagagagaagaggagatgcgtgctaccaacnagttaacaaacactcggggactatacttcagcatctttttaatgttctggttcattggactagatacctggcaggtgttctacctgcgacgcttcttcaagggcacgaattagttgagaaatgaatgaggcatattcttctnccaccttgtacctcatacaccgttggtgttttttgccagtcttttttgtgttggaggggggggccgcctcccccacaggatgaggg

SEQ ID NO: 591082 - DNA, 482 bp, Homo sapiens
taaacaccataaccaaaagagattaacccaggagtaaaagttaatgtaatattgaaaattcaatcaatgtcatatattaacaaaataaaggataaaaaccacagtattgtctcaattagatgtaggaaaagcaactgacaaaggccaacaactattccacagtaaaaactcaacaaactagatatagaaggttatttcctcaacctgataaaaatgtatatacaaagaacccacagctaacatcatacagaatagttaaatactggatgctttatccctaaaagaaggaaaaagaaaggatgtcaactcttcccacttacattcaatatttgactggaggttctagccatggcaaggagaagaaataaaagatgtctaaattggaagtagtaaattcatctctactgacagacagcatggtatttagtatactttctttttatttaaatttaaaaaaaacaggacggcccaggggaaagggc

SEQ ID NO: 591083 - DNA, 310 bp, Homo sapiens
ctcagtatgttgaagtgagagggatggcaagtaatgctttacgccagctggattcactcagagtgattcagcagcatgccgatagagggcatctcgtgtcgcttactgcttattctgttcgcctctgccttctctctcaaggacaacggccttcctgcagaacagtaaaacaaacatagacgttacgtggaacactctgacacccaggagtgtacaaaacacgtgtcaatgaaccacatggcttctccaaaattagcaccgggctcctgaaaacattaaactgcccagacagcaaacccataggcgacac

SEQ ID NO: 591084 - DNA, 457 bp, Homo sapiens
aaaaggggccggggggccccccccaattaaggggggttggccccccctttgggccccccgggttttcccttttttttttccggttttttttttggggggaattgtggggggaaaccattttcccccgggaaccagttttgcccttttttcccccaagtttgaatttaccccccctaaaagggaaaaaaagggggggccccccccggggggggccccttttaaaaaaaggggtccccccgggccccggaatttgggcccaaaaaagatttccctttcctttaaaaaaggaggcccccttaaaaatggcattttgaaaaaattttttttggaaaaaacaacttttttttttcccccccattttgggccttttggcaaaattttggaaaggtttttttccaaaattttggggggttcccaaattggtaaaaattttaaaaaaaaaaaaagtttcccccca

SEQ ID NO: 591085 - DNA, 945 bp, Homo sapiens
taaaaaaacccgggggccccggggggggggtaccccccccgggggggggcaggcctctctctctctcctttttttgtgcgtcataatattgtttttatccggggtcgctcctcaggaaggggggggaggggggggggggtcctctcattattgctcccccgcagatggtgggaggggtgtcctctctctaacaataatgaggttttgttgctcttcagagagagagagaggggtgttcttacacaaaatcatccagagaagaatttctttatataattttcgcgcggcgcgggagaagaaaagaagagagagtgagagagtcccccccaagagagagagaagagaggagtgtgtgtccaacgagtggggggtgatgtactgaccactcacgcgagggggatgcacacgagcgaatacaagcagggcgaggagctatccttccgagcgagatagtgccccccacaaaaaatgtgttttgtggcgggagacaacatagaattttctatattatctgccccgcgccagtctaaatatatatcttcgtgtacgagagaaagacagagtctatatctgtgggcgcgcaaagtgtgttagtgcgtgccaccagaggtgtgtggagagggcgcaccatttaattgtgcggcgggtggctgggagaaacaaaaggacgggtttataatcaacacgagtggagacctgcgagtgtgatcaaacatgaaggcggtgatctccgcagggacggcacaccgcggaactttttctttgtcgttgtatcacaacaaacgaagtgggtgtgaaagaaataacatttgcgtggcggcgtgtctcccccccaccaattaatgaagagtagaggaggctcgtgaatatataataaatattattcgcgcgaaaacaacaaaccgcggagtgtattataacacgcggcccattattataataatc

SEQ ID NO: 591086 - DNA, 329 bp, Homo sapiens
  misc_feature (14)..(14): n is a, c, g, or t
  misc_feature (125)..(125): n is a, c, g, or t
  misc_feature (305)..(305): n is a, c, g, or t
gtttttgacagagncttgctgtgtcaccaaggctggaatgcagtggcatgatctcggctcactgtagcctctgtctcccggttcaagcaattctgccccagcctcccaagtagctgggactaacngcatgcgccaccacacccagctaagttttgtatttttttagtagagtcagggttttactttggccaggctggtcttaaactcctggcctcaactgatctgcctgtctcggcctcccaaagaactgggattacaggcatgaggcaccgtgcctgtcccatgttgtacttaatagatatttnccatatacaattattttttaattt

SEQ ID NO: 591087 - DNA, 372 bp, Homo sapiens
cctggatctcggcgcaacattcacattgggaacctggacccatgagattgatgagaagttgctttatgatactttcagacgccttatcgggtcatcttacaaaaccccagaattatgcgggaaactgacacaggcaactccaaaggttatgcctttattaattttgcttcctttgatgctacggatgcagcaattgcagacatgaatgggcagtacctctgtaaccgtcctatcaccgtatcttatgccttcacgcaggactccaagggtgagcgccatggctcagcagccgaacgacttctggcagctcagaaaccgctctcccaggctgatcgccctcatcagctgtttgccgattcacctcctccaccc

SEQ ID NO: 591088 - DNA, 645 bp, Homo sapiens
gaactcttgaccttgtgatctgcccaactcagcctcccagagtgctgggattacaagcatgagccaccgcgctcggtccctttctttttatttatttatttattttgagatggagtctcgctgtgtcacccaggctggagtgtggtggcacgatcttggctcactgcaacccctgcctcccaggttcaggcaattctcctgcctcagcctcctgagtggctgagactgcgggtatgtgccactacactcagctaattttgtatttttttttagtagagacagggtttcaccatgttggccaggctggtcttgaactcctgacctcaggtgattcacaccccttggcctcctgaagtgctgggattacaggcatgagccactgtgcccggcattttttgtgttttttagtggagacaggttttcaccatgtggccagtagctgtatttagttatttaaggagggctcaatcaacaggtttaaatggtgtgctattcataatttattgcaaaaataggccgggctggtagttccagcacttagggaggccagcaggtgaatcacttgaggcccgggagtctgagatcagcctggcaacgtggtgaaatccgtctcttgtgaacaataaccaagtacggggcgtggtg

SEQ ID NO: 591089 - DNA, 135 bp, Homo sapiens
tctgtctcattcagtcgggcgtatatatgtcgaagaacagatatgcctcccacaatacagtgagagcattctcctatctatataagagctaatctgcattacagaaaaatgtgtagtagaatatgctgtacttcc

SEQ ID NO: 591090 - DNA, 330 bp, Homo sapiens
gcaggatgctgtgggtattctctgggtggccacttagaatttactgtattgtctgggtgtggtggctcatgcttgtaatcctagaacttgggaggccgaggcagggagatcgattgagcctcggaggtcgagatcagcctgggaaacacagggaggcccccatcgctacaaaatattttaaaaattagccaggtgtggtggcttgtgcttgtgtcccggctacttgggaggctgaagtgggagggtggcttgagtccaggagttcactgcactgagctgtgatcacaccactgcactccagcctggacgacagagtgagacgtccatctc

SEQ ID NO: 591091 - DNA, 123 bp, Homo sapiens
ccccaggctgagaacctggggaaaaaagtttttagaatttgggggagggtggggggagggagggccttgtggggaaggaaagggaaaaagggaggagcggggcttgcctccatgactttttca

SEQ ID NO: 591092 - DNA, 794 bp, Homo sapiens
  misc_feature (288)..(288): n is a, c, g, or t
ctcggttatcggaaagtgcaggaactggcaaatcttgcttacttcatcagtttattgaaaaaaaattcgaagatgactcaaatcatacaataggagtggaattaggttcaggagataataactgttggtggtaaatatgtaagagttacaaagtatgggatacagcatggacaatgaacgattcaggtccgtgaccgagaacgttattaccagaggcgctggcccggaggctctccgtcgtctatcgatatcactcagccagagaaacctacaagtgagcttactaanttggcttaacaagatgcccgaactgcatagcgcagccatgaacatgtgtgactcatcacttgggtggaaaccaagagaggacctgcgatgcagatcggtgaatgttacctttctatagatagcctccagtatattgctcaacgaaaatgatgctgatgttatgtaggtaaatcaagtgcgctcacaggggcagaatgtagaagaggcttttgtaacagtggtgcaagaaagaattagttaacaaaaatcgaatcaggtgagctggaccctagaacgaatgggctcaggtaatgcagtacggagatgctgccttgagaacaggtgaggtcaccgcggcgcgcacaggccccgaacgctcaggagtgtggtcgtgaggagagcacacaggtgtacatacaggggcatttgggacacaatcgtgggaacctgaagaatctgaagtttaatttaccagcatctttatctactctgtatggaagtcagatctggatggggacccagagaag

SEQ ID NO: 591093 - DNA, 199 bp, Homo sapiens
tgtcgctgatggcatcttcaggctgactgatgagttcttactcgggagctggctgaagatgctactctggagttgaggtgcgagtaacaccaaccagggacagaaatcattatctttagccaccagaaaacagaatgttcttggtgagaaggggcggccggaattcgggaaccgactgcttggattacaaaggagggta

SEQ ID NO: 591094 - DNA, 240 bp, Homo sapiens
  misc_feature (165)..(165): n is a, c, g, or t
  misc_feature (200)..(200): n is a, c, g, or t
tttcgagcaaaatgtttacatttacatggaaatacacactaaaacagaatattttcctaatcatgaaacttcgccaaagcaaaatacaaacttccaacgggaggtccactcaactaacaacaatgatccccaagcagggcaccaagaaacctgggggaccctttncaaaaaacctcctttcaagagaccctaatactctntccacacacccacacgatttaggaacttggacatgttcct

SEQ ID NO: 591095 - DNA, 407 bp, Homo sapiens
  misc_feature (396)..(396): n is a, c, g, or t
gacgagagctagcaccatgagcttcaataccctgttaaggaataatatgaacagaggagaataatctaattttagattagaaaagaaccccagagatcctgaaacactttcctctctccgcttccctccatgagataaaaatcactccagccagatagccaaattttgataaatgcctattatgtgctgggtacctttcaaggaactagagatcaagtgatgaacaggactgaacaggacacacaaggtccctgcctttgtggacttaaatgctaaaaggaagacagacaatgatcaagtaaacaagtgacacacccaaataaatcacttaatattcctaaaatcacacagagagttggatgtagagcctcgcttgggccctcgttttgcttcccnctgattcccct

SEQ ID NO: 591096 - DNA, 171 bp, Homo sapiens
gatttactggaatttatgcatgttgatctgggcctaccttggtggggggccatttctgcattgtacagtgtttttcccgcttgccttgattttttcccttattgttgacggggccaatccaagaggggaggcagggttccacaaattacttttccaaaagaatccatgaag

SEQ ID NO: 591097 - DNA, 225 bp, Homo sapiens
aatgcataggaaactctgcataagaatttactctatttaataaagttgtaccccatgaggacacaggttaagaattctgatactgacatccatgtatactggaattgaacaattaagtaaatagatgacacatagtgaaattcaggtttctcattattggaatgggagtttatagaacatcaagaagaagccagaaagtcccatgtggtaatgggtagtcataga

SEQ ID NO: 591098 - DNA, 891 bp, Homo sapiens
aggaaacctttcacaacgcggattctcctagcttgaacgttctatcttctttagtcggttatcatggtaatgggagccatgctactggtttatttacaccagctggatggtttccttttaggcaagaaggaggtcatcagcaggctcccaacaataatgccgaagttaacaatgatgggcgaaaatgcaaacaacttggaacttgaagaaatggagcgtcttatggatgatagggcttgaagatgagagtggagaagatggaggtgaagatgccagtgcaattcaaaggcctggattaatggcttcagcttggtcttgttcatcaccaccttctgttacttcactaatagccagaggggcctccccaggcttcgccagattgagccttgataaatactgtgccagcctacaacggagggtctgacatctctagatttgtgcatactagaagacggtaattattgaaaaacagctgaagagaagaaatggctatcatgagaattgcgaatccagtcaatagactattagacatctgtgaaagcaacacacattagaggttcgggttggtgcaatgttcctttcttcccaggactattctggtcttccaaggcttttctcatgcagatcagaaggactgatggactgtagaagtttctgaagaggacgagttacgctgccatgttttgaagcaggaagacattaccacttctcaaaggtctttaattgcctgaccactgcttatctttggaagtctgtcagggtgatggaatctcagatcatcagcacagatataatggacaaagcaagaaagatacaagaatggactgtataaatgtccataagtgtactcatgtatcttgcggaaacctataatgcctatggaatggatta

SEQ ID NO: 591099 - DNA, 108 bp, Homo sapiens
acaaaaacggaaaattgcatactggtataagttcatttttctgctagcttataacagagtacctgaaactgggtactattacaaataaaagaaatttatttctataca

SEQ ID NO: 591100 - DNA, 308 bp, Homo sapiens
cgacgtagtcatcagaagaaatcaagagagagcacaccagattactgatgagtctctggaaggatacgaggagaatcctgggtaagccattgagtctcaggatgcaggactcaagaccatcactatgctggatgaccaaaaggaacaactaaaccgcatagaaaaaggcttggaccacataaataaggacctgagagagacagagaagacttgacagaactcaacaaatgctgtggcctttgtgtctgcccatgtcatagaacacagaactttgagtctggcagggcttattagacaacgcgtagtcg

SEQ ID NO: 591101 - DNA, 245 bp, Homo sapiens
cactagctccttcaactctgttaatccaatccagtaggcaactacaggggtactcactaacttgaaggcactggtaggttcgcagaaggaggccttctgagggctattttctgccttcactataggcaaaattcattttcacggcacctcatagcagaattccagtgcgtttaccacgcaagagctttgacgcttctagggtctcagaaggacttgcagagctcgattcgaattcgtgtttaata

SEQ ID NO: 591102 - DNA, 391 bp, Homo sapiens
ggcggttgggaaccgcgggccgtacggaagcgagaatgcccgttctgactcggtgggcgcctttcgttcgcgttgaaggccgccttttcaaaaccggttgcccacgaactgctgaaaagggggaagtccgcaatgccgcggggggggtgcacattgagccccggaataaacagttcccccagttgaccaaatcccaggggttccaaagcgagtttttcagggaactcagggggttctgaatcctctggcgcttttgccatgactcaaaaaaggcgctgggccactttccgaatcctgacccttcccagtgaccagatgaagaattaggaatccctcctgatgatgaaaactgaaggggtaaactcagcctaactcggacaagagccaggtg

SEQ ID NO: 591103 - DNA, 392 bp, Homo sapiens
  misc_feature (5)..(5): n is a, c, g, or t
  misc_feature (74)..(76): n is a, c, g, or t
  misc_feature (163)..(163): n is a, c, g, or t
  misc_feature (308)..(308): n is a, c, g, or t
  misc_feature (347)..(347): n is a, c, g, or t
  misc_feature (376)..(376): n is a, c, g, or t
gcttnactatcaattcgcgtaatctttatattgccccgggaagcagtatagccgtctttattccgagtcgcacnnngcacgtgcgcccttgtcgcatcacatacaatggcaatacatagggggagtagcaagtcaactactgttttcgcagttccgaccgctncaccagcaccaaaactgtcaacaccagtaaccatgggtgtaacaatggcaagtgccgcgactacctacaattcagcttcattataagtctctttcgcgggggcgtagtatttgacggtaatttcgtagttacattttgcattcancgagcccaaattttatttcacgacacggccggtatattnacctcgtgcaggaagaaaattttatcatncccgtataaaaaaaaa

SEQ ID NO: 591104 - DNA, 102 bp, Homo sapiens
ctcatagaggatccctgaacattcgtgtccatttatagtagagacaggttatgccatgtggccaggctggtctcaaactcttgacctcaggtgatccaccca

SEQ ID NO: 591105 - DNA, 400 bp, Homo sapiens
  misc_feature (27)..(27): n is a, c, g, or t
aatggataaaatgccttgaaggtgaanggataatcccaattatccttccatttggatccattaccacattaatatggttgtatcaaaaatttccacatgtccccccataaatatgtaaattattatgtagccataaaaatttaaaaagaccactttgggaggcagaggggggtggatcacttgagcccgggcattcaagactagcctgagcaacatggcaaaaccctgtctctacaaaatacaaaaaaaattaggcaggcatggtgatgtgcgcctttggttccagctcctgggcaggctgagatgggaggatgcttgagcctggggatgtcgacactgcagggagctgtgatcgtcccactccagcctcggcaacagagcaagaccctgtctcaaaaat

SEQ ID NO: 591106 - DNA, 495 bp, Homo sapiens
aaagctgaatatgagggcgatggagaacctactatctttgttgcagtggcaggcagaagtaacggcttgggtcctgtgatgtcaggaaacactgcttatccagtcattaactgtccccctgtaacccctgactggggagctcaggacatctggtcgtctcttcgcatgcctagtggtctgggctgctccactgttctttctcctgaagctgctgctcagtttgcagcgcagatcctgggtctaaacaaccatttgatttgggccaaacttcgggcatttaggttgaacacctgggtctccctgaaacagggtgataaaaagatgcaagattgcagcctttaataaaccatccctttttgcatttccaattgatatttttgggcacccagcagtcattgcctttgacaggccggtgtgaaatgctgacctagagtttgtttgcaataacaacatttcgagtgtgaatgtatatcaataaagcattcctcaagggca

SEQ ID NO: 591107 - DNA, 928 bp, Homo sapiens
gtgagctgagatcgtgccactgcacttcagcctgggcaaaaagagcgaaactccatctcaaaaaaaaaaaaaaaagaaaaaaaaaaatgggttgggtgaaagggttccaaatattaacaacccaatttcaagctcattcctctaacctcttcctgttggttattcttcagtagaccgaagttttaaattaagcatttatttagaaaaagaacgatcacagattggcccactccctcaaaagggttaattgtgacagaaatttctccacctgctcaaaaaagacagcagacatgatctcctttaaaaaaaaaaggttcaaaagagattagagatgaaaaataagatggggggagttaaagggccttatacttagaaaaccacaaaacataaaacagcacagagaaaatatagggctgggaggaaatacaacaatgggacaacagagcacttttgtcgcattaaagaaatttttctggatggcgtttaaaaagaatgggccgggtgcgggggctcacgcctgtaatcccagcatttggggaggccgaggcagacggaatcatgaggtcaggagatcgagaccatccaggctaacacagtgaaccccgtctctactaaaaatacaaacacattagctgggtgtgacgcgggtagagctactaggggaggctgaggcaggagaatgggtgaatccgggaggcggacgcttcaagtgagccgagatcgggcattggactccagctgccaccagagtgaactccggttccaaaaaaacaaaaaaaggggggggggcataaaattcccggagggccagtttcgcgtcccccgttttgcacaagggcctaaggggccaataaagcaggcggcgggtaaacgcggcgggaaagcccggtctggcagcccctgggtgcaggacccccagaaagcggaa

SEQ ID NO: 591108 - DNA, 244 bp, Homo sapiens
gcacacctggagccggtgtactgtattcagcagctgacagcatagcagcacgacatacaagcgggagatgagccttcaagcgctacgtaagaagaaagcaagccagaaatgtgccgggtttcaccgactactgtgacctgaacaaagacaaggtcatttcactgcctgagctgaagggctgctgggtgttagcaagaagaggacgctcgtctaaggagcagaaaacccaagggcaggtggagag

SEQ ID NO: 591109 - DNA, 277 bp, Homo sapiens
actttatgtatcccaacacacgacaaaaaacctactctggagaaaaattttcactgaaatataaccaaacttctataatgtggcttgtgacaagattataagatgatatgaaaaataacattttaaaatttgaccatcaactttaagatatggtctgcctatacgaatttatgtaatttttaaaagataatatattctaccctcatatggtcctcagaattaaagcataatggacaggaagaaaaaggaagagaatgcgattgagtgtagggcgata

SEQ ID NO: 591110 - DNA, 827 bp, Homo sapiens
atcaaagggacctgttcagggcgcccccctggttgtgaggggatctctctccccccgcggtttccgcttttttttgggagcgcccccgttgttaatgggaagaacattcttcgggtgcttttctttataaatattgggggtgtgaaaaacctctcttggtgcacgaattagctttttctctcgacagagtcttctgcgcctgtcgcacaggagacttcctcatcggggtaacccgggggagaaaaaacccgccgtctcccccgcggaatatttgccccccggataaccggggtaaaattctctcgcggaagaacaccccgcgggaccgcacacagaagaatgggagtatacgcccacgctggggacaaatgggtggaggaactcacctcgccaccactgggggacacaccctctctttgtgtccccggcccctctcacagggagaagttccccactcttttttataaaaaacgccccacaaagagggtcgctcttctccaacctcatgttctcccagagagaccacctctcccgccataaaagtaaaaagggtgttttttgggctcctccccttcgtgtgttttgcgccccgggaaaatacgcccgaccgcaccagtgttggcgcccacagtgggccccccttgggcgccggataagagccactttttgtttatttctcccgcataaagaaaaaatcttgtgaaatattttggccctttatatgtattcccccccttctccccccatttttttggaatcacgggagtgtttaaaaagagaaaaaaacaccattgttgtgtttctataaaaaacacaaaataaacaaa

SEQ ID NO: 591111 - DNA, 169 bp, Homo sapiens
ctcgtgccgcgcaggctgagggcaggtgggaagcaaacccggacgcatcgcagcagcagcagcagcagcagaagcagcagcagcagcctccgcagttccttccagagacattggttcccaagcaagaaccttcccggggcggttcttgctccttcttttcttcgcaacc

SEQ ID NO: 591112 - DNA, 1447 bp, Homo sapiens
ccctcacctaacgacatcctgctacaagtattctagagaggcggaggggaacgggcagaacgtgcttacggtactgattgtttgaagacctagtcgtgatgttgaaacgagacatcgatgctctccatggaatttcacagatgctatctggtctgtagctatcaagactgagtaataacggcactgtaaaacttcgttggcaaccaacgtcagtgacaagcgtatatgtcaacatgccacttagagggggacagaactgagataggctcgtgtcctatggtgcctaggtgaagaaggaccgagaactgcgttcctcttagcttgtgctgaggagttggacattaaacggctatggaccttgccgagactgatgttcgagtatctattgcagggtaagcactagcgcgccctctggaaaatatcgctggtagcgtgtggtctcatgggacttctggcacgtagtccaaagcgacggcacccattacctcgtgtcattaacctcacttcaatggtcatgcgctgacgtctcgcgtgtgatggtgtaatagaggataagccgagggggtcaagggggatagaacacggataaagttaaggtcactaggagaagctcacttcaggacaagctggcgctttaagtagggatgtttgcctttgggtgtgcgcttgcgagcttcgaatagacatggtctcagggtagaacgacactcggaacgcaaggtgtctaagtgtctgggacgcaccgtagtcattacacgagcaagtaaacacggcggacaaggcccggaaggtttctccacttgaaactcccttttttacccctcttctggtgtttcaccttggtgttaaatcccccttaaaaagttgcaccgtggttagtgggggactacttggaatctgggttaacgggggcacaacagcggaaatcaaataggaaaaaactagagccgacagcattacgcccacgggcacaaggctcacggaggggcacaagaacggcgtcccccaacgggcatcgcacccggtcggaccccgtgaacggccacggggggcacgcctacggggccaactcggaacagcggacttcgggcgccaacgccactaccaccacgttcttgccgagagcaaaaaaataaagaccgaacaccacatactaaggaacaaacatcgcgaggcagcgcccggcactgacaattgcagagaaatagcgcacagctcacacactgtccctctcctcccagccgctgccctgctccctccctcgttgagacagaaacgaccaaacaaaagaaacagacaaaagagaagacaagagcaaaaaggaagaaacaaagacgcaagcagaaagagaaggaaaagaaagcaagaagacaaacaaagacgcgaacaaaaaaaaaaacaaacagaagcaaaaagaaacgaaaagcagaagagcacgagagaaatg

SEQ ID NO: 591113 - DNA, 108 bp, Homo sapiens
ttgccaggagtcgttacagcctgggcacgtgaggatataccgtctctgcaaaaatttagaaacggtgggtcgggcatggatggcattgtcccatgtggatctcgagat

SEQ ID NO: 591114 - DNA, 960 bp, Homo sapiens
tccgggcgcggtggctcacgcctgtaatcccagcactttgggagggcgagggggcggatcaagaggtcaggagatcgagaccacgatgaaaccccgtctctactaaaaatacaaaaaaatttagccgggcgcggtggcgggcgcctgtagtcccagctgctggggaggctaacggcaggagaatggcgtgaacctgggaggctgagtgcaatggcaaaatctcaacctcaccgaaacctcccgcctcccgggttcaagcgattctcctgcctcagcctcccgagtagttgggattacaggcgcctgccttccatgcctggctacatcgtggtattgcttcgaaggacagagacggggtttcttacatgtagcggcagggctgcgtcttcaaacttccttaacctcgtacatccgcctgccttcgacctcgccaaaaggtgctgtgattacagcgcattgtgccaaccatgccccagcacaaaagatcagactggcgccatatacgactacagccccttcgtagcataatggtaacttggagcattcttagcagtagcacaaaaacacttccactacacacgatgtgttgctacaacattttagcccttacacacaatatactgaccggggtagaaaatagagtgtgtgcaacacagcacagggcaaggacttcggccaccgatggcaagggaggacctcggccactcaaatccaggcgagcgctatcaacgcatcccaagtacatgccgcgcacggaagccgagcgtgcacaagttaccgccccgcatgacggaggcatggaacaacgcgggcccaaatggaatgcccgtcgcacgaagaacgccgggcaagaaccagacgcgcaaccggaggcggctacaaaccacatcgcgaggccgggcaaatcgccctggaccccggaaacacacccccggggcgagcgccacgaaaaccctgagg

SEQ ID NO: 591115 - DNA, 652 bp, Homo sapiens
  misc_feature (652)..(652): n is a, c, g, or t
agttttcagtgatcagaagcagcagttatttgagtgtatgaagtggaatgatgatcactgtgctataatgtactgaaaccaccatattacagagagatatttactacatattttccatcttgtagtttctccagaaggcgctatgggaatttaagttgtgaacgtgtcaaaatccttgccataactttcctggtggaacaaccccgtgcccccaatttttcgttggttcctttttaattttaaaaccaaaggggtgcgtataaacggggtgggtaggaacctggttccaaacaaaacgtgggttttaaattggttttattgtcccaaagggtttaaaaaacacttaaagggaaaagggtttaaccgggaattaattttgtggggaaatttaaaatttttacaatttaactttgtcgcggctaaactttttcttcccaaaaacgccctagaagcgccccgtttaaacaccccaccctgtggctctaccacttgtgggctttttgcggaaatgtttgttcccccttcttccaaaaagccgggaaaaaattttggggacccaaccaactcttgggaccacacaggcgggcccaaaccggtattaaacccaaaacttttcgcgggcaccacacaggctttaaccttgggggcttcn

SEQ ID NO: 591116 - DNA, 254 bp, Homo sapiens
atgctgtagcgggaacgttgcttcatcatgcgttgctccggtgtggagtttggggctttagggaaagcctgggttgggtggagcagaaccatcttggagaacatacagttccctgtcctcccggagatgcctgggtgtgttaacagaggtgacacgtgtctgacaggagacgggagctctgattgtccacgggctggaagaagtgagtgtccactggctgaatgacagtgagttatgtttcacctgagactttc

SEQ ID NO: 591117 - DNA, 294 bp, Homo sapiens
aaagctgctcctggcaaggccgctgagaggcgagacttgatatggagtgctgcactggaagagacttcagacttacaaaggctgccaggagctgtccaggagccgagtcaaaagagtctctttggagtcaggagctgggcctgtagacacagttgctagagagtactgtgactgcagaagaggcacgcaggcagcaactgcgaggcgagaggccgacttgaggaatttctcgtcctcgagaggccaccaaaagggaaaagctgaacctaagtggccgttgtgagaaatgagctg

SEQ ID NO: 591118 - DNA, 1862 bp, Homo sapiens
  misc_feature (1514)..(1514): n is a, c, g, or t
gaatgtactcctacgacgctagtacacctatcatagaggagcttcatgacctgacatgatcacggcctcaatgactcaataatttcctatatgtcgcttccttagatccctggtatgtcctctattcctaatactccactacgcaacacactagaatgaatgactaaaccaatgctactagacgtctacggcgagctagcagaactgccatgaatctattccttagactccggctcaatccttctcttcagtccatcatatacgtcctctgcgcaatacactcgtaacgccaataccgttatatcacatcacaccagaacgaagtgatctacaatgccatctcacatcacacttctatacaccaagcgacaaaatcaacatatagtgacacaaacctcaagaggagatcaacgtgcgcacacgctttacagacagtttcactgagcaggataacctaactgcaggggttgtacaccctccaaatgcgtttcacacaacgctctcgtgacacttattcctggtcggccccctggcaatattcattttcctctaagcaatagccacagagacagaaacccttagggcgccaacgctcaattctttagaacaagctccatatacatcaacactcaaggaatgctatacggtacaccttataccacaaggtacataatcgccagattgaccacgcccccttattactccgctttactcaacattcataactttcaaaccattccttatacattacgcaaaagtgctacattataggcgcaacgggcccaaagtctgtaaggaacgtggttcgccgcactctacaaccgaaatctccaaggaggccttctccacaaggaacataaccacaggccaaatcgggccagataaccttatccgccgccgggagtaatacacgtttcccctttaacagaaactctaaaggaaccccaaccgatttgacgccgacactcgtacttttaaacgcacttacggaaccccacacgtgtgtgcggtcgaacaccacctggatctgctaacagacagggcctccgtaacaatcggagtaacctctggccacatattccttatggataggtgtattgcaccgacaataaacgtcgtaatgcagtgaagtttctaactatctcggtacgccacagtttaccgggttaaaccccgtgagaatatttcctcagataatgcttaaccgcgttctaacacacatataacatcgacatcttatggcacaggccttaacggcggagccccaccgggatcaattaatgtatacacgactaatatacatacacgggcaacacccgattgctataatacgtaataaaacggccagtcataccgtataattgaaagcctcaaaagcaaaccagccgacctattcacagattcatccacaacttgaccaacagcagcaccaataccacatcagtgaccacccgacttaggcggaacgaggtccatcatagagtcacacaccacgcacctatagagacgcaggnggcggcaatcaccaatagggggacccccacagacaaatggctggacccccgccaagcaaccttacgccaagagcgaacgacactagaaacagtcagggaacaccaccaccacaactaaagagagcaactgaggctagatatcaccaccaaaccgcagccacgaaagagctgcgtcgccgcgacaccctcccacataagaggcttcgtcaacacgtgcagcccagagacccatacaagatagtgagcacaaccatgcgagacacagccgaacatgactccacacgaatctgtctaagagacacaacaaatagacaacaacactcgccaaccacgaaatcaaacaacgcc

SEQ ID NO: 591119 - DNA, 139 bp, Homo sapiens
cagctcggtaccttccttttctactgatatcttcttcctttagagcaaacttctccttaggacctcagagataagcacagcaggctcttcctccttcaataaactccggttgcttcctgcttctgcccctctcatgtct

SEQ ID NO: 591120 - DNA, 296 bp, Homo sapiens
  misc_feature (105)..(105): n is a, c, g, or t
attggatcccctttcttcctgaaaatgaagagtttaaagcttacgttagtattgtaatatgtaaagtaagccccccaaaaatttttaaaatttgatgatcccccnatattcccccttgtatgttaaataaatccccatttttgtagaaaaaattccccctgagagtaattgtcaatgagtacatgggtataagttgtatccccctccccccccttttattttttccagtggttttttgttaatgtagtgttttttccaagttaatcattaaatttgttagatcttgttatgggcta

SEQ ID NO: 591121 - DNA, 395 bp, Homo sapiens
  misc_feature (167)..(167): n is a, c, g, or t
agctggacctcacatgtggtaccccgcgtacgtagtttggctggtttcaaataagttattacaaaacaaaggggatgtgttgaagtggggatccgtgcacgttaacgattactaggactatgcagaaaccagagagtttaagaataccgcactcttaacctctcttntatcgtgccggttgctatttgagatttgccaggggagccattagtgagtgcattcactctaattaagcgaagcgcactcagcccgcaaacctgacgggtttccagacgagcctgcagctaattagttacggccttcgcgcggggtgtggcggaaagcgataagggcgcacaaccgcaaccacgcactcagtcacgcagcgcacggacgaacggcagcggggtgcggat

SEQ ID NO: 591122 - DNA, 4678 bp, Homo sapiens
  misc_feature (32)..(33): n is a, c, g, or t
  misc_feature (677)..(677): n is a, c, g, or t
tttaaagatggcacagaatatatataatatgnnccattagtgaattttgggttataaagacccaaaatgcgctataatgtattatgtactgtaattttaatcccttgaactatatggtacggcatgattttacagtggacatcttgatatggtatacacattaaactattatgtggaattaaatagtagctcttcaagtgaagtaagtataaatgtcaacgaccatcttttaaggaattttggatcaccgtaacacattttacacattgttaatcgctacccctgggattgtttaaactgtttcgtcatggagccacaaaagtttgaaatcctcctagtaagatactttgcatcttgtttgcagtctgttcagggagaactagtgaaaggctgtagtatatttggactagaaagtaactgaatctcaaaccaggtagtgtggagataccccctccatgaattacattcttcattccagggtaggtaatacacagaaacatgttactttacctgttgccaaggcctttgaaaaatctacttttacaaaattggaaaacgtcacttgtagtcaaagccattgccagtcattgattttaatgttgtaagattgcttataggacatttaatttaggaagaaatgatcatacgtctatgagagggtactaggaaaagcttanaaatttcaagggctctgtttattctgttacaggtggaagtgctgcatcagtaaatgctaattttgctcattttgataacttccccaaatcctccagtgctgattttggaaccttcaatacttcccagagtcatcaaacagcatcagctgttagtaaagtttcaacgaacaaagctggtttacagactgcagacaaatatgcagcacttgctaatttagacaatatcttcagtgccgggcaaggtggtgatcagggaagtggctttgggaccacaggtaaagctcctgttggttctgtggtttcagttcccagtcagtcaagtgcatcttcagacaagtatgcagctctggcagaactagacagcgttttcagttctgcagccacctccagtaatgcgtatacttccacaagtaatgctagcagcaatgtttttggaacagtgccagtggttgcttctgcacagacacagcctgcttcatcaagtgtgcctgctccatttggagctacgccttccacaaatccatttgttgctgctgctggtccttctgtggcatcttctacaaacccatttcagaccaatgccagaggagcaacagcggcaacctttggcactgcatccatgagcatgcccacgggattcggcactcctgctccctacagtcttcccaccagctttagtggcagctttcagcagcctgcctttccagcccaagcagctttccctcaacagacagctttttctcaacagcccaatggtgcaggttttgcagcatttggacaaacaaagccagtagtaaccccttttggtcaagttgcagctgctggagtatctagtaatccttttatgactggtgcaccaacaggacaatttccaacaggaagctcatcaaccaatcctttcttatagccttatatagacaatttactggaacgaacttttatgtggtcacattacatctctccacctcttgcactgttgtcttgtttcactgatcttagctttaaacacaagagaagtctttaaaaagcctgcattgtgtattaaacaccaggtaatatgtgcaaaaccgagggctccagtaacaccttctaacctgtgaattggcagaaaagggtagcggtatcatgtatattaaaattggctaatattaagttattgcagataccacattcattatgctgcagtactgtacatatttttcttagaaattagctatttgtgcatatcagtatttgtaactttaacacattgttatgtgagaaatgttactggggaaatagatcagccacttttaaggtgctgtcatatatcttggaatgaatgacctaaaatcattttaaccattgctactggaaagtaacagagtcaaaattggaaggttttattcattcttgaatttttcctttctaaagagctcttctatttatacatgcctaaattcttttaaaatgtagagggatacctgtctgcataataaagctgatcatgttttgctacagtttgcaggtgaaaaaaaataaatattataaaatatgctattgtttttgtgttcttgctgcaatgcctttaccaaagtggccttaaatatgagtagtgaattgagaacatcttgaattcttaaaagacttcttagtgactttttataaaaaggccatgtagaaaatttattaaaactactatgactgctacattcaggaatatgccagtggtaaagcatttaaatgtagcttgtcagatttaccataatcctactaatttctttgcagcttattaattttgtgaaatttgtatatatgaagaatttgcatgtatgtgtatttacaaatttttctaagtatcttgaattctcagactgcaaaaggcctattttaactattgattttttttaaaaaaaattgtctttgaatgtattggaagtagacatgcattaactgtgacattattgcacctcagtttttttctttctttttttgggcaaactgatattatctataggatatttgtttatgtttgttttttgggggaaagaaactggaactcagtgttaccttaaagttacggaatactttgttttaaaggaaaagataataagtttagttatatctttttgttaatattcaaatgaacttgtttaagtatctatgtacagtaatgcctcattcatctagaggtaatctggcagtcttgtgaaaaccgaacacaactcagaaacttggaatcgttttttttaaaaatgcctctgagcaacccatataagtcacaaagtctgtgtgttagagcttatgcatttgtttttatgagagattttaataaatttaattatttgcttgtccagactatagcatattagctgtttagaagggatggcttgaaaggaaggagactgaaaaacactctgagagcatacactgtccaaggccattagtgtaaggaccgctacccagcctagaggacatcactatactacatcatctgatgattattctttattatgcctctaggtaattaagtaaaggtgaaattgcatacacagatatgtagtacatattttaaaagttttatcttaaattgattaaaactttttaaaaagctttggtattaaaagaggtaaacatcagtttcctcaaacattttattcatgttgaatgcctttttgcaatgatgactgagttgttatcatagtattttaaaacctgtatagtgttttagacttgttaaaacattgctgtctagtgtacatctagctaaaagtgtggtttatctaaaccgttttaataagcaagatgactgggaaatctctgccccttttctgagcagtatgcctcttcttttagaattaaatgaatgctgcacaggtccagatgtgtgttgatgtagacttgaaatgtctccacattttggaggacttcctcagcccttttcattgagggaaaatatatttgaatttctgttttagattgtatcgggtcccagttgattcatgtgtacaaagttatgctacctaattacagaccattacccaaatatcctaccaggctttccatctgaatagtaaattaaacagttgttatcaaaatgattttaaagactatttctttttctgggtaactattgaagtttgtaattaaatgggggctcttactgactttaaattagcgcttataaaataaaaatgtttagttcaagaagagacccaagctgggtatggtggtgtgagagcctgtgagtcctagctacctggaggtgaggtgggaacatcacttgagcccaggagttggaggctgcagtgcgctacgatcacaccactgcacaccagcctggggatagagtgagatcccatctctaaaaaatgaaaaaaagaagagaggtagctttaaagtggtttttctcatgatattcactgtttattattaaagaaaatcagctttcgttagacttttacatttagatttattcttagttttatatagaccatcaaaattatgttgagtactaaaaaggagaaaaaatcctggaaggtaacaaggctgaagaccttcaaatttcctggcttactggtttagtcacatcatttttcctgttcaggtatctgcagatatccctgttcaggaaagatcttttttcaggatggcaaacttttgacatagtttaaagacattttttccccattttttgaaatagagaatattttattatttttgtgaaaatagagttttggtaatcactttcttcctcaaaataagtccttctgttaatttgtaaaagcacattagtgctttacctgtgaaattccccgcccccctgcacacacacccactttagtacagttcctgtcaattggcaacatggagagggtgacctggctgctggtttaccactgtaccaacatctctggagcattttagtttcagaaccttaacactccccaacagctttgttgatgtagcttgtatctctgagaatttattgtattaaaattaatactgagatatttttaaaa

SEQ ID NO: 591123 - DNA, 270 bp, Homo sapiens
ggtcaatgtggtggactcaggctcattggcagaagaacggagactacttgtgtgtgaagtagataggactccgaaagccaccaggtgttgtcacaaattttgaaatttccgaatgaggagacacaggtactgtgatgtggcgagatgaagagacatcatagctttgctggaaccaatgaagtagtttgctgtgctgcacggagaggtccgcggatatctgtgtctttctaccacgtcaaaaacaacgggaagattgaaccggatagcttg

SEQ ID NO: 591124 - DNA, 4190 bp, Homo sapiens
ccaagcagtcaggacttaggcgtcgaaagaatcagggctaccccaccacaagcaagagtcagcctctccatatttctccttttagctctgcgcagcagcacctatcccttctttgaaagagcatctcaggaaaaggggtcaatcccttttgattaataacaacaaatcctttatctgaatccccacagcaagtcactctccttttcagccccaaactacaggtggaagtgctgcatcagtaaatgctaattttgctcattttgataacttccccaaatcctccagtgctgattttggaaccttcaatacttcccagagtcatcaaacagcatcagctgttagtaaagtttcaacgaacaaagctggtttacagactgcagacaaatatgcagcacttgctaatttagacaatatcttcagtgccgggcaaggtggtgatcagggaagtggctttgggaccacaggtaaagctcctgttggttctgtggtttcagttcccagtcagtcaagtgcatcttcagacaagtatgcagctctggcagaactagacagcgttttcagttctgcagccacctccagtaatgcgtatacttccacaagtaatgctagcagcaatgtttttggaacagtgccagtggttgcttctgcacagacacagcctgcttcatcaagtgtgcctgctccatttggagctacgccttccacaaatccatttgttgctgctgctggtccttctgtggcatcttctacaaacccatttcagaccaatgccagaggagcaacagcggcaacctttggcactgcatccatgagcatgcccacgggattcggcactcctgctccctacagtcttcccaccagctttagtggcagctttcagcagcctgcctttccagcccaagcagctttccctcaacagacagctttttctcaacagcccaatggtgcaggttttgcagcatttggacaaacaaagccagtagtaaccccttttggtcaagttgcagctgctggagtatctagtaatccttttatgactggtgcaccaacaggacaatttccaacaggaagctcatcaaccaatcctttcttatagccttatatagacaatttactggaacgaacttttatgtggtcacattacatctctccacctcttgcactgttgtcttgtttcactgatcttagctttaaacacaagagaagtctttaaaaagcctgcattgtgtattaaacaccaggtaatatgtgcaaaaccgagggctccagtaacaccttctaacctgtgaattggcagaaaagggtagcggtatcatgtatattaaaattggctaatattaagttattgcagataccacattcattatgctgcagtactgtacatatttttcttagaaattagctatttgtgcatatcagtatttgtaactttaacacattgttatgtgagaaatgttactggggaaatagatcagccacttttaaggtgctgtcatatatcttggaatgaatgacctaaaatcattttaaccattgctactggaaagtaacagagtcaaaattggaaggttttattcattcttgaatttttcctttctaaagagctcttctatttatacatgcctaaattcttttaaaatgtagagggatacctgtctgcataataaagctgatcatgttttgctacagtttgcaggtgaaaaaaaataaatattataaaatatgctattgtttttgtgttcttgctgcaatgcctttaccaaagtggccttaaatatgagtagtgaattgagaacatcttgaattcttaaaagacttcttagtgactttttataaaaaggccatgtagaaaatttattaaaactactatgactgctacattcaggaatatgccagtggtaaagcatttaaatgtagcttgtcagatttaccataatcctactaatttctttgcagcttattaattttgtgaaatttgtatatatgaagaatttgcatgtatgtgtatttacaaatttttctaagtatcttgaattctcagactgcaaaaggcctattttaactattgattttttttaaaaaaaattgtctttgaatgtattggaagtagacatgcattaactgtgacattattgcacctcagtttttttctttctttttttgggcaaactgatattatctataggatatttgtttatgtttgttttttgggggaaagaaactggaactcagtgttaccttaaagttacggaatactttgttttaaaggaaaagataataagtttagttatatctttttgttaatattcaaatgaacttgtttaagtatctatgtacagtaatgcctcattcatctagaggtaatctggcagtcttgtgaaaaccgaacacaactcagaaacttggaatcgttttttttaaaaatgcctctgagcaacccatataagtcacaaagtctgtgtgttagagcttatgcatttgtttttatgagagattttaataaatttaattatttgcttgtccagactatagcatattagctgtttagaagggatggcttgaaaggaaggagactgaaaaacactctgagagcatacactgtccaaggccattagtgtaaggaccgctacccagcctagaggacatcactatactacatcatctgatgattattctttattatgcctctaggtaattaagtaaaggtgaaattgcatacacagatatgtagtacatattttaaaagttttatcttaaattgattaaaactttttaaaaagctttggtattaaaagaggtaaacatcagtttcctcaaacattttattcatgttgaatgcctttttgcaatgatgactgagttgttatcatagtattttaaaacctgtatagtgttttagacttgttaaaacattgctgtctagtgtacatctagctaaaagtgtggtttatctaaaccgttttaataagcaagatgactgggaaatctctgccccttttctgagcagtatgcctcttcttttagaattaaatgaatgctgcacaggtccagatgtgtgttgatgtagacttgaaatgtctccacattttggaggacttcctcagcccttttcattgagggaaaatatatttgaatttctgttttagattgtatcgggtcccagttgattcatgtgtacaaagttatgctacctaattacagaccattacccaaatatcctaccaggctttccatctgaatagtaaattaaacagttgttatcaaaatgattttaaagactatttctttttctgggtaactattgaagtttgtaattaaatgggggctcttactgactttaaattagcgcttataaaataaaaatgtttagttcaagaagagacccaagctgggtatggtggtgtgagagcctgtgagtcctagctacctggaggtgaggtgggaacatcacttgagcccaggagttggaggctgcagtgcgctacgatcacaccactgcacaccagcctggggatagagtgagatcccatctctaaaaaatgaaaaaaagaagagaggtagctttaaagtggtttttctcatgatattcactgtttattattaaagaaaatcagctttcgttagacttttacatttagatttattcttagttttatatagaccatcaaaattatgttgagtactaaaaaggagaaaaaatcctggaaggtaacaaggctgaagaccttcaaatttcctggcttactggtttagtcacatcatttttcctgttcaggtatctgcagatatccctgttcaggaaagatcttttttcaggatggcaaacttttgacatagtttaaagacattttttccccattttttgaaatagagaatattttattatttttgtgaaaatagagttttggtaatcactttcttcctcaaaataagtccttctgttaatttgtaaaagcacattagtgctttacctgtgaaattccccgcccccctgcacacacacccactttagtacagttcctgtcaattggcaacatggagagggtgacctggctgctggtttaccactgtaccaacatctctggagcattttagtttcagaaccttaacactccccaacagctttgttgatgtagcttgtatctctgagaatttattgtattaaaattaatactgagatatttttaaaa

SEQ ID NO: 591125 - DNA, 135 bp, Homo sapiens
ggagacacccatatctataccaaacaccatatactgataaatacggtcacccatgaagtttatattcttatcactaccaggcttcggaataatctacccatattgtaacttacctactccgagcacaaaagaacc

SEQ ID NO: 591126 - DNA, 144 bp, Homo sapiens
ttccccccccctggggtttataattttggggttaaccaggggtgggaaaggccccgtcggggaaaattgaaccccgcgggcacccctaggaaataaacgggagggttcccaattttgggattgggattatattgttttttatta

SEQ ID NO: 591127 - DNA, 3585 bp, Homo sapiens
cacctgaagccgcatgcaggtggctgattgttactcctgatccgtccaataacatgctgattctggtgtcgcctgatccatttggaagtacgccttccacaaatccatttgttgctgctgctggtccttctgtggcatcttctacaaacccatttcagaccaatgccagaggagcaacagcggcaacctttggcactgcatccatgagcatgcccacgggattcggcactcctgctccctacagtcttcccaccagctttagtggcagctttcagcagcctgcctttccagcccaagcagctttccctcaacagacagctttttctcaacagcccaatggtgcaggttttgcagcatttggacaaacaaagccagtagtaaccccttttggtcaagttgcagctgctggagtatctagtaatccttttatgactggtgcaccaacaggacaatttccaacaggaagctcatcaaccaatcctttcttatagccttatatagacaatttactggaacgaacttttatgtggtcacattacatctctccacctcttgcactgttgtcttgtttcactgatcttagctttaaacacaagagaagtctttaaaaagcctgcattgtgtattaaacaccaggtaatatgtgcaaaaccgagggctccagtaacaccttctaacctgtgaattggcagaaaagggtagcggtatcatgtatattaaaattggctaatattaagttattgcagataccacattcattatgctgcagtactgtacatatttttcttagaaattagctatttgtgcatatcagtatttgtaactttaacacattgttatgtgagaaatgttactggggaaatagatcagccacttttaaggtgctgtcatatatcttggaatgaatgacctaaaatcattttaaccattgctactggaaagtaacagagtcaaaattggaaggttttattcattcttgaatttttcctttctaaagagctcttctatttatacatgcctaaattcttttaaaatgtagagggatacctgtctgcataataaagctgatcatgttttgctacagtttgcaggtgaaaaaaaataaatattataaaatatgctattgtttttgtgttcttgctgcaatgcctttaccaaagtggccttaaatatgagtagtgaattgagaacatcttgaattcttaaaagacttcttagtgactttttataaaaaggccatgtagaaaatttattaaaactactatgactgctacattcaggaatatgccagtggtaaagcatttaaatgtagcttgtcagatttaccataatcctactaatttctttgcagcttattaattttgtgaaatttgtatatatgaagaatttgcatgtatgtgtatttacaaatttttctaagtatcttgaattctcagactgcaaaaggcctattttaactattgattttttttaaaaaaaattgtctttgaatgtattggaagtagacatgcattaactgtgacattattgcacctcagtttttttctttctttttttgggcaaactgatattatctataggatatttgtttatgtttgttttttgggggaaagaaactggaactcagtgttaccttaaagttacggaatactttgttttaaaggaaaagataataagtttagttatatctttttgttaatattcaaatgaacttgtttaagtatctatgtacagtaatgcctcattcatctagaggtaatctggcagtcttgtgaaaaccgaacacaactcagaaacttggaatcgttttttttaaaaatgcctctgagcaacccatataagtcacaaagtctgtgtgttagagcttatgcatttgtttttatgagagattttaataaatttaattatttgcttgtccagactatagcatattagctgtttagaagggatggcttgaaaggaaggagactgaaaaacactctgagagcatacactgtccaaggccattagtgtaaggaccgctacccagcctagaggacatcactatactacatcatctgatgattattctttattatgcctctaggtaattaagtaaaggtgaaattgcatacacagatatgtagtacatattttaaaagttttatcttaaattgattaaaactttttaaaaagctttggtattaaaagaggtaaacatcagtttcctcaaacattttattcatgttgaatgcctttttgcaatgatgactgagttgttatcatagtattttaaaacctgtatagtgttttagacttgttaaaacattgctgtctagtgtacatctagctaaaagtgtggtttatctaaaccgttttaataagcaagatgactgggaaatctctgccccttttctgagcagtatgcctcttcttttagaattaaatgaatgctgcacaggtccagatgtgtgttgatgtagacttgaaatgtctccacattttggaggacttcctcagcccttttcattgagggaaaatatatttgaatttctgttttagattgtatcgggtcccagttgattcatgtgtacaaagttatgctacctaattacagaccattacccaaatatcctaccaggctttccatctgaatagtaaattaaacagttgttatcaaaatgattttaaagactatttctttttctgggtaactattgaagtttgtaattaaatgggggctcttactgactttaaattagcgcttataaaataaaaatgtttagttcaagaagagacccaagctgggtatggtggtgtgagagcctgtgagtcctagctacctggaggtgaggtgggaacatcacttgagcccaggagttggaggctgcagtgcgctacgatcacaccactgcacaccagcctggggatagagtgagatcccatctctaaaaaatgaaaaaaagaagagaggtagctttaaagtggtttttctcatgatattcactgtttattattaaagaaaatcagctttcgttagacttttacatttagatttattcttagttttatatagaccatcaaaattatgttgagtactaaaaaggagaaaaaatcctggaaggtaacaaggctgaagaccttcaaatttcctggcttactggtttagtcacatcatttttcctgttcaggtatctgcagatatccctgttcaggaaagatcttttttcaggatggcaaacttttgacatagtttaaagacattttttccccattttttgaaatagagaatattttattatttttgtgaaaatagagttttggtaatcactttcttcctcaaaataagtccttctgttaatttgtaaaagcacattagtgctttacctgtgaaattccccgcccccctgcacacacacccactttagtacagttcctgtcaattggcaacatggagagggtgacctggctgctggtttaccactgtaccaacatctctggagcattttagtttcagaaccttaacactccccaacagctttgttgatgtagcttgtatctctgagaatttattgtattaaaattaatactgagatatttttaaaa

SEQ ID NO: 591128 - DNA, 585 bp, Homo sapiens
ggctttagcaatacagtacaaaaaaataaccaccataattataccaaattcctctaaatcactgcatactatgtgtattaaatacaatttcgaccgtataaaaatactgagaaaaattgataaataacaggtaagagaaagatatttctaggcaataactaggatcatttggaacgagtgagtactgtggatatttaaaatatcacagtaagaagatcatgcttgtacctacagtaatgcgggccagacacttaagtaacagcagaagtggaggggagactttcctacttaaaattggtggtcatatcattacaaaacatttgcatcttggttggctacatatgctttcttattgatcccaaaccaaatctaagaatcacttcatttaaaatacggagcgttattgaatacttcgaagcacaagaggcaatgtgcagccctcatttatgagacactcctcaggaaactcccagggtgatgcttggagaagctgtgagttgagctgaagctggagaacttcctccagaacaaggggcttaagaaagaaagacgaactctaaggtgggtctgataacttcactccag

SEQ ID NO: 591129 - DNA, 2146 bp, Homo sapiens
  misc_feature (2118)..(2118): n is a, c, g, or t
  misc_feature (2120)..(2120): n is a, c, g, or t
tggcggcggcggcggcggttgtcccggctgtgccggttggtgtggcccgtcagcccgcgtaccacagcgcccgggccgcgtcgagcccagtacagccaagccgctgcggccgggtccggcgcgggcggcgcgcgcagacggagggcggcggccgcggccagggcggcccgtgggaccgcgggcccccggcgcagcgctgcccggctcccggccctgccggcctcctcccttggcgccgcggccatggcggccagcgcgaagcggaagcaggaggagaagcacctgaagatgctgcgggacatgaccggcctcccgcacaaccgaaagtgcttcgactgcgaccagcgcggccccacctacgttaacatgacggtcggctccttcgtgtgtacctcctgctccggcagcctgcgaggattaaatccaccacacagggtgaaatctatctccatgacaacattcacacaacaggaaattgaattcttacaaaaacatggaaatgaagtctgtaaacagatttggctaggattatttgatgatagatcttcagcaattccagacttcagggatccacaaaaagtgaaagagtttctacaagaaaagtatgaaaagaaaagatggtatgtcccgccagaacaagccaaagtcgtggcatcagttcatgcatctatttcagggtcctctgccagtagcacaagcagcacacctgaggtcaaaccactgaaatctcttttaggggattctgcaccaacactgcacttaaataagggcacacctagtcagtccccagttgtaggtcgttctcaagggcagcagcaggagaagaagcaatttgaccttttaagtgatctcggctcagacatctttgctgctccagctcctcagtcaacagctacagccaattttgctaactttgcacatttcaacagtcatgcagctcagaattctgcaaatgcagattttgcaaactttgatgcatttggacagtctagtggttcgagtaattttggaggtttccccacagcaagtcactctccttttcagccccaaactacaggtggaagtgctgcatcagtaaatgctaattttgctcattttgataacttccccaaatcctccagtgctgattttggaaccttcaatacttcccagagtcatcaaacagcatcagctgttagtaaagtttcaacgaacaaagctggtttacagactgcagacaaatatgcagcacttgctaatttagacaatatcttcagtgccgggcaaggtggtgatcagggaagtggctttgggaccacaggtaaagctcctgttggttctgtggtttcagttcccagtcagtcaagtgcatcttcagacaagtatgcagctctggcagaactagacagcgttttcagttctgcagccacctccagtaatgcgtatacttccacaagtaatgctagcagcaatgtttttggaacagtgccagtggttgcttctgcacagacacagcctgcttcatcaagtgtgcctgctccatttggagctacgccttccacaaatccatttgttgctgctgctggtccttctgtggcatcttctacaaacccatttcagaccaatgccagaggagcaacagcggcaacctttggcactgcatccatgagcatgcccacgggattcggcactcctgctccctacagtcttcccaccagctttagtggcagctttcagcagcctgcctttccagcccaagcagctttccctcaacagacagctttttctcaacagcccaatggtaagatctaacatttggcgagctgtaagttcattttatgtatcctttttatatcataatgttgtgtgcttgggcaggaagacttttctaaagaatactatagtattatctactgagtgtttacacaaaaataaaagcctttggtgatttggacctcagaaagctaagtgattttacaagtttttgtgagcaggttacaatttatgggaaatcagtgactatgtaaagagcatcccgtcattctcagaatttctattgcctttttctgattatttcgtcttacatgttctaatatacctcttgattttggagaatttatagacctagtgttgggattntntttttcctttcaggacagtgtgtcct

SEQ ID NO: 591130 - DNA, 668 bp, Homo sapiens
tcaaataactcatttatttaaaggataaagactgaataactgtgacaagtcacattaatacagattctgacacaaaataatagttaaacttgggctgggcgtgggggttcatgcccccaatcccaacatttggggaggccagggcagacagataaccgtgaggtcgggagtgcaagaccagccgtgaccaacatagagaaacccgtgtctctactaaaaatacaaaattagccgggcgtgagtggcacgtgccgtgtaatcccagccactcagggtctacaagacgctactctcccctatcatagaagagcttatcacctttcatgatcacgccctcattaatcatttttccttatcgtggcttccatagttccgtggtagtgcccttttcctaacactcacaacaaaactaacataattacataacattcctcagaaccgctcaggaaatagaaacgcgtcgtgaactatcgcgtgccgcgccatacatccatagttcctcattgcgccctcccatccttaggacatccttatacattaaccaagaggaggttcaaggattccctcctttaccaatcaaattcatgtggggccaccacgggtacggaaccctacgagttacccccgaataggggggactaatctccaactccttaaatacttcccca

SEQ ID NO: 591131 - DNA, 3024 bp, Homo sapiens
gacagatacgactcgagctcggtaccgaactcgacaagtgtgcatgctgtccgctccactgtccgggatgtgaatcatccctttgtctagcgtgtccacgttgcagatgctccccgcctgtgaattggcagaaaagggtagcggtatcatgtatattaaaattggctaatattaagttattgcagataccacattcattatgctgcagtactgtacatatttttcttagaaattagctatttgtgcatatcagtatttgtaactttaacacattgttatgtgagaaatgttactggggaaatagatcagccacttttaaggtgctgtcatatatcttggaatgaatgacctaaaatcattttaaccattgctactggaaagtaacagagtcaaaattggaaggttttattcattcttgaatttttcctttctaaagagctcttctatttatacatgcctaaattcttttaaaatgtagagggatacctgtctgcataataaagctgatcatgttttgctacagtttgcaggtgaaaaaaaataaatattataaaatatgctattgtttttgtgttcttgctgcaatgcctttaccaaagtggccttaaatatgagtagtgaattgagaacatcttgaattcttaaaagacttcttagtgactttttataaaaaggccatgtagaaaatttattaaaactactatgactgctacattcaggaatatgccagtggtaaagcatttaaatgtagcttgtcagatttaccataatcctactaatttctttgcagcttattaattttgtgaaatttgtatatatgaagaatttgcatgtatgtgtatttacaaatttttctaagtatcttgaattctcagactgcaaaaggcctattttaactattgattttttttaaaaaaaattgtctttgaatgtattggaagtagacatgcattaactgtgacattattgcacctcagtttttttctttctttttttgggcaaactgatattatctataggatatttgtttatgtttgttttttgggggaaagaaactggaactcagtgttaccttaaagttacggaatactttgttttaaaggaaaagataataagtttagttatatctttttgttaatattcaaatgaacttgtttaagtatctatgtacagtaatgcctcattcatctagaggtaatctggcagtcttgtgaaaaccgaacacaactcagaaacttggaatcgttttttttaaaaatgcctctgagcaacccatataagtcacaaagtctgtgtgttagagcttatgcatttgtttttatgagagattttaataaatttaattatttgcttgtccagactatagcatattagctgtttagaagggatggcttgaaaggaaggagactgaaaaacactctgagagcatacactgtccaaggccattagtgtaaggaccgctacccagcctagaggacatcactatactacatcatctgatgattattctttattatgcctctaggtaattaagtaaaggtgaaattgcatacacagatatgtagtacatattttaaaagttttatcttaaattgattaaaactttttaaaaagctttggtattaaaagaggtaaacatcagtttcctcaaacattttattcatgttgaatgcctttttgcaatgatgactgagttgttatcatagtattttaaaacctgtatagtgttttagacttgttaaaacattgctgtctagtgtacatctagctaaaagtgtggtttatctaaaccgttttaataagcaagatgactgggaaatctctgccccttttctgagcagtatgcctcttcttttagaattaaatgaatgctgcacaggtccagatgtgtgttgatgtagacttgaaatgtctccacattttggaggacttcctcagcccttttcattgagggaaaatatatttgaatttctgttttagattgtatcgggtcccagttgattcatgtgtacaaagttatgctacctaattacagaccattacccaaatatcctaccaggctttccatctgaatagtaaattaaacagttgttatcaaaatgattttaaagactatttctttttctgggtaactattgaagtttgtaattaaatgggggctcttactgactttaaattagcgcttataaaataaaaatgtttagttcaagaagagacccaagctgggtatggtggtgtgagagcctgtgagtcctagctacctggaggtgaggtgggaacatcacttgagcccaggagttggaggctgcagtgcgctacgatcacaccactgcacaccagcctggggatagagtgagatcccatctctaaaaaatgaaaaaaagaagagaggtagctttaaagtggtttttctcatgatattcactgtttattattaaagaaaatcagctttcgttagacttttacatttagatttattcttagttttatatagaccatcaaaattatgttgagtactaaaaaggagaaaaaatcctggaaggtaacaaggctgaagaccttcaaatttcctggcttactggtttagtcacatcatttttcctgttcaggtatctgcagatatccctgttcaggaaagatcttttttcaggatggcaaacttttgacatagtttaaagacattttttccccattttttgaaatagagaatattttattatttttgtgaaaatagagttttggtaatcactttcttcctcaaaataagtccttctgttaatttgtaaaagcacattagtgctttacctgtgaaattccccgcccccctgcacacacacccactttagtacagttcctgtcaattggcaacatggagagggtgacctggctgctggtttaccactgtaccaacatctctggagcattttagtttcagaaccttaacactccccaacagctttgttgatgtagcttgtatctctgagaatttattgtattaaaattaatactgagatatttttaaaa

SEQ ID NO: 591132 - DNA, 145 bp, Homo sapiens
tagcagatcttgcggcggcgctccaccgtgtgtctatacattcactgccctgatctctcgcgttgcttctgtcttcgctctgtggatccggattgttgccaagtgataatctcaagacacctcccttagctactcaggaggccgg

SEQ ID NO: 591133 - DNA, 129 bp, Homo sapiens
aggtgctctagtaggatcccgggggtgtctagtttggctcatccagctgacgctgcaacttctctggtgccttctgtcgccgttcttctaggttctctttctctagcagtctgtgtcatactggctttg

SEQ ID NO: 591134 - DNA, 1662 bp, Homo sapiens
tggcggcggcggcggcggttgtcccggctgtgccggttggtgtggcccgtcagcccgcgtaccacagcgcccgggccgcgtcgagcccagtacagccaagccgctgcggccgggtccggcgcgggcggcgcgcgcagacggagggcggcggccgcggccagggcggcccgtgggaccgcgggcccccggcgcagcgctgcccggctcccggccctgccggcctcctcccttggcgccgcggccatggcggccagcgcgaagcggaagcaggaggagaagcacctgaagatgctgcgggacatgaccggcctcccgcacaaccgaaagtgcttcgactgcgaccagcgcggccccacctacgttaacatgacggtcggctccttcgtgtgtacctcctgctccggcagcctgcgaggattaaatccaccacacagggtgaaatctatctccatgacaacattcacacaacaggaaattgaattcttacaaaaacatggaaatgaagtctgtaaacagatttggctaggattatttgatgatagatcttcagcaattccagacttcagggatccacaaaaagtgaaagagtttctacaagaaaagtatgaaaagaaaagatggtatgtcccgccagaacaagccaaagtcgtggcatcagttcatgcatctatttcagggtcctctgccagtagcacaagcagcacacctgaggtcaaaccactgaaatctcttttaggggattctgcaccaacactgcacttaaataagggcacacctagtcagtccccagttgtaggtcgttctcaagggcagcagcaggagaagaagcaatttgaccttttaagtgatctcggctcagacatctttgctgctccagctcctcagtcaacagctacagccaattttgctaactttgcacatttcaacagtcatgcagctcagaattctgcaaatgcagattttgcaaactttgatgcatttggacagtctagtggttcgagtaattttggaggtttccccacagcaagtcactctccttttcagccccaaactacaggtggaagtgctgcatcagtaaatgctaattttgctcattttgataacttccccaaatcctccagtgctgattttggaaccttcaatacttcccagagtcatcaaacagcatcagctgttagtaaagtttcaacgaacaaagctggtttacagactgcagacaaatatgcagcacttgctaatttagacaatatcttcagtgccgggcaaggtatcaagctttaagcaaaacaaatacaaatttgtgttaaacagtgctcttaatttggttgtatttattaaaatctgaacatgctacacttttctcagttgttgtatagaaattttgtctgcactgtcattttgagtaaaatgttcacttgacacattttagacctgaaatatcaactacaaaactgaagacatagggactgatttgtaaactttcagtcttactagttgagaaaaattttattttgtcctagaaggcgtgctttacttttctttggctataaagagccaagaaaccccattggcagagctgaatggaggattatttggtggtttctgtaatatatttacttcgaacaattttccgttaacatcttggtgggttttttatattta

SEQ ID NO: 591135 - DNA, 355 bp, Homo sapiens
accacaagttatagtactggggaaaaccattaccagtgctgtcactttactattggcacactttcgtgtaaaaagtgagcctaagaataatgaatgacctgtatcttaaactcaagtaaaggtatccttaaccataaacccaataccctcccatatactcttaagtccttaagcacaatttctgcacatcatttatgctctcaatttaaggaaaataagaccatgtttcattttcaattatcacatgtataaacctaatgtgtcccaaagctgcatgtctataatgtcattcttgaacacaggacctccttctcattataggtgaactcagtaaaaagctcctctgacatatcac

SEQ ID NO: 591136 - DNA, 609 bp, Homo sapiens
  misc_feature (609)..(609): n is a, c, g, or t
ccactttatctcttcgtgtcatccccatgtgccttctggcgaggatgaagtgcttaggacctatctatgtgtcccttctctttgtctcatgtatgaagctcggaccttatttccagcggcgatgtgttatgcgctcgagggatggcacaccaaggagatggaagatgtggcttcaatcgcgtctttacaacgcactttgagccatgaaagaaatgatcccaaagtccctttgactagtctgaattggcctctatgcattaagtaaatcctctcccaagtcaacgtccgccttcactatctgaatatcactccattgctaacacacattcatgatgacattgatatgtaacactagaattttgccaaactaccacttcgctcgtcagccctagattgacctactagacttgataaaacttggtttgtactaaactacaactctcctgataacaccctttatatatgtgcaggcaccacaatttcatggtctcggctttgcctatactatctgtcgccgccaaaaaccttcactggagtggcccataatgcgccgtgcagctggcttgctggcatacatttcctgatattctcgcacatactattgcattn

SEQ ID NO: 591137 - DNA, 269 bp, Homo sapiens
ttcccccgtctgcgggccagtttgctgggtccccagaaatgtcatttatagtcgcgccgatggccgccgccagctctgtgtcacttgcttcgtgtgcagcgcttgtccctgtcctctggggtcgggccctctggtgcatctgccttataggcggcatatgcggaggcctccgcgagctttgcgatgtgttccacggcctgctccagctccatctgcttggctaactgggtcgcttctggggacggcccacaggcagacacgtcttcttt

SEQ ID NO: 591138 - DNA, 500 bp, Homo sapiens
  misc_feature (420)..(420): n is a, c, g, or t
tccaacagttttgcagtaccttttgatgaagatgacaaagatgattctgtctggtttttagaccatgattatttggaaaacatgtatgggatgttcaagaaggtcaatgccagagaaaggatagttgggtggtaccacacaggccccaaactgcacaagaatgatatcgccatcaatgaactcatgaagagatactgccccaactcaagtattggtcattatcgacgtgaagccaaaggacctaggacttcccaccgaagcctacatctcagtggaggaagttcatgacgatgggacgccaacgtcaaaaacttttgagcatgtgactagcgagattggagcagaggaggcggaggaagtcggagtggagcacttactaagagacatcaaggacactacagtggggactctctcccagcngatcacaaaccaggtccatggcttgaagggactgaactcccagctcctggatatcaggagctacctggagaaggtagcca

SEQ ID NO: 591139 - DNA, 656 bp, Homo sapiens
  misc_feature (168)..(168): n is a, c, g, or t
gcccgtccccttctgcccactcccgcttataggacgatgccctgcatgctgcccagccacttcaggagtaagtcgggaggcgtggagggtgaccacaccttggccttttgggaactttcctttgtgtgggtgccccacctgccgcatgctccctcctctcctacccantggtttgcttaaagcttccctttcagctggtgggacgatcgcccaggctggagctggccccgcttggtggcctgggatttggcacactccctttccttggggtgagggacagagccccacgctgttgacatcagcctgctttttcccctttgcggctttcactggtgagtttttgttttccctgggaagcctgggccagcacctttgagccttggcccacaattagggttaggcctttttgcctgggatgggctcccacccttcccttagggatggcctggattcacgcccttttgtttccttttggggtcaaagcccttcctacctttggtgatggtttccacaggaacaacagcatttttcaccaaaatgggtggccccaaccttgctgggacttggatcccaggggcttattttttcaagtgtggaaagggcagggtccacgcctcccctgtagcttatgaaattaactaattgaaaattcaaaa

SEQ ID NO: 591140 - DNA, 1287 bp, Homo sapiens
gaaatctatatcgaagtatacctgcgctacctatgcagagagcctctattatgctatgaagggcgctgggacagatgatcataccctcatcagagtcatggtaatccaggagtgagattgatctgtactaacatcaggacggagtttaggaagaatttgccaccatctcttatatatccactgattaacgggagatacatctggggactataagaaacgctcttactgctgctctgtggacgaagactgacctaaccgtgtcacggggcatgacgctccctgactgatgtgcctgcaaccagccccactgccttccattcagacaccatttagctgcattcgtatgccagtgccataacacacattgccattatgtcatactagacatgcatcatgaccagacacatacacgtcatagaagaacaatagtgactgctctctcactagcatctcttagtgcgcagatctctctcgaccagctgctcagtactcaaagtgtaactaaatggtacctaagtctccatgcctggcacatttcaccatcatataatactactaaacaaggaagggatagaaggtggataatagacctatggttaacaacacctccccatccgtacttacacattcgtcacccaatgaatcgcttctacatccagacagctataagcccattgaccattgagaacccttgtcacactgttcactcaccctgcacggctagcggcaaacatgaatgtattagcacccgtgtttctcccatcatggccagcattggctcttcccaacaacgcattagggcgggacgaacgtaaccactctgagctggtaaccccacagcaaactgcagtgggatccatgctggcgatacgcatcgcatcgatccacgccatgactcagaagacacgatgcatcacaaaatatcaagccatacagagtccccacgagggctcagcgtcgaactgtaatctccaacctggcccatcgagagaatagaaccagcccaacaccacgcgcgccacacccagtaacctgaatcaatccaccccatacacacatcacccccacccaacacaaaacaccaccaactaatcaaaattcacaaaacaagcgtgcactcccctccaccatcatttaatcacacgcagaatcctgaacacaccacacgccttgacccaaccccgatacttaccaaactaacaaaccatatatccactctttcttaatctccgtcagctatctttcattctttttttttctattttttcctctccaatcaatcccaca

SEQ ID NO: 591141 - DNA, 835 bp, Homo sapiens
agtaggagaacgctgtctatcttgcctggacatgaggaaacagtaacacgcgcttcggaatagcagccaagtatcagattgaccctgacgacctgcttctcggctaaagtgaacaactccagcctgatagtgttaccagtgatatagctcagactgctaaatgccaggtattaatttgacactgtcagctcttctggatggccaagaacgttcaatgctggtggccacaagcttggtctaggactggaatttcacgcattattgaatactgtacaatagtttaatttgaaagctattgttgcagctatagctaccttgcagaactactagtgtgatcttttagatgttgtatgtctagggatgcgacgtattgctaggagatgttagcgctccaggttaaagtggattcagcttataagatgttacccttccagaggtacagaagaaatgctatttccgaaaaagaggtccgttcagtggtagactcgtgggagaactgggtggcccctttgatatgccaggtacttgttggatctagacacatggctgcaagtggaagcggataatactgtaggcactttgtcaacttcatattgagtacaatgaatgaaattgtgattatcctgagaatcgaaccttggttccctaaacctaattgatgagaggctcgctgctagatggtgtgtacaaactcacctggactggggacttttaaagacagatcttcatgacctgttcccaccccagttcatcatcatctctttaacatcaaaaggtctgcacggtgtggaactgtcctagcgtgcatgtggggttggaaaggcggatgtgatga

SEQ ID NO: 591142 - DNA, 136 bp, Homo sapiens
tcgaggatacattggatagcggatgacggctacctagagaacctttgccttttatgctgcaattaccccttgactcagacggtcccacttcccttacccagtccacaatatgtactcaccagatgcttgtatatta

SEQ ID NO: 591143 - DNA, 675 bp, Homo sapiens
  misc_feature (1)..(1): n is a, c, g, or t
  misc_feature (263)..(263): n is a, c, g, or t
nccattcacactttgctgcatcttcagtatgaaagtgtagtttaaaaaccgtggatttttcaatttcggggcacattatatatgtgtctaaaatcgatgtgtaattcactttcctcttcacagggatctcactttaatttgggaaatgtatgtgtataaaacatggaacactgtggaaacccactcttgaacttccctggacatgattcagagactgattgaggaaagggctgaatgtctggctttagaggatgtttgtggtncggcaatgggaagctgggaaaattggcctcaggaagtggcagcacctcaccttttcttagaggagggagtcggtacacagatccaatttgtctgcaatggaaaggaccgggtcctttacctgggcctcgccttcttaagtgcccaggtggttggccgttgccatggcaacagttaccttggttatggggttgtgcgtcacaaggttcatagtcctggaaatcatggcagttgggatggtgtccatggggatggtgtccatgggggtggtgtccatgaggatggtgtccatggggggtggtgtccatggggatgctgtcctatgggtatcatgttcatgaggatggtgtgcatggggatggtgtccgtgcggatgctgttcatgggaatgatgcttatggggatggaggtcac

SEQ ID NO: 591144 - DNA, 204 bp, Homo sapiens
actttttttttcccctttcctattttcctaaaaagggtgacccaggggtttccgttggctgtatggccaccttttttgctgaagcctttttttgtaaaccccattcccttgttccgttttgttgtaaactgccttcccctaaaaggccctgttgataatgcttttttatgggggttttataagggggttaaaataaaagcttta

SEQ ID NO: 591145 - DNA, 635 bp, Homo sapiens
tcagtcgtcccgaactgaaatgtgtttgtgtatatatatatatattttttttttttcttaatccattcatcacctgatggacacttaagttgattctgtatctgggctatggtaagtagtgctgcaataaacacaggggtgtagatagctcttggctttactgatttcctttctttggaatatatacccagcagggggatcgcgggataatatggtggatctattttaagtttatgggggcacctccatactgttttccatatggacggtactattttacatccccatcaatagtgtactagcacttccctttcttcacatcctcatcagaatcagtaattcttggtctttttaataatagccattttaccggggagataatatttcatgggggtttggatatttcgattatgattagtgatgtggagcatttttccatatatctgcgggccattggtatgtcttttttggagcaaggtctatccagatcactggcccattttaaaatggggtaatagggtattcggtcatggagtcgaggcctttatacattcgggttattaaaaccttgatgaagggatagttggcaaatattttctcctatacggtgggtggtctcttcactctgtggactg

SEQ ID NO: 591146 - DNA, 686 bp, Homo sapiens
gggtctctgagggtcccacagcgctccccatgccgctcataccgcctaagcaacgcctcccaatcactcagcactttgtgaaagaaccggtctccttcgaccccagcaggagacgccagctgtaagagggaacttccgagcctccaggggcggggacacccccactgagcactgatgatgaggggtgcccgttgggcagaagaagctctggacagcagcttcttggggtctggagaatgaactggatttgttgaccgatattctggactgtcctatccgttgtcccgtaagagcgcagtgcagtctgataccgagccagattttagactgctgtcatagaggtagaccgtggaccagctgcttcagcactggccaacataccaagatggcaaccagacgataagaaactaccagagccggagccccagcccctttccctgccatccctgcaaaatgcctcgtctttggatgccaccaggctcttcaaaggactccaaggtcccagcttgataccctcagagtccgaccaagaagtcacgtctccatcccagtcctcaacagcttctgcagagccaagcatctggggggaccccaaacctctcctctcacagagcccctattcttcatctcacccttccacatgcagtgagatctaaggccagaaaaccatcctggtctcatgcacg

SEQ ID NO: 591147 - DNA, 214 bp, Homo sapiens
aagtcggcccatgttacgtacacatgaatatcagtaaagggatatacgtactcttaaaataccctgataggttgaaaaatcacataccaatccatgattgagtgatacagtcctcacataaataaacagcctgttcctcccactgagaagcctttgagcagcaagtagaatccctaagggaatgagtcctaattgccacggggaggaacgggca

SEQ ID NO: 591148 - DNA, 228 bp, Homo sapiens
  misc_feature (6)..(6): n is a, c, g, or t
gaatcncgcctgacacatagaatgcataaacgaggggggtccttctgcagatactctaatcactacacagctttctctataaaactacccataagcctttaacctttagagaaaaatgaaaaaggttaatgcttggaagccgggggaggactgaccacttcataagccagtacgtctgagctgagtatgcccccagaatccagccactactgataattcacaacggta

SEQ ID NO: 591149 - DNA, 177 bp, Homo sapiens
ctgactcgacggatctccagagtacagacgtactgaactgtgttatacaaaaccccacttagttctgtcctgcaggataatggccaaaaataaacattgagttgtatcatcctctaaaggtattggtgacagctggcaaattagagtatttgtcaagtggccttcataaaattagga

SEQ ID NO: 591150 - DNA, 180 bp, Homo sapiens
acggcttagaggggaacaatcactttgtcaatacatgtactgaacctgaattactcatatagtgtataaccataaatctcacacaagataaaacaaaaacgacagaatctgtacgaccatacgagctctccatatttatgtaacaccttatacttaactagtatatcgaataaagtataa

SEQ ID NO: 591151 - DNA, 263 bp, Homo sapiens
acacgcatgggtgtgtacgtgtgcatttcagctccgcttttacagctgaagtcacagaataccacggaccatgttcatctgtgttccttacactgcagctgttccttattgtggtttactctgctcccttttacagtgaacgatgatgtcttgtgctgggctggccgggcgcatcacccatcggcgttgcacgccgagtgggtgttgtgagtgtcatttagtgcgatgagtaggggaagggagcctactagggtgtagaatag

SEQ ID NO: 591152 - DNA, 323 bp, Homo sapiens
ttatgataggagaagagattaaaaaaatgatagaagaggatggaagccaggcacagtcgcacgcctgtaatcccagcactctggaaggccaaggcaggtggatcacctgaggtcaggagtttgacgcagcctggccaacatggtgaaactccgtctctactaaaaatacaaaaattagccgggcatggtggcgcgtgtctgtagtgccagctacttgggaggctgaggcaggagaatcacctgaacccaggagctggaggttgcagttagccaagtacgtgctactgcactccagctggggtgacaagagcgaaatccgtctc

SEQ ID NO: 591153 - DNA, 133 bp, Homo sapiens
tcgagccggtcctgaagctctttgaccctctcaggactagttctaagtagtgcaagggctgattagagcaaagggcagcagcagtaattaagaattgccttacttcctgcgtgatgggcctgaaatataggaa

SEQ ID NO: 591154 - DNA, 116 bp, Homo sapiens
gtcatacgtgggcatatgatgtctatgctagtgaaagtttggctccatctctgtatcatgtgcttggtggacaaataagttagacacaaatcaaataataggccaagcagtcgtcg

SEQ ID NO: 591155 - DNA, 336 bp, Homo sapiens
gctgactctcatactgactgtgtttcatgcttacataaaaacgagaaattccatcatataaataatacgtacatgcttcatcccacactcaaacgtcctctgcgggcaccttgcctttgagtccttgcttccaagaagcacagcatctttgaccaagtgtgtgtgagtgtgtttaaaggaaccacaaagcaaagatagggtttctctttttttcagagtccatcatcctaagactttctgtgttctctcctgtgactgagctgagtggagcttgtttgttcctcttctgaaaacaaggatattgtcttttccctttaaggagtagagtcatcatta

SEQ ID NO: 591156 - DNA, 1288 bp, Homo sapiens
ggttggccatggctgggcctgggcctgggctcctgctgttcccgtgttgctggcctgaggacgatctcgtgctgcatcatcttgccagtgggctgctggacttgtgcccgctcactggcttgtccctgcggacacagctttcttgcctgccacttgcctaggaggccctagtgtgggctgccctgcgaacgccctgcctgctggtgactctgcctccacttgcctgccatgggtctgcctgccgcatgcaatgcctgccatcctagcgtgaatgaaacactgctacttgcaagtgagccttgtgctctgacaatggtacctgtctgccgacctgtactgccgatgattacgtgtgctgtggcgtcctgacaccgtgcccccaggctcgcccgctcgttgccaccgtgtgcttcccaaagtttactctcctcctaccacaggcttgactgggcacggtctgactgtgccacaccatgagtctgacccagggtccaggggaaatctttgcatgactgcgatgttgggagcaggttaaggatgaagagatggcaattcacagcaggaaaacgatttggctacaacgtgcatctcctttgatacagggaacgcccatttgggttgggagctccagtcgtctgctcatgcagcatttcggtttcataggacggctctttgcacgtgacgattccaggaatgcgcctgccctaattcacggacgcttcctggggaaccccaggaagcaacagctgaaaccgttgagggccattccctcggtcgccacacgggcgttcctttgccttctcttggtgtggtgggactctctatctcgccagttgggccttctcctcgccagatctgtcttcggtagaggtttccacggcaccacatggcttgcaccgggacaaccacctcgcgcacgagtctttctacccagtgaaccccttagcaaggaaacccctcgagcggagaaccacgcttcccaccgacaaaggcccgtccaccatggggacagagacaggggtctttcctttcgcactgccgtcacacttttcgcgttggctatgacaacctaccatggtgagagggccccggggcatatcccttcgatcagtggctcccagattgtggcctgcacacgaggagatcaccgccgctgggaaacatccagaggacgaagaccattctcccgggcttgcgctccacgcggtggtaccgatacaaattctaacaacctttaaagctttttcgagacgtccttcttacccgtgctcactcgatgctgacagtt

SEQ ID NO: 591157 - DNA, 1449 bp, Homo sapiens
  misc_feature (166)..(166): n is a, c, g, or t
  misc_feature (576)..(576): n is a, c, g, or t
  misc_feature (1159)..(1159): n is a, c, g, or t
ggagagaactagtctcgagttttttgtattttttcttctgggaaaatgagcatattctgctttttgtgaggatacgggacacaggaatgggtggaaaaaagggaagcaagcccccctggccatcagtcccctctctctcagggtggtgctcggaatgttccatgcntattggcgagaaggcgacttctaggatctctcgccggggataacctcagatcctgacataatgggctgctcgagtacagggctgcgtgcactcagactgtgcgtgtgagcaacgcggttgcagggagtcattataacatgaggatggaagggggcagtgatgcgggtggaaagatggctgcggagggtggctttagtggcaactcgtggtctattcacttgtgcgcggtctattggaaaccgaaatttggtgggaaaagaagaagagatcgcttcgccgagcgtagtggacgtgtgaatgtgcgcattgacgaacgatcgtaaacgaggttggtgcagcgtgagaccttggcgtcatgtaaagcggttggtacatattgttcacttggaggggagcccattgtcatcacnaagacttctgttgacactcacgggggaagaggtggacaccgagttctccctctatagttcaaaggcacccattggtgggattacttgggccccatgtttgggaacacacactatgttttcgcaagtgagacatgtttatttccaaacgcatcttagaattgcaagcatctccgccaaggtgtgggccttcgtatagcgatagagaatttggcccaggcagggggctgtggcacataggttatcggggaaggccgcacagagtgacgcagtagggggagcgcagaatgagcctcatataaaagcagaaagcgcgggagagattacggagggagaaatccagcggcttatgattttgccccagaaaaggaggggcgacacagaaacgcggccccagcggggtgcaacacaccccacatggcggtggaggcctgcagcgaggccgcccctcgaaggaatgttggactgcacggtctgaaccaacgaacatcggccacagcggcaagagcttcgtaaaagggacaacaggtttgggggtggaaaaacttccccccgccgtggatttcgcggacgaaccaacacggancgggaccgtaaataagaagacgtcttgggggggcacctttagtagaccccagggggaaccaacttccccaagcggtccccaaaataaaaaaaaggacacgttcaaaccccggattctgtgttgaaaatgtgttgaccccccggcctaattatgtagaacgggtttttgaacaggtgggcatagaaaaacggccactctccccatttgttatatatcaaaggagggagttatgaagagggttgcaccatccctatgggagaattttaaacccagcgtttcacaacccagaa

SEQ ID NO: 591158 - DNA, 330 bp, Homo sapiens
acatctcacgtggccatagataggtacgcctgtggtttggtgacgacctacagtagtgctgatctgagtcggctgcacttgggacacctcagtgagctgatatgggtgggctgggcttggagatacctcagtgggctgcaatggctgcgccagagattgagtactccctaatggcctgagatgggtcggttggacttggggacacctcagtgggctgaaatggctgagccaggattgagtactccccaaaaagactgagatggatagtctggacttggaaagaccccaaaggtttgagactggctgctctgggtacccagcccggtccgg

SEQ ID NO: 591159 - DNA, 290 bp, Homo sapiens
ccggaagctcgggactgtgaggcagtagaattgcttggacatgggaggcggaggctgcagtgagttgagatggtgccactgcacttcagcctgggcaacggagtgagactccatctcaaaaacaaacaaactaacaaaaaaaatgtaattgacatgaaaaatagctgtttagatataaggagaaataatagatactatattagcagaacctgatttagttgggtcacgggtggggcttagaagcgtttctgaggaagttacacttaagctgagacaggtagaaattattt

SEQ ID NO: 591160 - DNA, 277 bp, Homo sapiens
  misc_feature (169)..(169): n is a, c, g, or t
ggggccgcgaatctgcaggtcgcgccgtgcgatctcgaagccgtcggtggtttcgcgcatcgtcgccagccgctcgcgcgctgtgggcgacagcggcgcctggtacatcagcaggcagaccgactcggcgcttccccgccccacgcgcccccttaactggtggagttgngccagcccgaaacgttcggcgtgttcgatcaccatcagcgatgcattgggaacgtcgacgcccacttcgatcacggtggtggccaccagcacctgcagccggttggcg

SEQ ID NO: 591161 - DNA, 99 bp, Homo sapiens
ctttcccccccccctttcccccctttttttttttggcaagggcccccacccctggttttttttttccccaggaaaggggttccccccccccctttttta

SEQ ID NO: 591162 - DNA, 146 bp, Homo sapiens
acgcaggtagacggcggtacgaaccccaagtgatgttgtgatgtaaggtgaaatattagttggcggatgaagcagatcgtgaggaacagtgagccagtaactgacgtgcaagtccgtgttaagcctgtggctacaaacaaatgttg

SEQ ID NO: 591163 - DNA, 521 bp, Homo sapiens
cggacccgttcccgccaccctgaggtttaagtgggcactgctgttgcacccaccctgaacacccagggccatttctttgtggaggatctaatctcctgtgagaagcatgcccgggagcgagtcaccccccctgagggttatgaagtggtcactgtgttccccaagtgagccagcagatccgacccctgttttccagcaggcctttggtgcagctttttctttcagtgtttgggccctctcctttcttgaaagttttctgcctactttggttttccctctgcttgtaaaacattgagtcccctccccgccttggttaattgactccccccagctgtgggatgcccgcttttcccattaaagggaaaactgttgtgttcagtgtccccttgtcagcaaccctgggtcccttcgcccccccgtttttttttgctgcatttggacatcagcccaatttgaaccccatcaaatataacgggtttgcccctgattttgtttttaccccataaatgtataggccccca

SEQ ID NO: 591164 - DNA, 350 bp, Homo sapiens
  misc_feature (31)..(31): n is a, c, g, or t
atttttagtagatatggggtttcaccatgtngggcatggctggtcccgagcttctgacctcgagtgatctgcctgccttggcctcctaaagtgctgagattacagacgtgagccactgtgcccagcctgtttaaccagtattcttcatgaccttggattttatttatgattatataatgggaggtaatatttagggaaggcatagatcttagttgtaaatttggatctgagaacttttctggaataacttggtatgtcatctactctgtagatgaagaatcatgtgtaaattttttttgtcagtaaatcattccacagttttattctggctaaaattgttgcttttttca

SEQ ID NO: 591165 - DNA, 396 bp, Homo sapiens
caggactattggaaggcgaaggtgagatagatcatgaggtctaggagtacgaggacagcctggccaaaatggcgaaatcccatctactactaaaaataagaacattagccagtgtgtggtggcacatacctgtggtcccagctcctctggaggctgaggcaggagaatcacttaaacccaggaggcggagattgcagtgagccgagaccacggcattggactccaggctgggcaacagagcacgactccatctcaaaaacaaacaaaaaaaaaaagagtgtcaccgggggctacttggccagacacagagagcaaaggagacatccctaataatctgtcaaaattcattgtgggggctgagcacagtgaatcatgcttgtaggtctcagcactttg
